United States Patent Application Publication US 2026/0058010 A1 - sequence listing, part 41

SEQ ID NO: 483 - DNA, 539086 bp, Homo sapiens
  source 1..539086: mol_type = genomic DNA
gaccagcgcaaacaggaacagtcactttgcaaaaaataagcagaccacaaaccaagccggggctctaccgagctttcacttgtcaacaagttctcgcagcctgcgaagtccaggacagatcccaaaggggagaatgtccccaaagaaaggcaagagagaagaacagagtttaaaacttcacccgagccatgcttgtccctcccccttccccctcccccaccgccgtggatcacagcgtcccgggacagagtgacagatgggccagaactccgcagactgctcctgcccgccgcggcccgagtgggggtgggcaagggaagggtcccgaggcctctagggcaacagggccccctccactcccccatccccggctctaaaagacagtgttggccgcagggtccccgagagatacgcggcccggcggggcccatccatggccatccacggcccccggcacgcgcatccagcccagcgccgccgcaccccggggtcccgcgcggggtccccgccccccggctgacccgcccgccgctgcgaccccgggcagcctcgccagctctccaccgttgtctcctcggctcactttttccgtattgctcccccaaccggcaaaactttctatttccccaaacactgccgtgcgcgcgcgcgcgtgcacacacacacactcacacacacacactcacacacactgacgtcttttgcgcatttcctgcattagagggagggagactcgctcgcacaccgacagagggagaggagaccgcgggggagcgcgggctggcgggcggcgagcgagcggcagccgagagcggggacgcggggagcgcggagggcgggcgccggcgcccaggaggtggggccgcgctgagtcgcagtccctgccccgccgccgcgctgcgcaccgcccggtgctggcctgcgcccccgagccggatcggcggccgcccggactccgagcccgcgcggatgtgagattccgggctcctggcgcctcccgatcgccggctccggcgcggcgctgcttcgcccaggaggcggcggccccggctggccgtggggcttgtggatttttaaaaatttggctccgaggaggaccatttcctctcgacatgcatccctccggatagactgaacatccctccgttcacccccccgccccgcgcggtcagaggcaggcgctgagtgtgcgaagaggatccgggttgaaatctgcgcccccggttctcgtccccgccccgtcccaccgccccatccccctcccggagtcgaaatttcccgggattatgtttcggaaaggtaggtaagcgccgggcgcggcgcccgctttcccgcagtccggagccggagagccagcgaggcggcgaggcagcccccgcggcttgcagcggagccgacagctcgtcttctcttctggaggtgcagctggtggtcggggggagagacttgctccaaacacggacatcccccagctctcccccctccctgttttccgttaggaacccggcgaggaaatacatgcactggctgagaatcgcccgcgccagggcgcaacgccacaaggtgtagggagtgtgcggggtggggcgaaaggggacccaagagtccctgtggctcggagtgccgggccgtcggttcttcattcctgccctcggggcagacggagtgaccccggcccccactccccgccccgaccatggtagtgttcaatggccttcttaagatcaaaatctgcgaggccgtgagcttgaagcccacagcctggtcgctgcgccatgcggtgggaccccggccgcagactttccttctcgacccctacattgccctcaatgtggacgactcgcgcatcggccaaacggccaccaagcagaagaccaacagcccggcctggcacgacgagttcgtcaccgatgtgtgcaacggacgcaagatcgagctggctgtctttcacgatgcccccataggctacgacgacttcgtggccaactgcaccatccagtttgaggagctgctgcagaacgggagccgccacttcgaggactgggtgagtgcggcgcctccccgtcattccgggaacccggttgtggggtcccggggaaagactcgctggtcttgatcgtagggctccgggacttattgacgactggggtgtgtgtgcctgtaagtctcagtttccttggggaggtacacttcacttcatagttggggagaaacaggcattggcgaggaagatgagacttggaaagaggatgtggccctctgctccctctgtgccctccagttggtgggtgctgcgggaggtttgcaaactgggagagcctgggccactggtgctgaaggttggccgaggacccggctttcttccgcaggcgcgtggtgggctggctgtgtgtgattgtgtgtgggtgggtccctccgtccttggaaaggcacgtggagcctttgactgaaggcttcttgcacgtcctggctttgtcctgcttagccgagcgaggagttgctttatttttccctccgagaggaagctggcttgtttctattctcttgcatggtggttagctcatcttctgacatacaagtagaaaaaatgtgttctcctccaggatgtctcctctatggtcccagaaacatcagtcgagcttgttttgtccaattcattgcccatccatgcagaatgaatgttgcattttaagaagggttctgcttgtgggtaattggaagtcagtgctttgaatcttatttaaagttatattgtttctctgttttgattgtcaagatactgtgcaataaaagacgatttctaagtatgagattgagttgttaattgattccattattaaactattaaggatttggaaagaggtcttgtctcaatctactataaaccaaatgcatccagtcttggcacttggacaagcagagagaagcaaaccttcattttgctttttgtgtttgtttttgggttgtttttttttttttttttttttttttctctcttcttggaaggaaggtattaatttaggatgtggatttttgtgttttcaggtttgttacatgtttccagcaagtacaagcgttcctctggaggtatatgttttcagggttctttggtctacacaaaaagtgagagagctatctaagcctcaaaagtggtgtagagcaattgctttctattgaaaaccagctaacttcatgaatgtcctagaggtcagaggttgcacatggatcactttggcatatcaccttacatatttttttcaaggacacggagttttagggaaaaataagagagagcctgttgtttttgtgctcatggctgtgatgtagtctgcctgaaaccatggttacggtttcacagggaagctccaacaagccacatgcgtagaactctagatttgtggtttgcactttggaaagcaggcaaacctttatggaatcccagagaactccatgccattctattctacttcacagatgtccctcatctctgcttccttcagcccccacaacagagctcccactcattccccatttcttttccatgcatggcctttgggccctttcctcatgaatgcagtgcatatgagagggggagtggaagggataactaatttcagaggtagaccttgactctgaaaacctgtgattttggagttgttgtttttggacaggaagggggtggaaaaaacttgacgctggtagctaggagatgggagccttttgcagtgtatgcagatgaggggcttggacagtggggcagagagcagggatgaggagcagcaggtctgcatttatccatagaacagatgttggttggagggagagtgtctttgtatctctggtgatgcttcactggggcacaccccaaactctgggagcttcaggacactgtccccaccttcatccctcctagtgaagcatgcagtgggaacttgtttggttatcatcctctaaggttctcaaattcatgttggatttggccctaggccagatcatctagtgcacaggcaagttttacagatgaggacattgagttccagagaagctagttggggaccgagggtcacatgacaagcaaaggtgggttggaagtagggccctcaccgcctgttgcccatggcttgtctgatggggagccgagcctgcccatctggcctcccagcctattctccctgcagatccatgtgctgtgtccctgacatttttattgtacttgataacttcatctcttttgccttatagcaactgtgaattaggtatggcaggtattggacaaactaaaaaacttgagatagagaagcccaaagtctgaaggatgagtcaagcagtggagcaggttcagaatgcccatctgttttcaccagaggatgctgtagccactctggttcctccaggctgaaggtggggactcattggcaggggtgactggcccctggaaatggagacaagttgcagctgggctaagttcacctttcccagtcttaacattcagggtaaacccatggtttcatagctttgggtagaattccctgggctcaggtctcttcactccttacctggcaggaatgaagaaacacacccttctcaggtgtggctgagagatctggcctgaagtaaggggatgtggatagcataaagcagccgtttctctcatttttgcggaacaccgaattctgccgcactttgaattcacttgtattcctggagttcctgttttgtgctcatgtctaaccagggaagcttctcactgtgggccatccagaggaaaatgaggccctgggttactctcaaggggcttccatttcaccaaggaattgacaccaagtacccacatatacatcaagcttgtctaacccatggcctgttagccacatgtggcccgggatggctttgaatgcagcccaacacaaatttgtacactttcctaaaacgttataagtttttttgcattttttttttttttagcttatcagctatcattggtgttagtgtattttatgtgtggcccaagacaattcttcttccgatgtggcccagggaagcctaaaagttggacaccctgatgtagacacttaactagcaattaggttccacacaggtggtaccattagtgtgttaagagtttaaaaagggagtgtgggctaggcactgtggctcatgcctgcaatcccaactacttgggaggctgagctgggaggaccgtttgagtccagaagttcaagatcagcctaggcaacgtagtaagactccataactacaagaaacttaaaaattagccaaatctggacctgcggtgtggtgtgtgcctgtagtcccagctactcaggaggccaaagtgggaggattacttgagtccaggagttcaaggctgcagtgtgctatgatctgaccatcaggccacggcattccagcctgggtgacagagtgataccctgtctcttgaaaaaaaaaaaaaaaaaaaaaaaaaggtagggagaactggaagaatccaggagggtttttggaaggaggcatgagctgagtgtgaaacagtaggttatatttaaagaggtatctacaagaaggagcagtgttcctggcatggccaccgcaggaataaaggcagacaatcctgtagtcagggttggagaatggatgagcaggacagaaactgagtgtacctgtcagaaaggagtgggcaggacaaggtttcccaaatttaagacttttttctgagtactgcctgtgctttcatttacttaatatttaaaaaattgattcttttattttccacgtagtcttttcttaagccccactattcatgaaatcacaggtttggagcatgtagttataacttttctttgttcacattaaaataaacagggctctacaatacagaaacaaagttcattccaagtgcctctgaacatcattagtgatgtggggcccacacttcggaaacattggagtaggaaaaagtttagaaaactgaggtgaattctagaatgcgtaaaagccaagctgagataattattctccagataatgagagatgtttcagttgtgatgacaaaggaggttgctttagagaaagctcattacaaagagaaggaaagattttgctgatgctttgaagtaaaatctattataacactattgctatagctgggttttccaagaaccagttaataacgctactcagactttcatgtacataagaatcagtaagggagggcatataaaagatagatctatatagatttatatagatccatatagataaaaatatagatcctctggcccaaccttgagagcttttgatgctacaatttggaataagctgggaatctacatttttaaccagctgtcccagagattctgaccagaccaggcttgctttgagaaacattgggctagaatagaaattgcaggccagagagggctccagataattaatggatcaagcatttttacatagatatgtcctgaaatgtgactgtataactttataatttttaaagaaagatttagaataataattgtgtgaactagaagtattgggattcatgttagaagcagaggctgaatgaatgctggatggattggcattgcatttagcacaggggtgggaggcaggcggagcaaggattagggcttgaagggctgcatgcaggtgacagctagctggctcgttcacattttggatttttctctatcattgcttcagtagtctacacactgagctcagtttcctctttgttctactgccctgcctctgaagacatctttggcgaatgtcactcccttgctgtattctgtagaagaggcaggcactcagaatccagaggtacagaaagccatcatttgagaggtgattccccggagcagcgaagtctggagtcacactgcttggacttgaatcccacttctaccatctaccactttcatgacctttagcgagtgacttaaccttccgtatttccattccttcccctgtacaaagtgggtgataataaatatacctccctataatgaaatgggtttactgtggggattaaaatgagttaatacatgtacaatgcatacaccaatgcttggtccctagtaactgctcaatgcatatctactataattattattattatagcccccaaaatgagcatggggctggcctagagagagtttttgactgaattgattattatataggccacgagaaagctaggttttcatattctccaaagtagctctcttcagtctggccatctcatttggcaaagaatgggacactagaagtgtcatttctggtttgtatttcccaagtagcccatcggcaaagcttttcaaaatgatggcacccctgctgactctgggagataggcctataccctgtttggactctgggagataggcctgtacatcattcggagaggttaggctctgaggccgttctcccttggcccaccagaatcacttgggggagattcatgcaacacagatgccagggcacagcctctagcagtgctgattctgatgccccgaatggagcctgagttaagcaggacccctgctgcatctcctacaatggcagcctgaccgcactttgatatatgttactctagagcacatctctatcttcaggacatttgtaggaaaaaattttttaaaaggatttctgaaacctccattgtcatttaaacacagtggggtgggaagggactactaagggggtaaggaggtagggaagggctggcaattgtccatacctccttcgtgtgcgcctataccctgaattatttccccagcagccaagggtccctggatctccctttcccctactcccataataccatgtaatccaatattgctctcattggtccatagctggttgtttaacaactacccaaaggattcattcttggcccagtgctatcacagacaacctcttggcattgggtccctagagttaaggacctgagttagccttcaacttcatggacagtcaagcgttgtttgaactgtttcttcttcttagtgtctttgaccagcagcagatttagtgaatatttgagaccctgaattccctggctcctcaatggaccgctctccctggattcagtgagttctaactggaaggcatctccaccactcactagttgtgtgactttgagcatgtgacttaggctttttaagcccgtttcttcatctgtaaaatggaaatgtcgtaggtcttgactttcagagttgctatgagaattaaataaggaactataaagcttgtagcaagtggtctggctataatacatttcagcaattttattaatatttgaagagtcatttgtgtgttcatagttttagaatcttaaatcagaacatatggtccagtgaaatatatttttctccttgatttgtgaatgtatttatatgaaaagtcttacatactctaaaaataaatttgacttagttatacttaacaaattgccctttggaagataatagaattacttgaaatgagattgttctggaaagtctagaagctgcggtcattgtagacaaaggttaattatttattgaagaggtatgggtaattggaaatgaggatatttgggagctggtgttttggttttactgtgccaatgtcatctagtttcatggatttaaatacactttcagtgctgttgacactaaattcctaattccagctcatgcctgaccctgaactctagactttatatatgggattgccttcaggtcctcagctttcattgtgtaaagggcatcttaaactccatatgcctaatattgtatacctattttcccctctcctcaatctaagcccttcttcctcagcttaagaaatggcaactccatccttccaattacccagccaaaaaccttgaggggccatccttgacgcctgtaattctcaggtgccccatatcttatccatcagcaacatctgctctttctgccttcaaaatatatctcagatcacatcctttccatacctttgctgacctcacttgggtccaagtcactattatctcacacctggattatttcaacagcctctgaattgcttccacctgtcctggcttctcagctcctgtctctgctcacagatctctcaggtgagattatcccttaccataatttacaagaccaacaaagtcaggccttctgctgtgacctctctgaccctatcacttgccactcttctccctgttcattcctctctagctatcctgacccacttgacaccccttaaatgcacttaccatgctcctgcctcagtctttacccttgccatcccatttttttagaatgcccttttcccagatatccacatggctcaagtcttcgctcagatgttatgttctcagtaaggccttttctggcaatcctatctaaaagttcaccctcttattttatgcttcatatgcgcctttcctgcctttttttttttttactctttactcttacctctatctgatacgctatttagttttcttatttatctttgttgtttatttctaataccagaacaccagacgctctataaatgtagagctttttgttcaccgctttatctcagcacccaaaacagtgcctggcactttgttgaatgaatgaataaattgttgaatgaatgaataaatttcttggcacattgttgaatgaatgaatgaatgaatgaacacaaaacaagtgtgtatttctatagtacctactatggtctagcactgttggtagatatggggtttggtaacacaaaagttgtgtatgtgtagttcctgcctctgaggagcatggcatctcgatagaaaccagttgaatgaatttcttaaacaatccttctgtacagttgaaagaagtgaggaggaggaggaaggagaaaaggatattttattttataaaaatctatgagatccctgaagatgttcttatgagagaatgctatattatttccacatagcaatttgcatcaagctgaagaatctccgtcaagtctgaatttcccaaaagtaggaattttctaccctctgagtgcccagggcccattccaggtgccatggtgagggaagaagaaaaaggcccacttgtcctccatttgcagagtttaaatgaagttcaaattctcatcagggctttagatacaaaaccctttgtagttggcagcaacaagaaacgaaatttcaaattccggcgcctgaactcatagagctattgaagcatgttcagacaaagcttccaggggtttcacttaggctaaaataactccagagcaggcctgcaatattttacataaataaaagctacacttggcaaaacattatatttctctccaagttcctctgggtatatatgggcttgttagtaattacaatctattataatgctaatcagcatggttgcacctgtttgagatttagttttctgtcagaaaccatgtgaagtggccaaaagtctgtactgtgctgggagaaccaggaggacaggaacatacaattcatcgtaactcactgacatctaaacaaaattgaaactccagaggaaatataactgaaatctgtaatactgtgctggggaagaggaggaaaaacagaagcctatcatgaaacccagatgctgaaatgaggatctcctctctcctcatccctgacctctaccccaccttgaagtctcaaagaggtagttttatgttagtgaaaagtcacctgtatttgccagcaaggagtagactcactgagctcctgaccccaagagatagataagactaaaaatgtaatcaagcttaagaagagttttttaaaatttgagatggagtcttgctctgttgcccaggctggagtgcagtggcatgatatcggatcactgcaacctctgcctcccgggttcaagcgattctcctgtctcagcctcccaagtagctgggattacaagcatgagccaccacacccgactaatttctgtatttttagtagaaacagggtttcaccatgttggccagggtggtcttaaactcctgaccttaagtgatccacccgcctcagcctcccaaaattctgggattatataagagaagtgagccactgcgcctggcttcaagaagagttttttttgttttgttttgttttttgttttttgtttttttttttttttttagaaggagtctcgctctgtcgcccaggctggagtgcaatggtgccatctttactcactgcaagctccgcctcccgggttcacaccattcttctgcctcagcctcccgagtagctgggactacaggtgcccgccaccacgcccagctaatttttttttttttttttgtatttttagtaaggaaggggtttcaccatgttagccatgatggtctcaatctcctcacctcatgatccacccgccttggcctcccaaagtgctggaattacaggcgtgagctactgtccccagcctagaagagttttaaaaaatcatgatgagtgaatctagaactaattattgaggagaaaaatagtctttgattttgcttatgtcctttttgaatagatttgttttttcagactatggcatcttttgttgccagtcttctttccccaggcagatataagcatctcgtgaacaggaagtgtccccctctacccccctttagctctctgggatctgtcttgtagaagctcaaatagtcagtattctttaatcagactgactgagtctgtgctcttagaagttcatcatttggtacagtgctgaaaaagaaagaattcacaaaagattcaaagcagtggacagagtagtatattcattcattgttctggccgtcctttcattcactgagcaaatatttattgaatatgccaggtgctatgcccactatgtcaagaactggtcgttgctctcagagagcatacactctactaggagacacgacattaatcaaagaataacataaatatatgatctgtaaaattacaaccgagaagcacagcttactacaatcctttcagagcctggggaaacctagatctcacttcttcaggactggattggctaattttttttctctctctatgaaatgtattgaataggggagtcaggtgactcctattaatttcccagctgtgaaatcaggagttaggatagtctagatgctctgtaaaggcacctgttaacaatgatcctgactcagctcctggaccctacattctgggccttggctacggttaaccttcgcacctgataatagtttgtctttattattctccatgaagtttagccttgtctcccctgcaaaagggccagctcctgcttttttttttccctctttgcctttcttctttgttgtgatcgaaatcacaaagctatttttgatagcttgcttctttacctacctttgttcaaggcccacaaaaaataaatttaattcttaaatggagccctctctctgtatcattaagccactcaaagagtactctgaaaacaagcaagcaagcaagcaagcaagcaagcagaattcctagaatgtaaggtgtatgaacctatctccctgccttctgcactgatgattatctcaaccagtttaggtagctgagagaatcatcaatcagccattaaagatggagcatataattgaccagcgtttgccagattgactttcaaggagtgggagccttatttattttcaggtctctgtgatcaaagaggttgggaaatgttacagagtcaaatgcacattagtgtattaaagactcaagatggtctatcgcaaagcgagttgtacacgtctgtttaaccagatatgtccccaaaatatttcatcatagaatgcttttatttgggaaacattaagaactcatgttttgtggacatattttgaaaaacattataattagaaaaaagaaatggatattctcaagtgggccattcggaaaatcaagattaacacccttttataaaacagtgaatttgaagaactgtgggaattcaaaggagaggggaattaatgtgggttctgctagttggcagaggcttcttggtaatattttgagccaggccttgaggaaaatgggatctaaatagacagggaaaggagcccctctaaactggaagaagaatatagaaaatgttggacagctcacgcctgtaatcccagcactttgggaggccgaggcaggcggatcacaaggtcaagagatcgagaccatcctggctaacacagtgaaaccccatctctactaaaaatacaaaaaattagccaggcgtggtggcaggcacctgtagttccagctacttgggaggctgaggcaggagaatggcatgaacccaggaggcggaagttgcagtgagccgatgttacgccactgcgctctagcctgggtgacagagcgagactccgtctcaaaaaaaaaaaagaaaatgttggacaggcagtttttagcattttgtgttatgagggcagtcaggagaccagttaagattaaagtaggaatgcactccagaaaaattgcccgattaaaaaaacaaaaaccaaaacaaactatccaaagaacgggaacagtagctagaatggatgttcattcattaatctatccattcatctagccaaccagccattcaacaaacatatattgagtactttctatgttctaggaactttgcttggagcaaagtgttgaacaaaatcactagtgatatattgaagttttaattatccaggaaatctatgctgacaatctcacatgctgcatttccaattaattttcttttgtttgtttattgataggtctgatagggatggagaataactttgtagcatccttcatgtcattggatagtggtttgtccaagttcacagatctaaaactagtagaatgggctttggagttagtcctcggtttgaaatctagttttatcagttttggctgcatattggacaaataatttagcctatatgtaccagtctcctcatccataaaatgggaataatagctaccttatagcaagtttgcgatcaatggttaactacttattattggtaattatctgtgattaatgtttattattagatgcaggtaaaattgtgcttctgtttggggattttattagtaataaccaactgaagggttgccagtaaaacctttccagtccttatgtccctccctcttggaaatgaatgagcaacaggagttgggtttgctatattccaagtgtacagaactacaatttcacacttggttctttttaaacagctcctagggtgggaggtgaggggaacatggattaccttcccttggactggcttctgtcttagtcactggggacatctgtctcattgctcccttttgtgtatttgaaaagctgagacattgttgcattttgacctgaacatcctctgcattagcttgtgggcctagtgtggtaactgaggcttaaggctttttttcacatcccattttgtgtggtccaggtgtatatcccatttctctgggccaaagcatctgacttcattttcctaccatgtgagtcttatatatgcccaacctctaatgcagtgcacactgattgttcagttgtcctgggccaaatttgggcagtgcacaaaggtgctgcctttagagagcaaagctttgctttccaccacgatgttggaattgctaaagagtaacaagagttgaagcatagccagccttctgaaaagattactgtactctcagtgaggaaatatgcatttacttgtaattgttaagagccttgatctttaagctcggatttcattttacataatttacatttaagtaacaaaaatatatgtggcaagtagaagaggatcacttctcagaaattgctttttcttcttctttgcaaccatagaaatccttttcttcctttaaaacattcagaattcacccaagagcaggaggtcttgttcttctgctttgtagctttgtgactttgagaaaattcacttaacctcctcaaacttctgtttgctaatttaaaaaaagggttaataacagtcatcttttgcagtttgttgagttgctgtgaggattaaataagatagatgtaggtgaaatgtttgggcatttaagtaagcatcaactctctgccccagttgatgagcaactgtgagcttctgcagagtcaccacgtcttgaagtagaaaaaaaagtttctctttggtacccatgctcctttgtcttctttgcttcttcatgacaccatcctatttctcttgcaggtgcactgagcccagagttgccagaggaaatacaggatgctcagttaaatttgaattgcaggtaaacaatgaatacttttttttctatagatatgtcctaggtattgcatgggacattcttatactacaaaagtatttgttgttcatatgcaattcaaatttagcttggccttcgatttttctttgctaaagctggcaacctaggcttctgcttcccactaccccaataatgaaacatgcccaggaatggatctgcttgtcctcttgtccctgtgagggcagaggagggaaacgtagcctcttgttaaaataattccagccttggtgtaagtaggtaacatatttttgatgagggacccctttctagggcttctagagtcatggagaaggcctcctaccttaacgtttgaagtttattccctgccattagcctgctacaggaccgcttccttctcctcccctgatggtgaatatcagggctctgttcatagaaggtgcacaattcctggccatgactacctagctggttttaaaaaatatttccttcgttttagaaaagaatatcccatttaagctccaggtgcctgagtactaattcatggagacagctataggaggggtttttatatctttattagtctggttccctggaatccaggggatttgtgtatgagttgtgtggggatcatggcactaaatacccttccggttgctcagaacccaccattgtctcctgccagccccagttgcctacatagtgaagtctgctcatccctccagacatccagggccctgtgtggtttgcacctccccggcttccattttctgccaggtggatctcttatcctctggggtaggaaccttctgcttgagggcttgtttctaactttcatacccaaactctttctatcccttctttgtgctctgctctcccatatccccatccctgggatactctaaccagccatccaaatccccttctctttgggcgatcattcccagaattctccaggctacagctcttttggctcttggaattgcggtaacatttactgtttgtgccctccgtttaaaattactgatgcccagtgttgatgctttctctcttttctttagcagacacagaagaggtctgttcctgagggtaaaactcctgcctttttgtgctaatgcttggcatattgccccacacataacagatgcttgattggttaaatttaaaaacaaatttatttaagtgggggtcttcctctgtcacccaggctagaatgcagtggtgtgatcataactcactgcaaccttgaactcatggggtcaagggatcctcttgcctcagcctcccaagtagctgggattataggcacacactaccatgcctagctaatttttaaaagttttttgtagaggctgggtacagtggctcatgcctgtaatcccagcactttgggaggccggggcgggcgaatcacctgaggtcaggagttcgagaccagcctggccaacatggtgaaaccccatctctactaaaaatacaaaaagtagccggatgtggtggcacacacctgtaatcccagctacttgggaggctgaggcacgagaatagcttgaaccctggagggggaggttgcggtgagccgagatcacaccactgcactccagcctgggtaacaggttgagactctgtctcaaaaaaaaatttttttttatcgagatggagtctcactgtgttccccaggctgatctcaaactcctggcatcaagtgatcctctcacttcggcctcccaaagtgctgggattataggcgtgagccaccatgcccagcctggttaagtaaaattttaacatgaatttataatattgatctaaataatagacttcctttgggtatttgcactagggtattctcctttcttccataactgaagagagtgtagtattgtaaaaaaaattgcatgcacgcacacacctgtatgaactttaaaaaaggaaaaggccaacacatgaggaggatttttatcttttacttcagcattattgttaaaaattagttatgtttattttttagagcagttttaggtttataaaaaaatagggcagaaagtactgagttcccatataccccctcacctccacacctagttttccttgttattatatatgttttaacttcaaaaaaaaaaaagtgaaaaaggatgcagcacaaccaccagatatggaaccaagtggcactgtggttaagtggaagggctttatatgacagggagatggattctaatcctggtcccaccactgaaccagtcgtgtgaccttttgacaagttgtgtaacctctctgaggtttcttcatctgtaaaactaagtcagtactatctatctaattgtgtttgaaataaataatataatgcatagaaagtgcatagaaaagttcttgtcacggctgggcacggtggcttatgtctggaatcccagcactttgagaggccgaggcggttgtatcacttgaggtcaggagttcgagaccagcctggccaacatggagaaaccccgtctgtactaaaaatacaaaaattagccggggatggtggtgagcgcctgtactctcagctactcaggaggctgaggcaggagaatcgcttgaacctgggaggtggaagctgcagtgactgagatggcgccaatgcactccagcctgggtgagaaaagtgcttgtcatgtgatagaacacacaaaaatgtttgctattgctattataatactattgtaaaatataaattgtggatgatgtggtttgggactgaagatattgtcgaagaatccatttggtttataattctttatgtccgacagttacttggggctaggggttgcttgtcatctcagtggtgtgtcctagacggatggtctttctccttataatgagttacataggaaatggctgtggtttgccaaatgtctatttgctgcccactgtcaagcatttataggctagcatatattcataaagtactacattcacagtttgctagttcacttttcaccctctcggtgctaatgagctgtgtgaccttgatgaagctgaaacctctctgagctccagcttcctcagctgtaaaatgggaatagtcacattggccctgcttatctcacggagttgtgagactcatttaatatgcatccgaaaagaaaaacatgtcacacacatgtaagtaatagtgatgaaccactttgggattcagggagggggacggccctttcgtatacagtttacaaatggagaaaccgaggataaagggtgcctcttggtagggactagaatgggactcagaccttatttccccaagtccctgatcacactaagcaacatttgggtttcttagccaaatagtctgcctcattctttcacattgttgggactgaagatttaaaattaatctgtgggttttgtttctaggaaacttgtgtcttagaagcccaccccctcacacaagagaacgtgtctctttctcattgcttccttatccctacttggctctttaaaaatttttctttatcactgcttatcatatgactgtgcacagacaaccgtaaagccaactattttaaggggaaaaggggaggaagacagataagacagtgattcagaaacaagcaggaaaatggagtcatgtggctgtccccttgtgggtgggatttacagcagtgttttagactaagaaagcctccttttcgcctggagaatgaattaggcccatcaggaatgtgttttagaacccggagggagcactccttcacaagtctctcatgtggccagcctcagtgctgggctgtgttctcttaccgcgcagcgtggctgaagcctctgctctgtgcctgggactggactgagcttgatacagtgggggctccaatagagaggtcctggtgcttgtccccaaggtataaaaaagggagaaatggctacttgaaaagactgatctgatcacatcagtttcagggagggcaggaagaaactaggccttgtcctactctgttcgtagaaatataaattagcggcacctttttggaaagcaaaaaggtagtatctgtgaaaattaaaatgtatatcggccgggcatggtggctcatgcctgtaattccagaacttggggaggccaaggtgggcgtatcacttgatgtcaggagttcaagaccagcctggccaacatggcgaaaccccgtctctactaaaaatacaaaaattagccaggcatggaggcaggtgccagtaatcccagctattttgggggctgaggcacgagaatcacttgaacccaggaggcagaggttgcagtgagctgagattgcaccactgcactccagcctgggcaacagagtgagactcagtctcaaaataaaataaaataaaatttatataatcaagacgatcaagtctgttattagttatcagtcatacatagatgtgtgacgcactaatattatttaagtaatttgcctctgctagctgaagaggtggctctatggacacccccacccagtaagtcggccgcgtgccttctctaatgggatttgaattttaggaaagtgaggcatcatctgactctttccaaatttaaatctgttaagaacctttagggtttaatatgctttttgtataggctccatttttctttctgaaggagaaagacgtgagaaaaagagaataaaggcatatcctgtctaggctattggttttcaaactctgggtcaggaccctcaatgaagttgatgaaatcaattgcgtggatctctacaacaattttaaatatgaaaattgaacaatatacacattatcagaatgctttgtatgcaatatgaataaatattgccttataaaactcctatttcagttttatttatgtgagtacgtatgatcttaattcttactgtgagtcccagtttaaaaaaacattgagaaatattgccccagaacacagtttctcattcaatctaattttaatgagtaccagtaacatggagaaaagaaagtaaagaggatagggttccctgcactcaataaacttacattttactaacccaaacaattccataaaagcaaatatgttatcattccccagggaaagactgacgaaggatttgtagaggaggtggcttttgacctaggccttgaaggatggatcggatagactggttctgagaaacctgcctgactactccttagtaaacaagtctctgacgacaaataatgctgcagtgccctgatgaacagaaataccttctgtggcctgaaagcccccatctcttgaaacccctgcaagtggcattcaacatcagatagtggtgcttcagggttcctgggttgaattgttggaaattcaaggtcagagagcttagttcatgccctgtaatacaaggcgggtttcctcagctctagccatacttcaactggcactggagagttttgtaccttctgatcaggaatgcagcatctttggaagataaggtgtttgcggccttacccctcaggagactgcacaatggggatacatttattcaacaatttgtactgttttcttttgattctcccatcaaacttgtatggtagtgaatatattcaaagcgggaattaagatattcctcttaatttgacatttcaggacaagacccagggaagttaaatgatgaattgggggccaaggcagatgaatgagcacctggatgtcttgctttttaggacaaaggttttttactgcacatgcacgggtatatagtctcccaaacacactaggtacaggaggcctagggcctggcctagaaggtattgatatcagtaccattacacatttaataccattatccatttatgcatttaagctctatttaaaaaggcaatcaaatgaatcaaaatttcttcttttgttctttccttcctaccttattctttgccttccattcccctctgcctccccccaccagccttctctcactttctttctcttagagaagattaggtaggggaaaggttcgtagaccattttacctccaattgaaaaaatgtaaatctgctatataataagagatattcattaaatcttcatttctacataaaaatataagagttcagaagtttagtgacttgatcaaagtaaaaaaaaaatccagtagaggacaggtatggtggttcacacctgtaatccaagcactttgcgaggccgaggcagggggattgcttgaggtcaagaccagcctggccaacatggcaagacactgtctctacaaaaacattttacaaattatctaggcatgacggcatgcacctgtggccccggctacttgggaggctgaggcaggaggatcacttgagcctaaaaggtcaaaggtacaatgagccatgattatgccactgtactctagcttgggtggcagagtgagaccccctgtctcaaaaaaaaaaaaaaaaaaaagaggaaaggaaaaaatccagtagagacagaaaaagtatgagtaaacaggtttcctgattcctagtaaggtacttacattgctatatcatgctgcatccagtcaccattcatccatcatgcttccatcattcatccatctctacatccatccatctgtctatgcatccatccatccatccatccatccatccatccacccacccatccattcatccatctctatatccatccatccatccacccatcaattcgtccatccatctcttcattcatccattcattcatccatctctacatccatccatccatccatctatgtatccatccatccatctattcatctatctctccatccatccatccagccagccagccagccagctggacagccaggcagccagacagcctgtcagtttattggtcatatagttgatgctaatgccatgtgtctaaaatttttagtaagggagtctgatttattattatcattattattttcaatttgcttttcagctattgactgaggttgcggcaattgaccagactaccctgtgggctgataaaacctgaaacttgtctatttggttgagattaccatttgtctgtccctcagtggctggtctttacatgtcaagaggatggtaaaaactgccataagggactgaacacagtgcctcacgcctgtaatcccagcactgtgagaggctgaggtgggaggatagcttgagccaggagtttgagaccagcctgggcaacgtagtaagagccagtctctaaaaaaatttttaaaaattagctgggtgtggtggcatgcatttgtagtctcagctgctccaggaggctgaggcaggaagactgcatgagcccaggagtttgaggctgtggtgagctatgatggcaccactctactccagcctgggcagcagagcaacagagcaagtccctgtctctaataaaaacaaacaaacaaaccaaaaaccacagtgagagatttttttttaaagactcctccactcctttttttgggttacattgtttttgttccccctactttctgaactctctggagtgtcaggatactttgacttttgtgattcaatcagcctactgcaatggtagattcttcctttcaagttgtaactcttcccttggagcagggtttcccaaaatgtgttccaaacaatataagaagtgaataggtcattcacactcaaaaacgaatgccataatcaagtgaatttggaaaaccatagagtaaatgaagctaaacatttattgcaggacttttttttacagccttcgataggctattttccatcagttttctggatggcaattgagcgagcagtgtttccaactgtatttgattgttcaacacacatttagggacagtacttacatctcttgatgtcatttgggaaacactgtcttagaatctggaccctactatttaaagttaatacgacatatttagggctgctggccaagagaaactaacatggtgaggaggaaataatcattatccatttatgttaatatttttatcataaagactaaaactttgttttttaaactaggatcccaagtgttgtttatagacacttgactacagaagagagaaaagcttaggttgaacaagtgtttgtagagtatatgaaaatagaagtgcaaacaaggcccctattagccagattttctgaataatattctaggagttcatccttgttctgtctttagtgagtgacatttataaagcagtagcaaagccaatatcatggttccagggatcgttcctatggaattacattggctgaggacagagacccactcttcctcctctttcctgaatcaggtcagggtgaatattatccaagtgcaattgaactcttgctccttctgttcacaaatcaattgttgcttgattggacccagaatgtttgctgctcatcaactctcttttgaaggtgtatctcaatatttcatttccttgtgtttattggaaaatattttttaaaagctacttgcaaagatgtaagcgtgatcattggggttgacttgcggcgaaaatgtgaaggagtcaaagactgatttcaggttttgtgcacgctccttccacttctgagcccctccaagcctggggcccagccaggattcctcacttcctcttggctgagtataaactcatttacactgaggtagatggccgtaatgagatatataagactggtgctttagaagagtgctgtggaggaggccttcctttatctggagggtgacatggcaatgtctggaattttcagatatcagtgacaggaaaagatggacttttgggtcaagaggactctgtcaaaccaggtactaactggagaccaggctatttctgagatcatactctgtgtcaagggctagggatctttacatgagccttcaattgtaagtcagggcccaactcactgtggtcagtgcatatatttctagattacctcactttggaaatgcttgtctccccactctgtgagggattagtgcttctccactttaaaggaaaaacaggtcataaattactgaggaattttatggcacagcccaaagcacagattggaggccaaggaaaaataaaactccagcttctttatgaaagtcaaatggaaaagagaagatgcttcctgaaaagaggtgggcactgcttgagggagaggagggaaaggactctgagtgagtctacaggaactccttttggtgtccttgaggagtttatgagaattctcggcctcatcttgataaacttgaaggcaaagtgaagcaggcagttgaactgtttgtctgggaaatggatgagagacatgattatttttggtagcaagattttctgtgtttggattatgcatgttataaatccagtatcttaatttccatttgccttgggtgatccatatgcctaattttaattcaatgctgattaaatgtcagagaaggaaaggaagggatgaggtgagagtttccaagcctggctgaccaggaagacagcaggcagatcttggagactggacctcatcaattataaagagaaaaatcccctgtaagttacaaaacaaaatagcacaagaaaacactctgtagatgtacattaagccgtctcctttccagaaaacgtttccccagaccaggaagacccagcgtgccccttagcaccttagcccaggccttcagctcttctcagctcacctttttctccagtgaataaacatgatgctgtttttaagtctttgcttccttgtttctagcccatgttttactccagagcagtgagggcacttgtgaccagctttggggagatgaatacactgtcatttatacataaatgcactgtcatttatcatttcagaattggagtgaattctaaatgaatcataacagttgcatttaatgaattattctcctgggtattggctaattttaaaccggtctgacgagttttaaggtccatgtggtttgaggaaattcagtggtgcatttcccggtttggtcctcctcatttccctccagccctgctccttttcaacatgccaggctgcttggctgggttatctttaatcactgtaggtgggaggaggggaggcggggaggtactgggcccaaggtcatgccagaagagttcaggcctctgcttgtcatctggcactgctcagaattcccaggggtctccggggagctggccctcagctcacagatgggcctgactttggtgagaggtggccttccaccaggaagcctccagctggcaggataggtgggtggggaggggtgaactttggctgtggaagcgtctcagcattttactcccctttttcaatagttgctgcctccactccacgcttttattcaagcagcaccggtacctggcagtagctcctacaatgttttctacattggctctaaaatcatggcctagtagacaccaatgcttgacttgtttttttgtttgtttgttttgagaagttgtttaccattggcgtgacgggattttcttggccttgtgaagtacagggagcctcaggatagcttcactgggggtgtcattacatggtcattatcagtggtaagtttcccagtctcaagatggaaccctctgttgcttctctgccgcgtgtttggctctgttgaccttccattgctcacctgtgcttgttcccccagcagcctgtttcttgtaactatttgcctcataatgcaagtattctagtgattgaagtgttgctgtgcaaaagagatcttttaaactgaaaccagtgcaacaaaacaatttaaaacattttaataatttcttaaaggatacagagccttttcctctcttaatacatgcaggtcagaatgacgtcaataaggattatatttttgcattaacaggaaaactaagtttataagactagagtatggatagagaggaagatggttctattgggatataaactctgatccatacatggaagtagcccagtccgtacaaacaccattgcctgtttcattcttgactggacatacatattgccccattgtgatgaaaggttgtgataatgaagagagtaatagaaggctcagctcaggttctaaggagggagcgagtaaaggccatgcaggcccatccttctgtggtcagtcactgctggttggggaaggaaggaggtatcaagtgtctccattctttcctcttttcttcatagtttctagatcattcatttaataaatcattagggagcccctgccatcaagctaggtcttgggatataaccaggaacatgcctagataggtaccctaatctcagagggctcatgctccaattgggggacagatactcaaacaggcaattatgacatagttcataaagccctgtgatgtatgccaccagagtacccaaaagggccccaaactagacatggggagttggggaaggcttttgggagaaggcgacatttcagcagagacctgaaaggagaaactggagacagtttaatgtgactactgcgaagtactgtggggggtgggagtaggttgggggcatggggacaagtaagctgttttttgtcagctgccattgatcttcctccctctcctcctccctccctgcttccttccttctttccgatttaaccctggaatcacgagaggccactttaggtggatagcaactcttgaatttgggctttattctgagggttatggaggagccagtgaaggttttttttttgtttttttttttgttgttgttgtttttttttttttttgagacggagtctcgctctgtcgcccaggccggactgcggactgcagtggcgcaatctcagctcactgcaagctccgcttcccgggttcccgccattctcctgcctcagcctcccgagtagctgggactacaggcgcccgccaccgcgcccggctaattttttgtatttttagtagagacggggtttcaccttgttagccaggatggtctcgatctcctgacctcatgatccacccgcctcggcctcccaaagcagtgaaggttttttaagcagagaaataacctgatcagattcaaattgtatcaccctgtgggatggactagacatggattagaacattaggaaactgctttaggtatttagcctggtaaagatactctggcttgtggtcgggtgttatttgctgggtgggctctggcttaaaaggcaattgctttagatcgttgtggaaaattctgtttcagagacacaaccgcttcagatgggcagtgaaaaagacgatggaaaggccaggacaccacggaagttctgaaggggtagtgggaaccggtaggagcatatcagtagctttccctgcccttttgtctgccactgtgatgtaaatatcaacttgattttacatggagctgaggaaccttttagaacccaatcgaagaagttggtggttctacaccgagccagggggaaaactttgtggtcacatgggaatttatacttacttggtttctctgcctttctcaccaatttctttttggtttcttgagagctggttgtgtgcatatgtgaatacatattgcatgttgaaattttgggttttcttttttaaacctttaatgttctacccatttcaaatgcattcaggatgtatgatgctgtttttatataatgtaaactattcttacaatgtcttttatttaattaaaagaatcaaagaaaccaaagttaagaatttaaattttattttggcatttgttactggttgtgatatataattttggtaacattagtgagggatcaggtttaaaaaatttctccaatgttgtcttctgcagattgcaattgtcttgcaactgctgttggcaaactaaaaatgcttttgctggttaaggtaaccagtcatttccgaactttttttcagttgtaagggcatagaatgaacgtgcacgcctgatttagtgtattaaaactaatatcatgtgaggacattttatagataagaggttagaaggcaaacgactctattttgagaaaaatttggagggaacctttctttcaagataaataaattatttactgtccagaagtttatcatgtaattatctggatttttttttttcatttctctgagctttagctcagcctcgatggactctgatttcataaatacattacatttttcaattttagaagtcatgggaagaggcacacaactttgggaatttgtgaaacttaaagcaagtataatgaagagatacatactcattttgtttgtgttctgtttccattccattaacttctactatcactcaggttcatccttgttgaggcctagacgagtggaaggtttctcattttgaagttagttgttttttaattggtcacgcaaaagaaaggcttacattgattttgaaagacaaaacatgtcattgtttttttcactaatgcccaacttctacatggctgactggatattgttcaaattttccaaaagaatagaaaagagagagaaacacccttcttttggatccgaagccagtcatggaaaatttcatcctgaaaggataatttttcataaatatgcaagcagcagaatggcagtgtggctgcaatagaatctgccccaggacttccatgcatagtactttgctgtaaacacgaaactacaggcacacatatactcaaaagaatacacagtattggaagcctaattatttccactaagattgagattattccctctaagagctatactggagaaagcaatgtgtcttacttcactttattccacatcaattcacaaatttttatagcatatatactctgtgaaaggtgatactgggctaaagaaaataattctgccctcagtttgcaatctaacagggaaaataaagtccatatatattaaaatctaagtctgtttataataagtgccaagtagacaatatggacaggaagtactgtggatctaaggaggtcaagctcatgggtgtacaggttgtaatagttatgaagccttttcagtagcagtagaacttgaatgatggggtggatcgggataatgcacagagtgggtgcatgtggaacacttacaagaagaggggatatggggagctgatgtccaccaagaacagggagcctgtagtctgcgggtgtatgtggggccctgctgtagtggtgttgattgacctctgtaggcactttgccttccttcttctgtgttccctccagctagggtagagaggactggttcagcttggctcttccgggcctgcccaaaggaccatgcaacatgaaggtgaagtccttgtagagcaaagggcatgagaagtctctcttctaaacctaggctctgccctgtctccataattttatttcatgatgttagatctgggaagagatttagcacatttctgtattagtagagcatttgagggagatgataactattaaacaagagaggtaaagagaaacattcagagatgaacaggtttattgggataaagagtgagggtacagatttgaggctaccattcacagaccagggctagctattctagaaacaatagatgtcattagacaaataatgacatgatggtttgatattggtgttctaaacctccagaggttaataactttgttggatttcagtggtggacaccagcaatcttaggaggtctagcagcaagactggttcttgccaagttaggagatgttagtttgttagtgctgattggatggaataagcatacaaccgctctgtgtgcccccttctttcccctctgcagggtgtgagaatggaaaaagagaattacacttctgataacctaaatattcgctaacctgtggtggggatgcttattttggccttttaggcgcaaacttgtttctttaactgttagttttatggtgcccagggttaaactttaaagttggactgtttacatgcttgcgacatggtgaaccaaacggggaaagtaagataaaaacaggcttgataaaggccagccgacttctgccagtaggctaaaactcacagactctcagatatatacatacatatatggccaagatgtcttgctgttaaatggtctttaagagagcagaaaagcctttttaacaaatgcacctattgtagagtctttccaatagcctatacctttcaacttgtgaagataaataagaacatatggtttgtctcaacatgcttttaacaaaaaccagatgaacacatgtaaaacaattagagagttgtcttaggtaccctgaagttcttatacaggatatttgctcttcattcaacgtttattgactacctactgtgttccaggccaccagaccctgtgttagaggttagagatttaaaactctagtaacttatgtattataatctatacatgtcatttaaagacatagcatttttgggctgagtgcggtggcgcacgcctgtaatcccagcactttgggaggccgaggtgggtggatcatgagataaggagttcaagaccagcctggccaagatgctaaaaccccgtctctactaaaaatacaaaaattagctgggtgtggtagcatgcacctgtaatcccagtcactcgggaggctgaggcaggagaagcgcttgaacccaggaggcagaggttgcagtgagccgagatcaccccactgcactccagcctgggagacagagcaagactctgtctcaaaaaaaaaaaaaaaaaaaaaaaaaaaaaaggcatagcattttcttaatataataagcctcctggtgggaagtaattgtgattgagtgtctagggcaatgtagttatcctaaattttaaccaggtgattttaaaatcaccatttggaaaatggtcccattatatctatttgtaaactgagtcatgaaaaagttgtcagagtacccaggtaggcgtttatgatgcacctaagtacaggccagccaaaattgttttggttttggtgcttccacctgtgattaatgtcccacttgactccttgagctgtttcatctgaaattatattcctgaaattcatctggctctgctgattatctctacctgggcctgtggatgagatcagagagaccagagctggggctatttcttggtaatgcaactgccattccccatgcgtggacacaaatagacaatgcctgtgggaatccaaaccccaaggactgtgagaggcatgcatgccctgtattaaagcagcagcctggcttggtgctcactaagtgcatggtcagcagtcactactcctgtgacatgtattgtctgagtcactcatttggcacttattacatcctgtcttgggttattagtaacctttgcatgcatttgtttctcctccccagccacaccgccccagtggtgcagactcagggttctcctcgccattcaaattcttcaccagtgctctttatgggcagtaaacttggtttttattttaattatgaaatggtagtgtttaagcttattaaaatataagtgttgtttatccaaacaatcataaatgaacttattaaattttttacaaacagctttactgagacatctctgacatacaaactgcccatatttaaagtgtagaatttgataagtttgaacttcataatatgatttcttattctttttttcagataacatgatttctaactcattttttacagataacatgatttcttactcattttctttttcaaaatgatgtttgatgagcaccgattttacagagggtgcctgtctgagagtacgaggtaggaacttttgaaataacacactggtggtaagggggtagtttggttcccagataactttgagattctagttttattttttatttatttattttttttgagacagaatcttgctctgttgaccaggctggagtgcagtggcacgatcttggctgactccaacctctgcctcctgggttcaagtgactcttgggcctcagcctcccaagtaactgggattacaggcacacatcaccttgcctggctaattttctttttgagatggagtttcactcttgttgcccaggctggagtgcaatggcgcgatctccactcactgtaacctccacctcctggattcaagcaattctcctgcctcagcctcacaagtagctgggattacaggcatgtgccaccatgcctggctatttttggtatttttagtagaaacggggtttcatcatgtttcaactcctgacctcaggtgattcacccacctcagcctcccaaggtgttgagattataggtgtgagccgccacgcccagccaagattctagttttctgccacggtaaattgaggtgttcctggcatatagtaggcaagaaataaagcctgtttattgaaggctatgtgtatgtagttgtaaagtcacctcagttctctttacgaaaaaagaatattgtacgtcttttatttatttttaatgggggaatagtttgtaatggccttagtaactttgagcattttatcctcttgacaaatccagcagagattttacttcctgaatgaaaggatactggctagccaagcgttggttgaaatgttcagtggggaaagtaagttgatattcctatcaccgcagaatctctttgtctctggatttccctttgattttcacaaggactgagcaagtcctgcaggtaattcagtgccagggcaggctagctgagttttaattgatgctaattagcacccccatagactgtgacaattttttcccctcaagcagtcagccaagtggcattaggaaatgtgagacatctttctttggaatcgtcataggagcagaactattttcaggcccagtctccttggcaggtcttgcccttctcagaaatagtgaggaaatgagataagaaaagtaataccccgaggagtaaggtgccaagtagttctagacccaactgtgggcttaggacagcagggagaggatgctgaaggattttgctctcaagtacctttgcttctagttggaaagaatgagagataggatggaatgaagtctgactgctgcatgggagctggggggaaatgctttgcgggagcagtatttatggcaagttcagaagacatcttcttaccttgaacaagtcattagagctggaactgtatactgatgacaaaagataaaatataacaagataaacggtcccaggcagtcttgtgtgctccgtcctcccagctatactccactggaatccagtgtctgcctttggtggtagatgttcctgtttctccatcccttggctagatatatattatccattgataggcagctaagtttgcagccaattctcaatcatttcttgtggtgggggacagaaataatgtgggaagctaagttcaccatcaacccagggacttattagctggaagtttcaaactgccttgccactgaacaccataaacaacttcagaccacagctgacttggtgtttgctggtaggagggagtgagaaattatgccagaggtgggaaaacttgtcaagtcaagggggaggtctctttattcttcccctgtgcattcagagaggtgatggtgtctctctacctcattgaaacctgctcccaggagcttctgaagttggccatttagaacccagtgtgaatataaggcagtggattccctttttcaggaaatttgtattttgaatctagacctctttgattaaccagaaggtcttggctcctggtgaagaaaccatgaggagatggggggataggcaagcatgattctgaaatgacgctggggaggatcagggctatttcatctgtgctcacatgaacaccacagtcaagcctaaggctgggctttcagatatctgacctagactctctataggaaatatattctgccttgcggcatagcatgcaccataaggagcagtggaatagcacttaccctcactacattgagaggcatttgatctatgttaataacctattattttacttaaaaaatgttggttggacctacaatattgattttacaaccccctagtggcatgtgacctacagggctaagctgagttgctctttctggtttcctgcatctgggcgcctagtcagggggcaagttgggactgcacctcgattttcatttcttttgccaaatgggcacccagacttggggctgggtctgccagaggtggcagtgctttctgtgacgtgtgtaaggggtagtgtgcgcatccaaggagggaatgcatgggacttgtgtgtccccagtcaaccccatttgtaatttgcaaataggatctgtgtggctggcagggggctggcagtgtgcaccagaaagaggaaacagaaggtagactcccaggtgaggaagagctagatccagagggagaaacgacacccgccctggctttggcactggttagaaagtctgttcctggctttttcctcatggcccttctttcactttgtggtctgaaaattggccaaaagatcaggaaggtgctgaatcaagacgagaataaaagggcacttgaaacctaaacacgggccaatgactcctggataaccaaaacctggctgaagggaagagctaacattctatctgcatggaaaagtaaaggaagatcagttctctgatgaaaatgagaaatattattattaagttgatcaatactttgttgaaaactttctctgtacctggtactaagatactctgttgtttaaatagcttcttatagtcactgtggattacagtaatttctttttacaagatgtaagatttgcccatctgcataaatacccatattttaattctatgatttgtctttacttctagctactcactaaacatacatttcctgaaagcagaagagattcaattgctgttattcacatgattactatcgtgccaggagggagtgtcagggaagttaacaaaacaggccaggtgtggtggctcacaactgtaatcccggcactttgggaggccgaggtgggctgattgcttgaggtcagcagtttgagacaagcctgagcaacatggtgagaccccagctccaaaaaaaaaaaatacaaaaattagccagccattgtggtatgtgcccgtagtctcttgactgtaggcaactagaagtctttccccaggtacggggggcagtggtataggacagcttttaagggggtagaatgtgactcaggctttcgtggactgggtagtatttggataagcctggtgacagtctgcacactatagactagagcactctgctgtgacaggtatgcctgaatagaactcacgaagatcctgctctggcaatttagtcactgcctatccacggatagaaccctgactattcagtagtcacaatagacaaatgatagcttagcagattttggttattattactattttaaaatttaagtataggagattttgcatcaatcatatagaatcacatatggaatttcttagaatgggatcttagtgccttatcttgtatatgtcctgtataaaacgcacagctgatcctatgaagcctggcaagttttaaagggaaggagtatgcaagcagaaacccagagggctttagcagggtaaatgtagatggagaggcctagagaaaaacttttccttctttataattttcctgcttctattctgtttcacctaaatcccagagctgaaatcagcaatttaattgtcttcctttctcttcttccgtaagggtttgcagaatacagagctaacaagattacatggggcttagggggtcatgctgccaacaacataaggaggtctactactactgcctttattcaccatttttctgtgggcactagctgatgcacttggacaaaagagaaaaaggtatacatgcagaaagagagaaattggcttatcatgtgcatatgatatgcttatatgctatacaatatgctatttattacaaatgataaggtaatacagtgaggtggcttgacatagaattaatatacaaaaataaccgtagagaaaaacaacaaggtagaaaatagaatggaagcaaatgcttcattcatagtcaggataagtgagaataataaagatgaactacctctgccagatattgcatattttaaaccatattatggtttaaatatactgaatatagtttaatatatttaaactatatttaagtagtatagaattgatactgtgtagactgagaaatcagtagtacagaatagaaatggaaaattggcgtccagagctagacaccaatatagaatgaaaatttgtctttggtggcattttatatcagtgaagaatggtagattattcaatagtttgggacaactgggtggccttctggaaaaacaaaaattggatctatacctagtttcttctgccaacataaatgccagatgaatcaaatatttaaatattaaaagcaatagaaggaaaaggagaaattttaaaaatcttgtggtggtacagtcttcctaggtataacacaaaccatggaaatcaaaaagagagagattgatatattaaatttccaaaaacaaaacaaaacaagcaggtttcatggagcccgagtccatgaaagcttcatggaccaacataaacaaagtcaaaagacaaacaatgaattgaaaatcacacataaaaaccaaacgactaatatccttaatttataaagtattctaataaattagtaagaaaagatcaataacataatgaaaaaatggaataaaggtataaacagacaattgacagaaaaaagaaatatacatgactcttaaatatacagaaagatatccaacttacaataggttaccatttttattaactgttagaatgataaacataaaaacatttattgttgaaggtggagggaacaagacatccatgcataatgggaacataaattggaacagcttctacagtgggtgttttgataatctttatccaaaaatgcacatacccatgaactcagtaattccacttccagaaatgttgtcccacagaaatatttatgtgtgaagatatatttgagaatatttcttgtaacatctaaatgtctttcattactctatgtttcattttgcttatctgtaaggtggcaatagggattctagtttcctgacacttgaaatggctggtataggagcacctcagaaacaagctaggctgctagaaagaagaaaggtattctctaaatttagaacattattccaatatttcagaaaaagggagagtcctaattataaggtagttgcgctgtgctttgtaatgccagggcagagacagcccaggtattaggttctcgcttgcttttgtgctctgtttggaagcacgttggagaccagtgtgatgggagtggctggtggcctttattgtatggggtcctcagagttggagcgttagcacccagaagatgtgctcctccccactaggaatctagctctggccctctggcagtgtctcaagggagaagtttctctagggccattttcttgacacccagcaaataagaatcccttatatttgacaacattatgttcacaccaacattaatttgactcagataatgatgccacctgttacacagtccatcagcataattataggtgaggaaattgctaagagaggtccctgagcagttggaggccagaaggaaatattttcaattaattaatggctgggcaggtaaatttttttagtattaaaaaaattaagaattccctagtgtaagatgtcatggctgctaactgtctagaaaggggtacatatcagaagagggtaagctgagattcatggatgttcaaactttggttgtaagcacttttcttctttaaaatattattttaaagatactgtgttaggtttttcttctttttttcccccttaaccccaaaacaaactctaataaaataaccattctgtgagtttataagttgcactggctagaatttagcaaaatgaaaagaatttaacttggatgaatatattatgcctaaggaattgagcatcagtctgggctttgttaatggtgaatgcctaaaccaccaaatgattctgttgtttttgtgggtttcttgaaagagaccaagtatttagactctccctgacttatgtaacacttcagctattgcattggtaagtcaagaaaaataaggaacagagaacaggtttgaaataaagcttcctatctgggttgcaaggatacactttctaattatttgttatgataattttatcaattgcacctactgcaagtgctccttgtccttggatcaatgtgcattagccagagactctcttatcagtaagcttctgaattgcctgtatgaggcacaaatcgttggttgctcatccacaacataagagacttgatgttggccttttgggagctcatgtttcaaatcagattagagctaatgtggccagaacataagaacacaaggaaaaatgaacaaaatgttgtaggtatgaatgtgctgtggggcgtgctttgtttaaagcaaacctcataaaagaagagcagggttaaagaagcctattaagttagggatcacttatttgctttacaagaagggagggacttaagcacagctcttgtggcacattcggaatagaatttgacttacaaaaaagtctagatcacagattccgagttgaaagcatgtcatataagtgagataaagaacagtgatgccttatttaactggggaacagatttcaggtaaccttgggtaaccagaacgtgatcatgaatcagaaagtgctgtggaagaatagaaagaactgaactgaactgaatggccaggggtccggcctcccacgacccccaatcccattctctataccttgtttcctattggcgaaaagaaggtattagacagtttcaaagtctctccccttgttaaaaattgataatgtaatctatcctttatttgtttttatatattttatatatttatatatttgtaatatttaagaaaagatttaatttaataaatatacatagcaaagcattcaaacagtgaaaaagtaaatgcttaaaagtttgttttccagccaggtgtggtggctcacttctgtaattccaatgctttgggaggccgagggaggtcaggcatttgagaccagcctgggcaacatggtaaaaccctgtctctacttaaaatacaaagattagccaggcatggtggtgtgtgactgtagtcccagctacttgggaggtggaggcaggagaatcacttgaacctgggaggcagaggttgcagtgagcagaagtcacaccactgcactggtgtgacaggctgggtgacagagcaagactccatctcaaaaaaaaaaaaaaaaaaatgcttgtcttccccttatcacagactcccacttccctctctagagactagttccttggatatccttccagaaatactctgtgcattctataaacttatgcatatgtcttttggaaacaaacaggaaaatcatgcacactatcctgcttcttgcttttgttacttaccaattttggaaattgttatgatagtctcatattgatctgctttcttcttctgaaagactcttcagtgtagtaatccatagttcaatacttagttgaactagaatcttggtaaatacttcatttatttcataaatcttctcttcagttccctgcagctctaaatttctatgactgtaacatctaagttaaaaagatgtctgagatgtctgagtaagaaaaaaaatagttgttgcaaatcacatgtgctgcttctcttgggggataaaggcccatttgttcttggtccctgaccactgacatgtatggtgcaaagcaggggctgaaaacactggtccatatgtcagcagaggcagggggcgaaggaagcacatttattcacagtggagacaggcctcttgcattgtcaattttacccgtgtgagaattgttgttcctgttggtgactgggtcactgataaaagattaaatcagattggagacaaaaactgcactgccttttaaagcaatatatacatgtaagaggtttttcatgtttaaatgttaaaaagtcatttggggttacagatgaacctcttaaagagaaggctgtgtatatcgtgtgggagctggaagaaagggagttgtagaatttgagaggtagaaggtttgagtgattttccctctctgtataatgatctgaagtgaagagaccaatgtacttttttagggctggactggggcaccagtggaaaggcaatcatagaccatccaggtgctcccagagttcccagagtttagggacaacttggcatgggccatgctggcttactctgaagcagatacagcacataccttagggtgccagcaaagtcagggcactgcaaatttattttggaaatagttttatgtttaatatttaccaaaaagcttcaaaatagccatcatgggaaaagcctgaacttcgctggatttctttctcttatggcttaggattagatttatttaaaattacatacatggggagcattaagtttcaggactaaggttctaaaagctgtaaccaggccagaatggggcctttggaaaccagcgagctgtgtccgtcagtgggctgggcggttctccattacaatctgtgcaaggaagaatgagccgtttgcatttccgtggcaggaatagtcattttgccaccctcagatttgatttcctcagaggaacaggctgggtgcacctgttgctggtctgcagtgtctccagagagactgtggattttcactgtgactcatgagaattatttatggccaccaagctggtggacaccagcagactgagtgacgcaggctcagggagtgtttcccctctgtccatcaaaggtttttctggaatgccttcaatatattggtttttagcatttgtgcaagaaagagaaaagagaataactaactgtctggcacattcagtagtgttcttcccagtccattcattcctaaaaggctttcagttcaggcatccgcttcgttgacttgaaagtgcatcagtatcaatattggcatcttatcattatactccacttcgtgtgtgaagagagacagtttttatcagccttccctccccacgccccctttaatgaatctaatttctgctgctggtatttggtatttgaggtcattagctcagtggaacagagccctgtgctaatgagtacaaggtcacagctttgcatggaggcggcactctttcctgtagcggacacctgcaggcccagccaactgctttgccagcatttccatgaggcatgggaagccaggtgaagagggtacaggtggcttagaactcagcccatctttgtccttctctggacacaacacaccgctctgaggttctactgactatgtgtccgttgttctatcttaggaaaatgatagtttcagtgttaataataacagtcaagcttcagaggttatttttttaaaaaaccttcactcatggaaaaagtttcttggtgtggatggttcatttttgttcatgaattcaccaagaagttaatgagttttaagggctctatggacagtgaggagtctacaaaggtaaataagatgcagctcccacctgtcttagtttcccaggactgccataacaaagcaccacaaactgggtggattacaagcacagaaatttatgactcttacttctggaaactagaagtcctaaatcaaggtgttggcagggccatgttccctctgaaacatgtcggggagttttttcttgtcatttccaccttctggtagccccaggtactcctgggcttgtgttagcaccgctctgctccctgctctgcctttacagggcccttttcctctccctgtcttctcctcttcttataaggacagtcattgaattagggcccaccctaatgacctcatctgaacttgattactctgcaaaggccatatttccaaatcaggtcacattcatcagtaccgagggctaggacttctacatacatttttaggggacacaattcaacccataaaaccatttgtcctcaagatgcttccaattcagtgagggagactgatggaaaagatgatggaatcagtgctacaaggggccggagcactgtgctgaagagtccaagggaggacacacacacacacacacacacccatgcacacacacccccacacacaccccactccaccccacactaaacacacatctatcacatgatgtagaatcggtccattctaaatgctctgtgggtgagtttgccctggcatgtgggctcgagggatgagtggaattttagttgtagagaagtgagccgtgcagggtgtttcaagctgaacctgagcaatgtcatggatgcacttttggtctggcctgggaaggaagatgcttctggtaacaatgtgtaagggaaggattggacgctggagacttgaggctgactgagagattctgcagggggccaaggtggctcaggaggcctgaacttggaagtggtggtgggatgagaagtcaggaacagatcctgaggagtgcggggtaggggagtgaagtaggtgggaggtggcaatggatgggtgggtgggagaaggtcagaggcgaccctcagacttcctgaaagggccgattgggagaaaggtgaagactttatttaggcaagatagggggttcaggcagagagtaaacttgaaaggaagataagtttgcttgtaaagatgttgaatctgagatcattaaagctccagtgtagatgcccagcaccaagtgagaaactcgagattagcattctggaagagaggccagggctggaggtgagaatggcagtgtgatggttggaaccatgggggtggctgaggtgacctggagagaaagtggacagaagagaagcagggcaaggcccaggtttagggaatgccccgaggcatgggtaggagatggtgcaggccggaagggcagggaggaaggtcgagaggagatggtcacccagcagggctgggtcctgtcttgagctagctgaaaataatggaaaatgaggaggctgtcggatctgacagctgatgttctctctgagaggctggtctcaagaaaactctccacaaagtgactggggcagaatccaaattgcaagaggttaaggagaggtagaataaggcagtcggggtggaccgtcacccctgagaggtttggcaaggagaagtgagaaggcatggacatctgaagaagcaggttaaagagaaggaatttttagttagggaggaagatagagaggacagtacattgataaggcgaattctggaaaagatggcaggtcctaggatccatagcagggagagaagtttgactgagacttaagggaagttagggaacagatagggagtcgtggtgtgaaagaagtccgactcgtgtggaaatgtttaatccgtgagggtcactcttccagccaccttaatcctgggggatggaatttttgacccgtggacacagattttgtggttatttatttctgctgtatcctaacgatatgaggatgagaggcttacacctcagctccaagagcttcccatagcttcttgtggccatttccagaactaaggggagctctggcattctagataggctttctctagcgtcaagtattaaagccaggtaaaatgtctcatctaggaaacgacagtaggagcctgagctggaaatagcaattattttcccttcatcaccatccaggggaagaactatgctttgccctcgcccctgcctctctctagatctgaatttttggatctggatatggatgatgggcagaaaagtgaggatgggttcagggaacatggagtatatgacttcaaccccatgccacgtttattgggtgccaaaggtttcactccaggccttccccatctaagtgctaacagacacaagaggaacaggtttcctgtcttcatggaacttatgtgggactaacagcctgtcctatgctagtgggcaagacaagaattccctgggaaatgcatatgaatgagttgtgtggttgaggaaggagaggcaaagtcaatgttggttagagtggctgagaaaggttcagggaggacatgagtgagacttcgaatggtgggtggattggatagatgggtaagacatggaatagcatcttgggtggatggccaatatgctggaagcaatgtggtgtgtccatgagacagtaagactggcagactacaggagagtgtatctgggggtggatggtaatcaggtaggacaaacctgaaatgtggagggttttaaatatcaggctgagtagtgtgggctttttcctgagagtggctgagagctactagaagttaaagagaagggatcacatgaggagatcggtgttttggaaagagacctgcctctcccttctccttcagtttggctataaagagccaactgcctcatgtaagatgcattggtcctgccctctgcccctgtgagacacatacaaggtggcagttccttctccctgtttttcctgagtcaggaaactttctcccagcagcttggatgtattccttcaaactgtacagaaggaaggttattgtaaagtttgaggaggaaaatctgttattcagtgtttctccttttttctcttcttcttgactttggtctcttccccttagcctctaaggatcttggtgacattcctttttggattttctctgttcccgcgatgattttaatgaaaccatcaccacccacagaaaagaacccagagtcaggctggaggtagagaggtcaacttcattacagtctttctttccttttctgcagggagatggtgtatgtgttagataaatgtaccaccacttcaccaaataactacccatcacagaaatccttgaagaaatcctaaaataacaataatagaatatgtataataggctgggcatggtcgctcatgcctataatcccaacactttgggaggctgaggtgggtggatcatttgaggtcaggagttcaaaaccagcctggccaacatggtgaaaccttattgcagctaaaaatacaaaaattagccgggtgtgatggtatgtgcttgtaatcccagctaatcaggaggctgaggcaggagaattcttgaacccggaggcggaggttgcagtgagctgagatcacgccactgaactccagcctgggcaatggagtgagactccgtctcaaaaacaaaacagaaaccactagtagaatatgtaccatgcttgtaggatgcaaggtctcatggggaagagggtggagagcagaaaaaagaaacagattttaacgtcaggctgacaagagtttattgtacacatcagtggttagaataattacttaaaatttttctttttttattttattattattatactttaagttttagggtacatgtgcacaatgtgcaggttagttacatatgtatacatgtgccatgctggtgtactgcacccattaactcgtcatttagcattaggtatatctcctaatgctatccctcccctccccccaccccacaacagtccccagagtgtgagaaatttttttttttgtagaacaggggtctctctgtgttgcacaggctggtcttgaactcctggcctcaagtgatcctttcacctaagcctcccaaagcaatgggcctataggtgtgagccaccacacctggccgaaataacttttttaaattataaaaaaaggctttatttctattgaatacatatttacagtctttacatatttacatatttaacaggaataaagcctttttttataattaaataaattatattgccagggccccaaaagagccaccttgttttacaggtccctggggcatttggcaggaggcagtggaagtgcacccatctcctggcctgctcacttcgagtttcccttgaggagttttgtgtgtctttgccctgatctctccattttacattttgggtttggtgttggcctccccacagggctgtgtggtgggtgaagctgctactcagcttcatcttttcactgggttcgaaacaggcttttctgaataagcaaaatgcatgacgagtagctttggagtctgtggcggtaagcggaggcccagaaacctgattctcagttttcctacccagctagaatcttctcatgggaagttgagaatgctgattgtcacattgttccacagagtgaaatctggccaccatgcggcctctcatcctgataacaagcttttcattagacttttagactcactgcagagctcagaggctttgaagccctggtgaggacctagaagtgactgctggggactgtgttgatcatgtgactggtctcatgaccagagcccccagtcacagacctgctttcctcccagggccccacaccccacttcctttttattccaggtcttctttcccccttggcttttgtacttgccaccaaggcccatgtttggtgcagagctgaaagcaaacctttttgtgactacattaatgtccatggtaatattaaagattatcccctgattggaaaaggtggatgttgttctaatacttaggaacatgcctccaaataagatgaaatgctctagtgtagctgacagtgactgcatcgtcctttcaaagagtccatgctctacctgggagggcctgtgtaggtgaagagggggcgcaccccactggctggcctggccctcctggctgcccacattctgcttggctctggtccggaggttttatgggggatctggagagctctggtctggctgacgctgttgccctctctgcctcttaatggcgctctgaccttctattgtttttggccaaaatatgagtgaaaatccattttatttatttagccaggacagataaggactaacaaacaaaaccaaaccagagtggaaatggcaacccgaggctccccagcaaaagcaaagaattggagggacagagaacaggctctgctcttcactcagggtggactggttggcatctctatgtgggtggcatctctagctctttcttttgttccggctctgattacctccctccctaggtgacatccctgcaggtgccatcttcacctgaaggcccttggctccaacctgcctctgttcccaggagctttctggaagttacttcctgtttcacagcccctctcttactttgaggttcccatttccagactgaaaggacagactacctctgctgaccaccccaatttccagcaagctttttaaaatggattagcacctagggattcttgcaggcaggtggaatttatccccagattctttaattggatgtagtttttttttacattggaagaaattgagaatattaacactcttgcacacatcttcctagacagggtgaatggaaagcagccctttgacagaagaaagacagagaccagtttccagtgagctcctgagggtatgtcaactccatgtagatttattttcaatttccaagcagctaagattctagtggacgtcagtttgtgctggctttattttcacaaatgctccattgggtgccacatgcgaatgtggctgttggccgcaggttaggtggcacacgctcattttgtgggcaagttctggaaaagtggttagcatagggttttgcaacgtagtgatctactttatagatttatatgtaagtacccagattggtggtaggtgaatttggtggaatcattttctaccagcatcctaaaatcatatttagaattgtattttagcaaaatgaatgtagtctggctggatataaaacaaaaatttccagttgggggtgaaagtgaagggaagggctatttagagggagtgtccccagccggtggggacctggctccctgggggttgtggatgggggtataagaggctcgattttgcccatctctgctaatgatgtggagctccagtaaacagcaagttaatggacttcccagatatgtgaatttcaacagctgttgcaaacaacagtgagcacagaaaaaaaaatatatgaaggaagagagaaaggaagaggaaagagaggaagagagggggaggggtgtcagcaatggaagtaggaaacaacaaggatgaggtccagtttttaaaatccagattcttgtatctgggcctgattgcaaatgccatgtatcctaggaagccatctggaaaaacagccaatctgagaatgccctgagggtggccaaggacagacttgtggagggagttgtctggatttcctagggcttggtgtgcctttagaggggagtagaacagacttttgatatagaaagtacatgtggttaccctcccttttgggagaattaacatccatggacttagaaattcaccatcagtagtaggttaaaatttatgtattgccaaggagtggtaagagattacatcttgtcatcttgttttaagactctttataaactagcccctagtttttattttttctagcttcgtctatttctatttttaatagacgccttatacctcaggcaggtggggtggtttgctgttcccataatatatttttttccttctgcttggaagctctgccttgtgcccccaactccctcctgtcctcctccctgtctgctgttcgtccttagcaggcaaaggaggggctccccctaatccccagaggtgtcactccctgcagggcccagcagccttttgcacggacctctgctgggacactgaccccactgccttcttgttatgtgtgtctttgtctgtagcttctcagagttaagatgctgaaatattgcagtgaagtaggcctttttctttctctgtctctcaagtgactcaaattgtttcgctgacttgatcagagctcagtaaaggttggctgagtcagagtgaatgagttaaccatgagttacaaagtgaaggaatagccagattgcttcctctgtgacaccacacagagcccgtctgtgtggttgaggggccgctggtgaaggatgaggggcaccagcccccatgctgtgtgggtcactgtagacatggctctgctgtcatctgtacagaggccaaacttgttttagccttaataactgtttaaagctgactcccaaggaaaccagtcttgtttttttatggtcctggaggatttcagaagcagatctggagatgtgtgtgcacagggtaaggtggtaaaggtatacagttgggtccttagagagcagtggcttagaggagactgtgctgttgctgtgggctgatgcgggaggtgtgattctcttggaatcccggaaggcaccagtgtggatgccgccgcttgtgtctgatgagtggagaaatgggtgctcgttttgcacactgatgagatcaaggaagtgtggggagctgaggggtgcagggggtagcaggtggggtgatagctctctggttttcctgtgatttctaggtgtaaattgggctgttgaggggaggcagtggccaggcccagcccaccagtggaaggcagaaggcacgagccacaagatgaacgggggcagttaactaaccaggccgcctggggttgaggatgaaatgggtacctgagttttccttttaagtagcagagggctaacatctgaggccctgccgggagccagggtctcggtggagaggtgagaacacacctgggagcaatatagagaggtcttttttctttgcagcactcgaagtctgatggcaaagagagacatctatgaagtaacccccaaagaaatggaaaactaagggtggtgaggagggcagtgagggagacatagatggtaagcagaggtcctgggtaggggtttttgagctggtctaggaggtcagagagggctccttggtcggtatgcttgagctgagaggccaaggaggacaggattggttcggtgaggaagggagagaagtctgaagcagaaggaacagtagaagcagcccggcactgtcattctttgatgtaataaatttcctccagatattcaagtctgtgcttctgcttgactgaggatcatctaggaaatgaaactaaacttggcttcgacctagaccttgtgtgaccttgaggtcatcaccctctcacaggtgggtgctatgagttgaagtgtgtcccagcagaaaaagacattgaaatcttaatccccccgtacttcagaatgtgaccttatttggaagcagggtctttgcagatgtaatcaagttaagatgaagtcactggggtaggctcggatccaatatgactggtgtccttataagaaggggaaattcagatgcagaggcagatgcagggagagggcggccccgtgaggacagacacagagataggagctgtgctcccgtaaaccaaggaatgcctggggctcccagaagctggcggaagcaaggaaggaccctcctttagatgccttggagggagtgtggccttgctaacaccttgattttggacttctgaccttaacaacttggaaggaaggcatttccattgttttaagccacctggttagtggttcctttttgtggcagccctaggaaactaagacagtagaggaaggaaggacaaagaaggattgtgttgaagatgaagtagaatatatttatacctagaacaaggccaggaacataataggtgctcaatgaacagtatctactcttgtctcattgggtagaaaacgggcacattttatttttctatgtgtgtgatggggtagggtttgttttttgtgtgtttttggaaaaattggaagtactcaaaggttaaattgggatgctacctatctatctattgattgatccacctatctatctgtctatcaaatttgcagtcaccctagagaatcctttacttacctgtgctgaaaaaaatgctcccatcagttaccctatgatgaggtctccagccctttcatcagaagacagagctttaaaatgcaggtgggtaacagtgacctgaagacatactaacaggtaaatgatagatctccagattcttctttgagggcagttttgattttgataccaaggtgggagagcacagagcttaccaaggcaataaaggcctgaagtacagaggagggcaccccacatgagataatgcagtgaagaaaacttgttttgcccacctcctaggttcacccaggcatggccccagatggaaacagaatttttcctggtgctccaggctgcttcccattcccatgtaaattctagtctgataaagcctcacctattacacaggtgttttagaaaacatctggattcttagagacaccgacgagtctagattatttttttccttcttctcttagtatctgaaatttaggactcaccgtcacaacacaaatacaaagatgggccaggcgcggtggctcacacctgtaatctgagaattttgggaggctgaggcggatcacctgacgtcaggagtttgagaccagcctgaccaacatggtgaaacctcttctctactcaaaatacaaaaattagccggacttggtggcacgtgtctgtaatcctagctactcagggggctgaggcaggagaatcacttgaacctgggaggcagaggttgcagtgagctgagatcgcaccactgcactccagcctgggtgacagagcgagactgtctcaaaaaacaacgacaacaacaaaaaacaatacaaagatgacttatgcacttgaaaatgggagtcctccgctcagatacagatgtggaaatctacctggttttagtagctggtaaggaggctttagtgttgggcagcccggaatactagtcccagctcttgggcaagctattagcctttctgcacctgtgaaatggggatgatcatgcctacccactacaatcagttttcatagtgatgatcagctgagagagcatctgtaaactgcctagtctattgtgtgtgttatagaaggcgctcggtcagcatggtcagttttacttgcatgtgtttatcctgagcggtggactttatgcctcctgaaggctgattgttgggattacttcaagcatccagttctgtacctggttccataaacatttgttgaataactattgattgagatttagtcactgttttaccatagtgatatctaaatcactattatatagtagaacccttcttttttttcccccaaaataaagctctaggggtaccccagcatataaagtgaatctaagaagagcttctgctattgcaagcaggacacgaaccacctctcttttccatttctttccttcactgttcctcagacataccctacaaggagccatttgaacaccttactctgggagtagaagggctaaaagctctgctagaactgaagtttgaaaagagtcattccacagaaagacttctgggcttagtgttccggagatcagctgctaaggccatagctaacagcctcggcagataacagcctttcctattatcaagttttcttgagaaagccttttttccccccccgtcaggaagtcagtccttattcctaactaaaagttgtaaaatttagctgtccttagtaaaggtggaacacatggtcctcagcttctgttttatttattttttttttttgtatttctgatggctgttgttatgtcactcctacctgagttagaggccacagtgctgtttgctttcctcctatattttattctctagcccttaaaggaataatcaaaactccttgggctgggtgtggtggctcacatctgtattcctagcactttgggagcctgaggcaggaggatcacttgaggccaggagttcaagatcagactggtcaacatagtaagacccccatctctaaaaataatttgaaaaatgtagccagacatggtggcatgtacttgtagtcccagctactcgggaggccaaagtgggaggattgtttgaacccctaagtttgaggctgcagtgagctgtgatcacaacactgcactctagcctgggtgacagagtgagaccttgtctctaaaaaaaaaagaataaagaaaagaaaagaaaaaaaaaggaagctcattgacggtagaggcaccttttttttggagtctccagagaaccttgcacttgaaggacaaacatgggctctctgcatggaactgattcttctttggattttcctttattgtcctaaatagacatcatcatttgttcttgtgaaggttctttcctagaacatttcttttgttttggtttttaaaagacaataattgggcttctgtcacattctttggaaaactatctttaactatgcagcctgttcactcataacaaaaaaattcctattctctcatccatatgctcacagaagataaagctaaaatagcttgttttatattactggtattgaaatgacaaatatgtctccaaatagcaaatgggtagagtaatgcagatttaaatttcacctgggttaggaggcattatttctgacaacactgttatttcacccattcatctatccattaaccaaacattcattgagcatttacttagtgccaggcccagagacacatgggcgatgcatagctgaatagaaaagggtcaaggaaggcatggcagggagcagcatatagtggaattattagcattttacctccatttactcctttcattgtttttaggattaaacacaggaaaaagaatctatatgtgcttcttcaaggtagtatatctcaaggaaactattggcttagtatgttggggttggtttttctggtttgtagattgttcatttttcatttcttctcttgtcccctgaatattctgtaccttctgtgtccctccctctatgtccctgtccagggactgggcaatcagagagggacagagaaaggggtgaacctgtagctttgctttttgttagctactccaggtaaagactagttcagaactcaaatcctaaagtgattttcctgtatgaaatgtgacttgggagtgttgggggtttccttagcccagtgttaaagtgtcatgacatggcctttgttagaagagtcactggattcctaatattaactctgccagttactctctgggtccctcctctacctcatctgaaaagtgagcatcgccacgccagtcttttagaagtattgtgaggatgaaatgcctgtatgctgctggcacatgcaggtgcccagcaaatgtccatctcttccttccccctctagtatttcaaggtgacaggcagcagttttcacctaagtgttatgcctaagaaatgataataacactgttcactgccatattttaagtttaacccctgtacttattaaagggctatcaaatttggttgaggaagaccaggggtcatgagaatagtcttgaccttgccaactgctgtatagtgtgatcttaagtaattctcagcccctttcctttgtccctcccatcttaccatctatcaggaggggagcctgaatggtcccctcttccttgcaggggagctgtggggcacagatgagataaagcaggtggagtacttcaagaagtttaaaacttacaaatgccagagacttactatcatcactatcatttggacatggaataattcactttcaattccttattcagtatcacttttgtgggcatgtcttttaccaccatatttcatgcatacatgtgcccagttctgtggagctcggttccgagcagcgctaggggcctgaactattgttgccctcttaggacacaattttatgtggggagaagcagcaggctttatttcacctgcttgaaactctagttgcggagaaatttggctcagactttccaaaataaactcacctttgggctgaatccaggagtggaaaattttagctgaaaaggatggcttgtcagaaaacataggagtgactgccagttgggggtatatgtactccagaggaggcggggtgtaaacccagctgtaccattccctgcaccgcatgctccaaccagaccaacccagccctccgtgagtagaggttacaggcttattggaaggagggaggcatgacaaatcttaaggattgtctgtttttttccactgtcagataaacctccacgctttggcttctagagtgatgggtgggcttgctttccttttgtggacttgatggcatttgactgtataattattcttctcagctgaatatccctgagtgtcctttgacatgatggtggtataggtagctttaccaggcataatttctataatccatagagtgtcaagaaggtacttattttcctatcaaatgctgctgacctgattaagccttctgcctggctttgtagctgaagataatgagtttgtccagtgcagtggctgttgggacctggggtctttctgaagatgattgtaacctgggtgtggagtggggccttttgtcagttgctttaagttagatatctgcttcggagctctgtgtctggctctgttccccaggtcatagtagccaacaaagggacctggtcccctgcagttggcccttgaattttttctattgtttgagaactagaaattatttctgccagagatttcacctgagaatacatccaggtgagttcttgaggttagggtaggatgagaagcagtagaagccctgggggaaaagaattctgagttgatgctggggtaggaatgccacaggactggccaggagaatagtttcacagctgctgttgtagttggcaagagaaagaggctgtgaaatgaaatattacacaggattgccttagacactcaatggaaaacttttttccctccttccaccagaggaaatgaatgcatgctgatggtaatgagaaaatgaggctctgaaagtgcctgcttttccttcattttcatctttcccttcttttctctgaatcctccctgcccttgtgtcaagcttcattcctggttctcccaggtcggaggaacttgaagcagtgtttgtcaaccagtcttgactgagaggtgtctgagaagactgggctctacccttgcaggagtcagattgggttccagaatgatctttgctcttgtttctgctttgaatgaatggtttgcacatgtctcaatctctggcatcacatcccagcagtatcttctctcctgtttatcctgaggcaggattttgtattggccgcctgatagtttggccccccacaatgaattaaatttcaggagcaggaaaatgggaacccctgtcttctgtgtgtaagagaatctaagaatactgcatgtgactcatggtaagagatttgatcatcaatagcaagaaatacctttcatttgaactgtgtcttttagttaccagagtcctttctcattccttattcctgtgagaaggcaactggggcagagggtggttaagtgatttgctcaagatcccaaacagaataagcaatgacagacatgaactggttttgcttttcacaggtcagtggaaattgagtcgattttccactttgactggggaactagctctctccccaaagatgggggtcttggccaactctggaattctgtgattttatgactgttatattcctcagtctaacaaataccacatctgagtctgcaagagctggtgtttgatgattgcagtggaagtccctcgtggatcgcagttcattacttcacaggcagatattcctcggctggagcatgtgtcccagaacttaccaggtctgcttgcagcccaggcctgtgcatcagtccccatctgttaaatgtggaggctgctgcctttcttctgctcatcaagagtgagtcctagccaagattgtaattgttaccaaacatctgaattcactggagaggcaggaagggtgagtggataataacaccttatattcccatagaaagctttgtacttcccagagccatttaaacattgattatctcattctaacttcagaacagcctttattatcttcatttgacagatgggggagaaatggaggcacaaaggatttgtcacttggccaaggtcacaaagcagactcgaagctggtcctgtgacttgctcttgcccctgtgcttgtccttttgggagaggctttatctgttcatggaagtcaaggatgtttccttcaaatattttcccctcagcccctgcttttgaggatctgcactgggggagggagaacatttcttctgtggcttctcatgtctgtgggacacacagttcgtgacgaatatgaaataaaatggaaatagctcctgcatcctcccacacagacgagctgagagtctgcctctgatgtgagagccagcatggaaggagcgatggctctgactgtccccttctccttagttcccaactgccaagccaggaatcagacctgggagtgcaggcatgaagctccagttaggcaggccccagccttcctgcagcatgacttatgtctggtacccctgcgggttgcattcctgctacttctcataaggtagacacaaattggaggcctcctcgatggcaggcagtgcatgaggaatgctgggatgctgcagggtgctgcacatgtttcctgccttcggtgagctcctgatctactaccaaagtccgcctctgtcactcctccctacgcatcataggttggactcgagagcctgcagatttcctttaatgtcttcctgggcagagcaagttgctaagctggggctccagtccacaatcatcaagtgccacagaacaaagctgtgaggtcagttgtagcagagatggcttatgtgtccaccaaagcctacatcgtgggaaaacagctagactacacctctcattcccttatgaccaggtgatatggcttggctgtgtccccacccaaatctcatcttgaattcccacatgttgtgggaagaacctggtgggaggtaattgaatcatggggccaggtctttcccacgctgttctcatgatagtgaataagcctcatgagatctgatggttttataagggggagtttccctgcacaagctctctctctttgactgctgttgtccatgtaagatgtgacttgctcctccttgccttccaccatgatggtgaggcctccccagccacgtggaactgtaagtccattaaacctctttcttttgttaattgcccagcctcgggtatgtctttatcagtagtgtgaaaacggactaatacaccaggtatggccaggtgtggtcctgtggctcaattctggccagtggaatgtgggtgaaaggagtaagtgcttcttctaggccagcccacaaaaacctcctgggtcagtgtcccaggtgccttctccctctgttggcttagagcagccagtcatagtggtcttgggggccatgtgttgaaggtggcagagtcagaagagggaaggagcctgactctccaaatccctgcttggaagagagccactcctgtgtggatagtagcacacagtttcaccttgaatggcagtgagccactatttggggatttacctgttactctaatataccagtttgagggacaaagacaatggcttgagtcaggatcatggattcagtctggatgagacaagtgggatttgtggaacttactggcgctgctgctcacacctggagctgcctctgggtgtgaaagagtaggaggtgaagacccccaattcccttctggaagaggttagtagggcctaccagagcttggtggcaggtgctggtcaggagcaccctgggctggggccagcataccgggcagacccagccaggccaaggtggcagctgctccaaccaggccaagacccatgcactgggttctcagccttcctgggtcaaggccagagggctggtgtgatggaagatgccccagttctggcagatcttggctcttgcttcatgccctatatcagccagctatttgaccttggacaaggcccttctctggcccttggcatgattcctttcatttgcagcagctgggtgtggactagatgatcatggatgtctatgaatgtgaattttgaaagctttagtacagactatgctctaggagtttttagagttcctgggccaccccatccccattctggattccaaggctatggttctgccttagtgtgactgctgcagcatgttgtcaaacagcactttgactttccctgtgaccctaagtcagggacttccagatctaaactctttcaaactcttttgaataaaatggaaggcatctcatctccagtccccatctctattcacctggatattgtgacatctcccactgggagagatgtctcctgtctcccctgtgaccatgtatctttttttttgtttgtttgagacagtctcactctgtcacccaggctggagtgcagtggcatgatctcagctcactgcaacctccacctcccaggttcaagtgattctcatgcctcagcctcctgggtagctgggattacaggcacatgccaccacgcctggctaatttttgtattatttagtagagatggggtttcaccatgttggccagactggtctcgaacccctgacctcaagtgatccggaaagttctgggattacaggcttaggctactgcgcctggcccatttatcttatttaattaacacgtccatagcactggctaggtgctgggcaccgttcttggacttttctgtgtattaactcacttaacccctgtaacaacctgatgatgtaggtactatcactatcctcatatgacgggtaagaacactgaggcccagcctgagagattaaggaacacatccccagtttttcagcagtaaagcaagaggccaagctgggatttgaacccaaatagtctggcttcaaagtccatacccttgcccactgaggtacacagcctcttgtaagtactccttgaaagtccatacatcctccagagtctctaatatgtcctcctgagagctttgctctcctgcttctgaatctcagtcctagatggtctggtctcagtggaaccctggagtgttttttagctctattttcttctgtatattttcctgcatgtttttctctttgtgaagcctgtccatagattaatgattccattgccaggccccaggccaggattcccagtcccaagaagtggcaggagaaggctctggacattgcggctccagcatggcccagagtatgcccagggcttggggactggctgtcacagggatttacggctgttactaactgacatcttgtttttgccagggccaatcagagatgctcaggcctgactgatataccattgtttgccaccctgatgtttctggagctgaggcctgcagaccctcacccctaaaggatcggggtgttttactgcctggcaggccagatgacacaacctgacttgtctagaggctgaaccaggggtgctgggagagaggggggaccttgccttctctcgcttaacatggggtgggaaaaatccagccaggcaaaaacatattccatctgatctctcactattctaagtattcagtcttttttcaggttgctgccccctccctgtcccctgtccccctccctgtggtttttgtgcttttagattgaagggagcgcagctcagagcacgaactttgcagtcccaaagattaacgtgcaactcaaccacttacttactctatgtgcagccacaggcaaggtacttatcccctttgtgcctcagtttccttagctataaagcagggagaaaaaagagtgcctacctcacagaattattgtgaggaccagagtaatagacaacagctgcaaggtactttccacagtgctgggcatataacaaacaagagatcatggacatcatgaccaagagcgaggactcaggccagactgcctggctgcaaatcacagctctgctacctatgacctgggtgacctggagtaagtcacttaatgtctctgtgtctcaattgcctcatctgtaaaatggggataatgaaagtccttatttcacaagatcattgcaatgattaaatgaattagcatttgtaaagcacttagcgtgcctggtgcctagcaaatattcagtacttgttaaattaactatataagtgttcaagacatgttggctattacttctattatgtttccattattgttattatttatgtaattttttgagacgagtcttgctctgtcaccaggctggagtgcaatggcatgatcttggctcactgcaacctctgcctctctggttcaagcaattctgcctcagcctcccgactagctgagattacagtcatgcgcgaccatgcccagctaatttttctatttttagtagagatggggtttcactatgtcggtcaggatggtcttgatctcctgacctcatgatctgcatgccttggcctcccaaagtgctgggattacaggcatgagccaacacgcccggcctccattattattagtaactttatattatgtcctataaaggaggcaggacaaatactcctatttcactctgcagatgaaaggttatgtgacgggggcagatcctcagtttagcccccactgttacttgagtaaagaattacatcttctccacactgtctgtgtgccctcaggtgttcctgttgacagttgacctcttgccactctacggcctgtcctttttttttttttttttttttttttttgagacagagttttgctcttgttccccaggctggagtgcagtggtgcaatctcggcttactgcaacctccacctcccaggttcaagagattctcctgcctcatcctcccgagtagctgcgattacaggcatgcaccaccacgcccagctacagctaattttttgtagttttagtagagacgagggttccccatattggccaggctggtctcgaacttctgacctcaagtgatttaccccaccttggccttccaaagtgctgggattacaggcatgagtcactgcgcccggcctgtcctgtctttttgacacccaaatctgatcatgctattccccctgcttaaagcccctgatgggaagcctgtactgttggtggcctccaggaacgtctctcctccttggcaaggcccatgaagctctggaccaattggccctggctggtcccactgacagttgcattccctctatgatctgctacacctctggggcctggacaggccattccctttgcctggaagggccttttgccttttttccatccagctcaagtgtcagctcctccctgtacctacaggcagagtctggctccctcctctgggcttccatctgcttggctccagtgttctattgcatggttctcatttgtttaggagatgttcaactcctccagcacacttccctgtccttggagggcggggaccatgtgtcatttatcttcgtattcgccccatacttctacctctttgaggctgaaagtatacctggcatatgttaaatgctcagagattgtgactagatgaataataatgataattacgacactgtcgccttgcatctgtaatgcgcatcatgattcaaaagctctcacacctttgtgttttcatcttggtcccagtctggtgctgacttgcagtgctgtcctccataagctagcttatctccctgggcctcagtttctttccctgtaaatgatctgtagtcgctgtcacctcgaggctcttataaaggtgaagtggatgcttatttaagaatgtgtttggaatcaagttctagacatacagaggctgtcattgtttttgctcatcttgcccttggactccgcagctgatcaccttgccagatgggaagagccacaggagagcatatgcctgagggtggctaataatgtgtatttttctttgccctacatatttgtgtgatgcctgatggtaatggatagctgtaaagactcattatgtcctgtgtagctgcaggggtatgcatcttccttctgtgttactgattgggaggctgagcccacagagaaccatccagggcacacaggcaaaccctgctgtaagaaactcagtatatgaacatccggaccaacaaaaaagtggatggtattaaagcaattttaaaaaatcattcttcatttgaagaagggatccactggcatttctttaaataggaaaccatggctgtttttaggttgaggagttaaaacctacctaataatgaatgtgatgggccaagaagggggaaggcagaaaagcctaaagatgtggtattagtttccactcatggtaaatgagaagtgaagataaaacacccctgaaaaagtgcatctctctagaaatagatctggatttgcaggcattccatttatgggcacctgtttcagaagtaggtctgtggttataacagagagatacccataacaatcttcatttacacaaaggacttttattctataaagcattggtttgcaaacttttgcatttcttgagacagtaaaatgtctcttccttcaacccccacacctccaaaagggaagggcattgacataaagttatgttcttttaattttaccaagtaagaatttgagcaatacatttactgtcataattatttcatgaacagagcattttacttcaataattaaataagcattttttgagatccagtagccccaaacactgtgctaagtagtggctgtttaatggcagacacgataggcatggcccctgctctgatgggacttagagtcggatggaggaggggcatgaaacaagccaatacataagaacacatagaaagggtactctgaagagagacacagagctaagatcaaggtgaggggagatggcttgccttttggtggcatggtcagggaaggactgtcctacaaagatgcaataaacagggacaatgacattgagacacaaagggagagaaggagctgagtaaggaaagggaaataagtgttccaggaagaggaaactgcacttgcagaggccatgaggtgggaaaagaacttgatgtgctcaaggtcaaaaagcaggacagacacatctcaggatacagaatggctctttaaatgaaacacattcagctttatgaaaacttatgacagtgagtgtctttctgtcttgctttctgctttctttccttgctttcctccttccttatctggctgtggcctcgtgaaaggtcctcttggcccagcactacaatcctgttaaagaggtcctgtgtggggagtatagaccgtgtgctgaggggaatggggagctggaggtgtaactcactgggtgtcttccctgactcaggggatgatgagccttgagcctgtccagcctgtcctgaaatctccttagcattcttggagtctaatgtctgtatccctcggaaccaaggtggacctgaggcattggccactggcctgagagtattagtcactttcatgaatgtgggtaagctggttgcagcctcatggtttgggtttttggacaagcagacaaccacaaggtgtttcacctcttggccttcaggtttccggcatctgcaggttcctccttaggatttgttgttttccctgaaacaggctggagttgttccctggcagaaaataagactgggctgcacaaagcttttccacaggcaggcaggcaactcggagctgtgggttgaatgcataactcattcactcacttaccaaatatttcttgagtgccaactgtgtgcaaccgtgtgcatgacgctgtgcagcgcaccgcaggaagcagaggagtgcccaccacgagatgctcctggtccacacaatggcatcttttgcctcaaactctccctatgtatattgatcttgtcacctctgctaggcttaagctccttgtgggaggaagcttcttgtctccttctgttttgaccccttgacacccctgataggtgctagtgaatcttgaattatgtctctgacttttgcagtctcagggaactcagagtccttaaagatacggttgggttttcttctttgaccaattttggcttctcctgttggaggaaatccctcccctcttgcttccatctatccagtgtccttcattgtcacagggtttctaaggagcaagagactcctgctcatctctcccagagacttggcttcttctgaaattttctacaagagtcagtctacagggtagtctattctaaggtgtcaagtcccttttaaaaacaacatctgcatggtaaggtataaagaggagatgagcaggtaaaggggggattatctgtgggtggattctgagagccctctgtcttctttgcactacacgaactgcctttctttggtgactcaattatttttgggggtgaggatggggtctgatggtttgggacaggttgagcagtgttggctgaaggcaaactgaagtccacaaagcctatcttgattgctcttcttcccttttctgcactccccccatgatgcctctcatctcaaagcacccctgaactctccctcctggatggaggcctaaaagtctctgctcccagtgctgggcccacattctcagctgagtctttcctactaaaatcctgcttcagttttcgcttccaaggtgcttttgaaacctacaagcccctcctttctctccattgtctttctgcactcgtgtgttactcaccttcaattgaataggggcccaggcagaactggaatccctgggatggttgtttctccagctttcaaatgtcaaggctggtgccatggtgtattacttcgttctcatgctgctataaagaactgccctggggccaggtgcagtggcccatgcctgtaatcctagccctttgggaggccaaggtgggcagatcacttgaggtcaggagttcaagattagcctggccaacatggtgaaaccctgtgtctaccaaaaatacaaaaattagccaggcgtggtgtcgcatgcttgtagtcctagctacttgggaggctgaggcacgagaatcacttgaacttaggaagcagaagttgcagagagccaacttctggagttccagtgcactccagactgggaaacagagcaagactctgtcaagaaagaaaaagaaagaaagaaaaagaaagaaaggaagaaaaagaaagaaaggaagaaaggaagaaaggaaggaaggaaggagagggagaagaagaagaagaaggagaaggagaagaagaagaagaagaagaaggagaaggagaagaaaaagaagaagaagaagaagaagagaaggaaggaaggaaggaaggaaggaaggaaggaaggaaggaaagtaggaaggaacttcccgagactgcagaatttataaagaatagaggtttaattgactcacagttcagcatggctggggagacctcaggaaacttacaatcatggcggaagaggaagcaaatacatccttcttcatgtggcagcagaaaggagaagaatgagagcagagcgaagggagaagccccttataaaaccatcagatcttgtgagaactcactatcatgagaatagcatgggggaactgctcccatgattcaattacctcctactgggtccttcccaccacatgtggggattatgggtactacaagatgagatgagatttgggtggggacacagccaaaccatgtcacatggtgatgcctctgctatctgaacctgtccaaggtccctaagtgaaaggatgaggatcccattgtttgcctcccacaacaggctaggcccagatgaggatgatagaattacagtgaaggaggaggagcccagttctcccatttgccacccacagtacagcttctgtagcatccaggtttgtgtgtctgtcaagtctgtttggacctatgggttaaagagcagcacttagataacaactggtttgttctctctgtctgtcttcttaccccctctctctcaatcaatcatctatctccctacccatcacctatctttttccatctatttatctatacatgggcacatgcatgtaaacatagataagtatgtattttggaaagttttacttgcaaaggaatcctacattgggttccccctaaagcatatggcatgtcttgtgcatatctgcacgttccctggagcaaaatacgttccttctaagttctgtaatctgtcttgactgcaagaagaggatcctgaggcttttttcctaatagtttttgtatttaatggtgatgatgatatttaatttagcccgccatagtagtctgcaagggatgtccagactttttcttctgcccctgttttggggactcctgagggtcccttacccactggtctggctacttccacaaaccggtcattaatctttgagcaaatgagagtcaaactgcataattggcctcatgtggctgttagctatgggcagaggacggggtagaggatgctccagtatcacgggtctactctctgggtaactggcatttgtgccccagccccatattgtacctcttgtggacgttaaaggaaaggctccttttatatatgagcaaagatgggccccctcaagaagctggtggctggttctataagaatccttgtagatacattgttttggtgaatttaccaaggttctcagctttgcggatcaagaccatgggtttatagcactcagcactattgacatttgggccggataacttttcattggaggaggctgtcttacgcattttagggtgtttagttgcttccctggcctctgcccactaaatgtcaatagcactttcctctcagttgtgacaaccacaaatgtctttagacattaccaaatgtcccctgcagggcaaaattgcccccaattgagaatcactaggttagcacatgaggaaggctccagcaatttggggagagctaataattaccaaatgcttacttttttttttttttttttttttttgagacagagtcttgctctgtcaccaggctggagtgcagtggcgtgatctcggctcactgcaatctccacctcccaggttcaagcgagtctcctgcctcagcctcctgagtagctgggatgacaggcacgcaccactacactcagctaatttttgtatttttgtagagatggagtctcaccatgttggccaggatggtcttgatctccttacctagtgatcggcccacctcggcctcccaaagtgctgggattataggcatgagccactgcgcccagccaagaacaattgttatataaagttgatatactggttcaagtcaggaaaattgtgtgttatgtcacctgggactctcggataagtttgctaacctgttatagctctggaggcaagctctgcagaaaacccaactctatgctggaaccagagtcacaaaaataaatttagtaatttcatggtttaatctggagctccaaggaacactagttttggagttattaatggtagttccatatagaaagagttcttatggtcaaatgaattggggaaatatttaattaaaaacaaacagatttctttatttcagaatttatcagagcctttaatatgctaatataggctaaaagtcacctaaagaattgacattcagtgttggccaaatttattaaaacttgtggagtaattcttgagacttttcttcacaatgtaaagtgtggaaaaatggtttattagcagcaggttgagaaggctcgaggcatctatccttgccacctgtgggcggtgctaggatgggcactgtcatcctgtgcttggggacttccctcttctttggcactgttggctggtcctggctactccccagccctaccccagcctccggcttcttggagatgatgttaatgtgtttcatcagattgacatctaatctaaagtgattgcttttgcttatctctgcactgattcagcactggattaatcttacagttttattctgagagagcaaactatgtttcttaactttttttattcccccaatgggaatatcagtggaggcccacgtgctgacatcctttggtttatattcccagggtgtcctgtggaccacgggaaggactgtttggggctccttccctcactagggaaagcaatggcgggcagttggcacttgggaaataggtactgagtgactggatggatagtgggtcacatctgaaagacaggaccaggattttatctaatatgtattttgaggtgtggcacatctgaaatctatgcacataatacatgctatgtagccgtaaaacacacatggcatttggatatggcttggaagaaattttctctcccccttttacaatctagatcaaacaaaatcataaccctcctccccacaaaaacaattaaaatacccagactggccaagtgccgtggctcttgcctgtaatcctagcactttgggaggccaaggcaggaggatcacttgagcccaggagttcgaagttacagtgagctatgatctagccactgcacctagtctgggtgagagaaaaagaccctgtctcctaaaaacaacaacaacgacaacaacaacaaaataacaatagcaacagagctctcagactgttagtagggagttcacagatggcttgtttgctggagtcccttcccagtgatcacagtccaagcagcagaatctaaagtcacacagaaacagcattccttggctgcatccttcttctctgatggagctatgggctgcttgccagggacagagagggagggagaggggctggaggggtaagaggaactgtagcaaggtgcagtaggtgagggaaacaagacttcaaagctgggagcagccactgtcccacccttctggggagttaccataaagtggaggagttgagataaagtgaagtgagtgcgctatcatttccacctatcggttggtaaaagaactacctgggaggttggcgggggcggtaggggtgcctggcattgcttctagggatttgagggctccccagtacctcccaggggtagcttggggagttttctgtgagcgagtgagaggaacaacatgcagcctcacaatactgaaatcataaagttcatgtctgagatggaaatctgtgacatttgggtagggagtcttagatatgtcgctgcccaccaatgccagtaattcatggtcactaaaagccagtatccctctttgcccacattcacttccaaatgttcccctgggagggcagtactgtcctctggtgagacccaaacttgatgtattgatgcatgcatttttcagtcattcacctaattattcatgcaggtgatagttaaggtcatttctgcctgtcatggctgtgaatttggaaagaagattggtctgcttctaatatgccagcactgtgcttggggctcaagagcgttactacttttagttctcagaaaaatcctgagctggccaggcacagtggctcacacctgtaatcccagcactttgggaggccgaggtgggcagatcacaaggtcaggagttcgagaccagcctggccaatatggtgaaaccctgtctctactaaaagtacaaaaattagccgtgtgtggtggcatgcacctgtagtcccagctacttgggaggctgaggcaaaagaatcgcttgaacctgggaggcagaggttgcagtgagctgagattgtgccactgtactccagcctgggcgacacagcgagactccatctcaaaaaacaaaacaaaacaaaaaatcctgagctaggtgctgtcggaagagcaggtaattgcctgggtttcacaggaagtctgcctggtctgcattttataaacaaggaaactgaggctctgtaacttgcccaaggtcagcctgctagttaagaggcagagctaggattcagacccattttcacagttccacattgccttggggaagcaagacacacccacagggagagttaaataacaacacaagttacataacccaggacaatagtgcaggggatgtcaccaggcagtgtctgatgaaatgctaggtggcatagaaaaactagttgtcaggggagtgcagaaggtggaattctcagacggatggggctaggtcaagatttggtggaagacatgggggtggtaccagatcctgaatgatagatagggtctgagggacagaaaagcagcatagtcccaatttagtttctcaaaacacatagatgagagttgacatggtggctcacgcctgtaatcccagcgactctggaggctgaggctgaggcagaaggatcgcttgagaccagtagttagagaccacctgggcaacaagctaaaccccatctccacaaaaaaattaaaaaattagccaggcatggaggtgtgcacctgcagttctagctacttgggaggttgaggcaggaggcttgtttaagcctagaagttcaaagctgcagtgagctatgatcatgccactgtgctgcagctgcggtgatggagagagaccctgactcttaaaaaaaaaaaaaaaagaaacataaatgggatttgagcatctttctttcttatgaactactgcttttcaaacttttgggtctcaagatcaaaatttaagttatttaaatttaaatattttaaaattattaaagattccagagagtttctgtttatttggggtacacctatccatatttatcacattaaaattgaaacagatacatttttaaattacttaattaaaaaataagcccattgcatgttaacacaaagggcatacttttatgaaataaatgacactttccaaaacaaaagtcttagagacattgcactgttgtttattttttgcaaatctctttttaattttttaatttaatttagtttttattattctttaagttctagggtccatgtgcatctctgtgatgcctggcttcataggagtcagctggattcttttatttgcttctgcattcaggctattgtcttatcacatgtcatgtagcctctggactctcctgagagtaagagagtgaaagtgacaaaaaaagcgttagtattattgtaagactaattatgaccttgcataccaactgaaaaggccgcaggaacctccagaggttcccagaccacactttgggaaccactgcttacatttaaacctaggcagaagaggatgctgaacttgggcagaaactcaggtcttggatctcccttcggaaatgggaagatgaggaaaagcagataggtcaccatccttttacttcctggagccattgtgtggcccatctctctgcgtctgagtgtactaagcaggtgtgattcaggagtggtgacagatttggcccatttccacttggagtcctaatctcaccttgtatatgtaacaaaagcacctcatggctttcttcatagaaacctaggaatgcattgtagtcagttaaaagataagttaacagggctgggcgtggtggctcacgcctgtaatcccagctctttgggaggccgaggtgggcagatcacttgaggtcaggagtttgagaccagcctggctaacatagtgaaatcctgtctctactaaaaatacaaaaattagccgggtgtggtggaggggcaccttaatcccagctacttgggaggctgaggaaggagaatcacttgaacccaggaggcagacgttgcagtgagctgagatcacaccattgcactccagcctgggtgacagaatgagactgtctcaaaacaacaaaaacaaaaagataagttaacagtgtatttgttctctgtttgctaactgtggaaaatagaatatgggaggccacttctgccctcctgggactttcagtccacatggtttacacgtggttattcttcccctagagattcttgtagaaaatgccgtgactcctccctgttaaaatatgcaagggaggaggagaggcccctatgagccagcatccagttcacatgtgtttccaaggtagtcattagagggtgcctgtaataagcctcaggaggcttccagggcctgaggttgaagtgttaattttcaacacagatgtgcttctaggctcctggacattaggttaagtgtgtcctgcttggagctgatctgggacggtgttgcccttttttctaacctgtttgccctgctaatagtcacgatttaccgttccttctgcccagtgtggattctctgctactcaggacagctcactggtttaacattccaatacatgttcttttgttttgttttgttttttgagacggagtttcactcttttgcccaggctggagtgcagtggcgcgatctcggctcactgcaacctccgccttccggtttcaagcgattctcctgcctcagcgtcctgaatagctgggattatgggcgcccaccaccacacccagctaatttttgtatttttagtagagatagggtttcaccatgttgtccaggcttgtctcaaactcctgacctcgtgatctgcctgcctcggcctcccaaagtgctgggattacaaaggtgagccactgcaaccagcccaatacatgttcttttaatttgttcattctgtgatgacatagtctgttcttacattctttgaggagaccctgctttcagctctcattttgagcagctagcagtctagaacctccacttttcacttcctggcttcagactctgggcagtgtgctggcatcttgctatatgcaggcacaccttgttttattgcacttcgcagatgttgtgctttttacagattggaagtttgtggcaagcctgtgtcagtcaagcctatggcaccatttttctaatagcatatgttcacttcatgtctctgtgtcacattttggtcatttctgcaatatttcaaactttttggtacaattacgtttgtttgatgttactattataactgttttggagtggcgtgaattgcccccatataagatggtgaacttaattgataaatgttgtgtgtgtccttactgctcctccaactagccatttccctgtctctctccctctccttcagcctctctaattctctgagacaaaatgatattgaaatcaggccacttaataaccctacaatgacctctaagtgttccagtgaaaggaagtctcagagctctcacttgaaatcaaaactagaaatgatgaagcttagtgaggaaggcatgttgaaagctgagacagctgaaagctaggcctcttgcaccagacggccaagttgtgaatgcaaaggaaaagttcttgaaggaaattaaaagtattgctccagtaaatacacgaataagaaagtgaaacagccttactgctgatacagagaaagtttgagtggtctggatagaagatcaaaccagccacaacattcccttaagccaaagcctactccagagcaaggccctaactctctttaattctatgaaggttgacaggtaaggaagctgcagaagaaaaattgtaagctagcagaggctagtttatgacgtttaaggaaagaagccatctccataacataaaagtgcaaggtgaagcagcaagtgctgatggagaagctgcagcaggttacccagaagatctagctaagaccgctgatgaaggtggctacaataaacaacagattttcaatgtagattagaagttgctatctaacactttcatagctaaagagaaatcaatacctggcttcaaagcttcaaaggccagcctgtctcccttattaggggctaacacagctggtgactttaagttgaagccagtgctcatttaccattctttacattcttaagaattatgctgattctattctgctcgtgctctgtcaatggaataacaaagcctggatgatagcacatctgtttacagcatggtttactgaatattttagcccaccattgagacctgctcagaaaaagatttctttcaaaatgttactgttcattgacagtgcacctagtcaaccaggagttctgatggagatgtacaaggagattaatgttgttttcatgcctgctaatacaacatctattctacagcccatggatcaaggagtaattttgactttgaagtcttattgtttaagaaatacatttcataaggctttagctgccatagatattgatttctctgatggattggggcaaagtcaattgaaaaccttctggaaaggattcaccattctagatgccattaagaacactcacatctgtaatcccagcactttgggagaccgaggcgggcagatcacgaggtcaagagatcgagaccatcctggccaacatggtgaaattccatctccactaaaaatataaaaattagctgggcgtggtggcacgcacctgtagtcccagctacttgggaggctgaggcaggatgatcgcttgaacccgggaggcggaggttgcagtgaaccgagatcacatcactgtactctagcctcttgacagagtgagactccatctcaaaaaaaaaacaaaaaaccgccaccaacaacaaaaaaacccacattcatgatgcatgggaggaggtgaaaatttcaacattatcaaaaatttggaggaagttaattccagctccgtggatgactttgtgggtttcagtacttcagctgggaaagtcactgcagatgtggtagaaatagcaagagaactagaattagaaatggagcctggcgatgtgactggattgctgcagtctcttgaccaaacttgaacggatgaggagttgcttcttagggaaaaacaaagaaagtggtttcttgagatagaatctattcctggtgaagattctgtgaataacgttgaaatgacaacaaaggatttagaatattacattcactgataaagcagcagcaaggtttgagaggattgactccaattttgacagaaaatgccatcaaacagtgtcacatgctacagagaaatcttttgtgaaaggaagagtccattatgtggcaaacttcattgtcttattttaagaaattggcatagcaatttcttgctgtggggttgccacagccaccctgaccttcagcaatcactaccctgatcagtcagcagctgtcaacatcgaggcacgattccccagcagcaaaaagattacaacgtgtgctaaaggctcagatggtcattagcatttttcttagcaataaagcacttttcaattaaagtatgtacatttttagacataattacatcgtacacacaatagactacatatagtgtaaacataaatttacgtacactgggaaacaaaatatttttatgacttgctttattatagttatctggaactgaaccttcaatatctctgatgtatacctgtacttttgattctcaggatacattcttctaaaaaatattgctgatttaaggggtcagatatgtcctgggagcctgtggctactgatcctattgcctcggtcatcagccctcctgttttcctaggtgacatagagggcttgtagggtggctgtagggtggtggaaaaagaagcagaactgaattccagggctgactttgctgcttgttagctgggtgaccttgggaaaaccacttaacctttctggcccttactttcctcatgggaaataagattaaaaatgtatgcgaaggcttaatattgacaagctctattgagtttgagatttgaccttagagtttttattaatagacctgccatttgctaagcaaattttctagataaagatgtatacctggatgcatgtcatagtacagtccctgtttgcccaaggtgaagttaattttatgtgatggggcagagttaatccttgttaggcaaatgatgcagtcttctccggagtagaaaactgtgtagacaagaacagcttacctacctcttaaggccatagttatttatttagcataaaccaaatacatggtgataagggagatacagtaagatcttttggaagtctttttatggaaactgatgtgtattgaaggtagaagacaagcaatggcggaatgttgtgtatgtccaaccagtgcacaaaagtgggagtgggtacctctaatgggagagatcactgggggcttcccggaggacggggttcaaactctgcctaaaggataaggataagaggatttggactaggagggagggcattccaggtagcttagaggatttgaccaagcttttgtacaacatctgtcattccacccagatgttctgctggccatcatttgctccctgatgcctttagtttcttgccattgcattggttggactctgcttcttgacttcacattggggcatgtgttttattttattttattttatttttaagacggagtctcgctctgtcacccaggctagagtgcagtggtgcgatctcggctcactgtaaccgctggctcctgggttcaagcgattctcccgcttcagcctcctgagtagctgggattacaggtgcccgccaccacacccagctaatttttgtatttttagtagagacggggtttcaccatgttggtcaggctggtctcaaactcctgacctcgtgatctgcctgcctcggcctcccaaagtgctgagattacagacgtgagccaccgggcccagccagggcatgtatttttacagtaaactctgggaagccaagatggaaaataaagcccttactggcttaaaccaggctgagggagatggtctcttgagtaaacaccatgcctcgctttctgtttaagcgtatcttttcttttcaagcctgctccttctgtgtaagtgtatttttcaaagtgtgactccacatcctttcagaaagtccttcgtatcccatcaagggagtaaggtgatgggtgagaagctactctaaataaattaagggtagtatctgttttggcttcaaagggcaaaggatcaaggttagggcaagtagaaatttctccctcttgattttaagtgaaattttttatttttatttttataagaccctaattgcctgcttcatacctagaaggccagaaacattcctggatgttggactagcaagccagagaacaatctaagcaatgccatttcactggccccttcttcaccagaacccttcccccaatagtcccatgcccaaacacacgcactcttcacagtatcctcttgtgcatgctgcttgctttgagggtggtgcaagtgctattgggtgtcattttatattacagttgtaatgcccacgtgccgctggaatctttgtatcttagtcacagacttctagagtgtctgagctggaaggaaccttcattctcagccccttgttttacagatggggaactgaaagcccccaggttgcctgactgtaagttgaggtctgtcttcaccagttcatggtttgttttcagtatctgagcaataacagctgctaattattgaggccctgtgctgagtgcttttcatgcatcatgtcacttatttttcataacaactgtatgaggaaggtatgaccatcatctctcctttaaggttagagaggttgagtaatgtgtttagagttgggtgttggagctgggtgttagcaaagatttgaactcagtatacggtggcactggggcactggctcctaactggtaggctgtgctgcactgtgtttgccaagtgaggctgcctctattcccacttcttccctcacttcccatcgtctttctttttcactgccccaccagggatcttgctctcaacttgccaaggtaggattccgaccatggctaccatgatgacttggaagcctggactccaaaggaaggagttccaaagccttgatcaatggaacagaggcattgtccttgggacccgaaggagctgataccacgtcacttataccaggatccttgctggttaattcacatagggcggtggaggacacagtgcagtctctgtttgcactggcttatgggagactgagcaagatagagtagagagaaagtagatgaaaggtgccatgaaagccatcctcagctcaagcctgtgtcttcttagcaggggtcattgcatcctctttattatcaaagggtgtgatcctaatacgcttatgagacagccagtgtagatgtgatatcaagccagctcggccctccctggagcctccatcatatgcatctatgtgtcccccttcattactttccgattccttttccccctcctacagcaatagcctgaaggatatttttaggccccagtgaggctgtgatcactgacccttggcttctgaaaatttttacaccgttttgaagggatgtgcatactcaggaatacagctatttttgaatctgtactagagattctaggctgtatcctccatgggggcttattttttaagtttgagcagaaaatattccaagggacattggtagtgtaatggatgatgagcctgtatgctgatgctgattaggccagagtgggtccagactgctctggccatccttgaccggaggaagaactagtacgtccaccttgcctcaaggggagcagatctgtcaatggctcaaagcctggagtgcagttcctactagctccacctggagtcttaaaagaggaacagatcagcatggaggagatctttgggtcctgggcattttgcattttttaagggtatagagtcatacttttatagttcaacaacattgacaagaatggatgttttgagtccgttggttaaccttggatttgaaaagaggaagaaaaacagaaaccacacattagcagggcagcactgaggttacagtcatgttaccatagacgccaggcttgaagagccgtttggggacaacagagcacaacactggaaaaataaattttttagagacagggttccgctctgtcacccagacttgagtgcagtggtgctcactgtaacctcaagtttttgggctcaaacaaccctcccatctcagcctcctgggtagctaggattacaggtgtgggccaccatacccagctaattttttattttttatttttgtagagatggagtcttgctgtgttgcccaggctggtctcaaactcctggcctcaagtgatcctcctaccttggcctcccaaagctctgggattacaactgtgagccaccagttgtaatttttttttttttttttttcccgagacagagtctcaccctgttgcccaggctcgagtacagtggcacaatctcggctcactgcgacttctgcctcctgggttcaggcaattcttgtgcctcagccaccttagtaggtgggattacaggtgtgcaccaccacacctggctaatttttgtatttttagtacagacagggtttcaccccattggccaggctggtctcaaactcctggccttaagctatctacccgcctcagcctcccaaagtgctaggattacaggtgtgagctaccatgcctggcaagcacaacatttttaattttcaagagctaccagtttcttttctgtctctgaagagacacttctcccaaggaaatttccattaaaaaattaattttgtgtgtctgcccgacagatcatgggagacagagtgctgttatttgtaaaacatttttaaaaatacatttttacctttatggagcaatgatattcctggatttatctaaaaggaaaatctgactggtgtggaagaacaagtggaagctgttaatgaaaattttgaagtgaaggaaataggaatgtgggaatagtgggagcctgggtgttctctaaccagggagaactctcaggcagaaagtggctactgtggacagtttagagactggtgagtttagggcctgttgatttctgttattagttagcattggcctttgtgtttagagaggaagatggttattacagctagtgtcaggagagcaaggggtgtcttaatggagttatgcacagtttttgcctatgacaactcagcctcttgggctcagagcattcacttagacagagcagctccattccttgtggttttctggtcagtattttaggaccatcagttctgtggctcatgcaggtgtgatgtataaatgtctggcctgggagagatgccaaaaaagaagtggggagatggagtaaaaatcatttgtctggaggtttttcatttactgagtctcttcaggaaactgggagaagttgagtttccttccttaattctcaagttcattttagacatgagagaaagagactcagagacattaagtgtcttggattttgtagttactaatggggaaacctaagcctgaaaaccaagaattttctgaattcctggaattttttttttttttttttttttttgaggcagggtctcactctgttgcccaggaagaagtgcagtggtgcaaacattgctccctgcagacttgacctcctaggctcaagtgatgctcctacctcagcctcccaagtagctgggaccatgggtgtgtgccaccacacctggctagaattttttgtagagacaaggtctcaccgtgttacccaggctggtcttgaactcctgggctcaaggtatcctcccaaagtgctaggtttacagacatgaaccagtgtacctggccaattcctggagctttttactgctacagactgccatgtgattcaaattaggctttcagaatgacctcctactccacagaactccattttcactgtcagccacagtcctagaaattccacccttagaaagtctttcctgtaagttaaaccttgttatgagtagttaaaatacagatgtcctagagaagggccataccatcttatcagtcatgtgaacctcagtataaatgaaatttatgagagcttttttttggaacagactgtcattggagagggaggaaagaatatgggggccctggacatcctagggcaggcaaagggctccatgtcgggaggctagggacagacatgtctcagggactcaggtttttctataggtgagccctgaatgccattttaagtacattctacccaggttgttagtgttaaaatatttggatatgttgaggttcttcatatgttagtatcaactcacagggcagatttatgtttcagagtacctatcatataaccaggagcttactaaataatgaaatacagtattattggtcattacctgtattaaataggtttattcatccattgatatccacctttttgaaaaaaggtttgaagtcagtctataatatatattatatgttttacttatagcttactttgggcagtagtagtagtggtaacaataatcattataatatcttagatgctgcttcctccaggaagtcttcccggatcctccaaatccagctacacatagctttctatgtgcatctgtagtgtgttgcctgcaccttcctcagccagcacctaacacactatttggtattttcctatttgtttatctgtctctttcactatctttctcaaataagattcctcatctgaccacagaacaacaacaacaacaaaaaaccgacatgagtgaactgttttctgagttctcctaaagatggtacatgattggtaattttagataaacaggagagaagttaaatcgttataattaatggatgtcctagatcaagggtcgacgactttctttaaaggatcagagagtaaatatttttagctttgcgggccacagagtctctgcgaaaacaacttggctctaccattgtagtgcaaaagcagccatagacaatacaaataaacaaatttatttataaacaaaggcagtgactgagatttggccctggggctgcggtttactggtgatccctgtggcttagggcttgagagtttactcctctctcagaagctggctgaggaggtatcagactgactgcatgtgagcttgatgcaggcagagattctgacttgcttcccacctttcccctggtggctggccctgtcctggtacacagtaactgctcaacaaatattagctcttgttcattcattcattcaacaagaatttgttgagtgcctgttgtgagccaggcatgattcgaggagcttgggatatgtgagcacagaaaacagataaggtctctgtcctcatggagctcacattttagcaagggaagacaaataatacgcaagaaacagtaaatcataaatggtggggtatgtgataagatgataaaggccacggaaaaagagacattactaagcaaggtaaggggcattggaattccctggggaggtgcggagtggccaggttggggtgttatgtgggctggtcagcactggcctcgttgagagggtgaggtttgagcaaagacttgaaggaggtcatggagtcagcctagtggctggcctgaaatgccctctctcctccctctcaccgtctccactatcagctttctttctacgcagctaagagtctctcttcccccaaagtcgtgtagtaggaagcgctcggggcttcaagggacctggattccaggcatggctctgctggtgacctcggtgggctctttctgctctgcaagtcataaggccacttggggcctgctggcccctgccttctcagaacaacgattttgctttgagcctgtgcacatggcattcattgtgtagcagtttcatggggtggtcttagcttcaaggaaaacctcctggaaggcaggggccatctcacactttttatatctgctgtatagcaggtggcaccatgtgggctgcgcagttgaggctgggtaattatgaagtgcagtccagtggaaaacattaaaccctgggctgggtgcggtggctcacgcctgtaatcccagcactttgggagtccgaggcaggtggatcatgaggtcaatagattgagaccatcctggccaacatggtgaaaccccgtctctactaaaaatacaaaaattagctgggcgttgtggcgtgcacccgtagtcctagctacttgggaggctgaggcaggagaatcgcttgaacctgggaggtggaggttgcagtgaacagagatggcgctactgcactccatcctggcaatagagcaagactccatctcagaaaaaaaaaaaaaaaattaaactctgaaattcagttccatgtctatagttgagcctgattttacgtaatgcttgcagtcctgaaagacagtatactcatccatgtaaacgggggggttgtctgcgttaagtggtgtgagcattggaagttagcaaatgccagtgagagaagcagcagcttgatggtatgactgggaatctgacaaacacaaaaggagatgaggttacacaggtccgtgtgttctccgccttcctggagcaacaggacttttggcctgggcctctgttgtgtgttaagagaaccctgagcctgagtgtaggggtggattttttgatgcgcagatcccccctgcaggcctgaagtactcactccccaactgctgggagtgtgggctgctgacagcttgcagctgcgcccctcctccccaggactattgcctcagcagaagagaagccccttcctgagggcagccctcatggaaagactggtttatgggaaaggtctagcctcctttccccaaaatgagacagttctccaagtccatcctcgctgtagagctcccctcgggattgcctaggacttttgttacagctgcgtcgcagcccacctgttccctctgcccagtcctgcttctatcaccccttccacctagattgtttctgagaacagtcttcaataaacctcctacatgctaatctccctctcagagtcactgggccaggccagcatctggtggaaacagtggcctgtgatgtgggcaggtcccttggagccctgggcgcatgatgtgattgcaacaccacatgtggtccatcacccctgcaggctggtttggttccacgcatggcaagtctgccatatctcccaccactagaggtttccagcttgagttagacatcgtcctcctgatgcaggctctcctttggctcagagtcctcagagactatcacttccatatgaacaaatatatctcggaactgtttagttgcaaaaaggaacaatcaaagcagctgtaagacagcttgtagtacagtttggggtcaagaccatagactttgggtttgaattttgcctcctccatggattagctttggtcaccataggcaagtcatttgacttttctgtacccaggctccatcacctgtaaaatggtggtaatggtagcattcacctcatagcattgttttgcagattaagtgaagtggtgccgaggtgcctggcacaggcctgtgtgagtgttggctcttagcagatttgtggaagggaaaggagctcagggagatgggaagtggcaggaaagcaaagtgttggaggaaccaaagagaaaataactcttagaacatgaacattttgtgcacttgtctgaaggtgcacatgggaatgaatgaggaaggcaagccggatccttattctggggaacatagacgccaggcaggaggtaaggatgagaggataaaggccaaggctttcattcttgagttgcggagggttgtggagaaaggaaattaatgctaatttgacaactactatgtgctaggcactgtgccaagtcttcctatatattgtcccatgtattttttaccatctgacatacacattttctttttctttttttgagagagagtctcaccgtcacccaggctggagtacagtggtgggatctcagctcactgcaacatccgcctcctgggtttaagcaatcctcccacctcagctaccagagtacctgggattacaggtgtctgccaccacactcagctgatttttgtatttttagtagagacaggttttcaccatgttggctgggctggtcttgaactcctggcttcaagtgatctacccacctctgcctcccaaagttttgggattacaggtgtgagccactgtgcctgaccgacatacacatttttattcttatttctgagatggcaaactgaggctgtgagagattaagtcacttgccccaggtcagagagctattacatgataggcgggagttggaaggctgctctgggtgagagcagggctggtgttcctgtgactagatcatactgtctaaagcatttttcttcactactgttgtgtgccagggcttgaagggcagttgcttacagaaaaatcagtctattaggcaaattagacgtggagcagtcacctcttccaggaaggctttcctaagttcccctgccctggagtctactcctcgctctgacttcctgacactgcctgcctctccatcaactttaaaactcctctcactttctaccatgtgttgtggttcgcagtggggctatcctcattcctcttacagtcaagtttctggagaacaggaagggctgaacctctttcctctcattgtcctgcatgtgcgccttccttgagcatcctccagtagatgtgaaggacatttctgtgggaagaatttatggataggaacactaggcagtgatggtaagcgactgtggattctgcatcctcagaggcttcagaagtctgatggaggtaaggatcattttggtttaaggtgatcaggggagacttcactgagtggataaagcccaaatcccagtcccagaaaatgggaatgactgggggaatgagcagatggaagaggggcccggccatgctgaaagggagctgccgccttcaggagatggacggtcgtcggtcatcgtgcatctctctgcctgtgtgctgtcaggccccacacctggccaccggcatctcccctgcagcatggggttgggggctggacgactctctccaaggaagtgtggttatgctagccttgccaacttgagaccaaatgtttctcccacgcagctgtcttcaaaatgaaatcctgagaaggaggtgggtgagcgagcgagcaagcatgaattacccttggcccacgtcttggctcacttacagattcctctcatcttctggataaatcaggaactcccaaacactcttcaaggagtcatccctcactccccaccctgcctgaagccaggcggaatcaggcctgccagtcctggaacacgctgtgctcttcttcggagcactcagacatccactacctgtccagcctttgtgcgggtgggaacagtgtccccattcacgaagcgggagacccggagtggggctgatttgccaacggcccggggctcctcctcgcaactgcccagcggaggacctctcggctccttttctgcctctttccaggtgtatcctctcgcctgtgatgtgtagatgttccccaagcgtctgccctacctggcccccttctcccctggagccttaagacacagaatgtcagggtggagtcaggtccaatcacatgctctctgcatgtccccttgccctcaggtgtgctctccttgctctgtccacagagcttgtcttgcccggggccctccctcacctccacctggggcctaagactcaccccctctgctgacttgcgtacattgccaagtgcttcttggacatttcaacctggacatcgccccaagttcaacaaaaccaggaacaaatttacatccctcccccaaccttagcaccccttcctgattatacagcacctccattcttccatctccctggcttgaaccctttgtttcattccttttccccatgtgctcaacacctcctggcaggtcctgacagcctcctatgccagcgtcctcctctccacagtcctgctgcaggcgacgcaaaccttttgtctgggctcttggaattttctcctaactggcctccctgctgccaatctctcccacctctagcttcatcctgcaactattaccagatttacagttttaattatgttaattaaaatcattaattaacatagttttaatgatgttatttttcagggttttctctttgctttagcattaagcaatgacttcttgcatagcaactagagccttttatggcatttacccagtctttctgacttaatttctttacacctgtagataaagtacacttcagccagaagagctgatttgctgttttcttcttaagctgtgtatttccttcctctctgcctttgctcatgccttgccttccccgaaatgcccttcctcctctcctccactgtttgaaatcccactgttttcagataacctgtcttcaagggtctttttctgatttttgcaaccagacgtgttttctctttcttttggattgcctttatgatggagattatatcttgtcattctttatataaccacagatcttagccttgtacgttgttctcagtattggctgaattgtactgaatttgagcatcttgggaaggatcagtgtgagtttctatgagggcctaaggtgtgaataactctgagatgtttgattgtcatatatggcctaagtgttttgcttttaaccttacagttattgggcattaagatatgacagctcttaaaagtacaggattggaaagcatgtttctagagactgaaatagatgaattttaatatccaacagctatgtagtttttacacggctcaatcacagctgttatttcgtgatcttcaccacacttcaaagtaataggtagttcatgcattatttttattaagcaaattaaggggcagtgttggttcatgtaccagtccaaggatagatggaagcaaagtgggatgacagtgctcatatgaagtcatcatattgctgtcattgtccctccaggctgctgtcttctggctggctgtattctcagacaagatcttcccaagtggtggcacaaatggccaccagcctctccaggcttaaattcaactattaatattttaggaacctacagaatgatacgagagggtatctctcctggtagctttagcagaagtcactgggaaggcccgtctttggtccactgctgtggctgggtctggacatcattggacagaggagaaaattatgagccttggaaaagctaagtgacttttctaagatcacacagaagactgaagtgcctgtcttgtgaccaagagtgtccctgtgtgagcccttttttgagtttaggggcagctgttgactcagtcgcaaagggaacagattgtatatttggggtttcaactttcctttttctgtacccttttacagcctgcagaggactcagctaattctgaagactcatctaatgtccagtctcttaaaattctgtttcctcccttcctttttaaaaacctgacgtttatataaaaaaaattatgttcagtgaaagaagccagactgaaaaggctatatactgtattatctcatgtatgtggctctctggagaagacaaaattctagggttaggaaatagatcaatggctgccaggagtggggtgggggtacaagattgagtacaaaggggcccagggaattttttgaggcatgaactgtttagatcttgatggtggtggtggttacaagactgtatatatttgtcaaaatccacagaactctacactaaaaagggaaaatttcacagtatgtaaattatacttgaataaaaacaacaaaaaaccttaaatcctctttaggcctgtttgacaatgggatttgcatcttaatgagcatcaatactgtagctgtgatgaactaagtagctttgagatacaccataatctaatatcaagaacaagaaaccacaaagtgttagattcattcaagaataattggctgtcagccaggcatggtggcttgtgcctatagccccaactacctgggaggctgaggctgggggatcacttgagcccaggagtttaagaccagcctgggcaacatgagaccccatctcaaaaaaaaaaaaaggacttattcactggaaaatgaacaagttgtccctgaactgagtaaaccagtggcccttatgctgctgccactatctgactggagcagtgaagctgtgcccctaactctccttccttgggcttagtcaggagtccctagggaatgtgggaatctgggatggaggcagagggcttagggcaatattcaggaggaagcatcattatctccactccaattctgtagcaagaatgatccttcctagccagttgataggctggaaggggagaggaaaagtctggcattcagggttcagcattgtttctcctttatgctctttccccctcactcctctccctccccaaccacctgacacgttctttaggccccacttggacgcacccttccccctgcccattgcaagccctcctcaaacagagcatcctcagctccaggaatctccccaggggcctgacttttcagtcttttccattccagtttttgtattccccattctctcaaactcctccctagttacttctagctcatctcattacaatctgagcattttcctttttcattcatgtctggttattcacttcgaacactacactcccaaatgtttcagtctctccctgcctcattctgattctacctgggttcatctcagaccacagttgtttgaaagtgcagtattacaaggagatactgtataacatgcagattacagagtggtttgtgaagttttagtagccttctgctcagtgaaagtctttactgacatggaggtaataaatactttccattgtagatattacattttctgatataaaacatctgatgaaaaaatctctctatataagatgcaaacacttttattttttctgaaatgatctttttgtgaaaaaattaaaaaggttgctcaccagttgctaaaattaaatgcggaaatttccttagtggaattgatacatttgaatgctggcttcggggatcccaaatgtgattgcttctatcggtgcctgtaaaggagtctgtaattatggaagcagtcttaggctgtaggtaagatctggagccagggtggacctttgtatgttcagcaatgaggggatatttttgatgagctggaatatccaattgaacagctgtaacaaagtttctgagaatcttttcctcatggttgtttatagtttgcttccagcacacccagatctgacactttctggccttaaagttgcataaaacaccctgtcagttgtaggcagtaagacagggtcttgggccgactggggacaaatatcagaatcttcctggggccagtagcaccagaatggggcctggcagacagagagccaaggttcttctgggagaaaccagcaatgctctggtggaacgaggtctgttctccacgtctgacacggtcctcagccagtttctaccaatcagattggagcctttgccggctcagcctggcagatgggcatgtgcacgttttgggcatgtgcaagttttgggcctgtgcccaggctgtaaggtactgctgacaggctgcgggctgtggtcttggaagggaaggttcaaggggtggtgcaaggctagtacagcctgtgctggattacccaggaaagctgccagcatgaccactgggtgaccagagaagctcaacaggtcttctctgttccagcacagtcctctcagtgggcatgtggagagctaccagaaggccatgggttacccagggtctctcctttaaagagggcggaagtcccctgtaatgcttgttacctggtcagcctgagggcacttgactgtgtgtcctatgctgcaagggatgtaggaaggcaggctgtggttagagtgtgggctttctgtgttcttgcttccaggtgctctccatctcattcttgggaatttctcggatatcacacgaaaagcacaggcaacaaaagcaaaaataacaagtgggactatgtcaaactaaaaagcttctgcacggcaaagaaaacaatcaacaaaacgaaaaggaaacccacagaatgggagaaaatatttgcaaaccatatatccaataagggtaactatccaaaatatataaggaacttacataactcaatagaaaaaaaaacaccacacaactggattaaaacctgtgcaaaaggtggcttgcacctataattccagctacttgggaggctgaggcaggaggattgcttgagcccaggatttcaaggctgcgatgagctatgatcatgccactgtactccagcctgggtgacagagaacctatctctaaaaagaaaaaaaaaaaaactaggcaaaagtcttgaatgtacatttttccaaagaagacagacatataccaacaggtatatgaaagggtgttccacatcactaatcatcagagaaatgcaaatcaaagccacaatgagctatcacctcacacctgtaagaatcagtattatcaaaaagataatactgcatgttggtgaggatgtggagataacatgttggtgaggatgtggagaaaaaggaatccctttacattgttggtgataatgtaagttggtacaaccattatgaaagacagtatggaggttcctttaaaaatcagagaatgaccttatgatccagcaatcgcacttctgggtgtgtatccaaaggaaataaaatcactgtctcaaagagaaatctgcactttcgtgttcactgcagcattatttacagtagccaagatatggaaacaacctaagtgtctgttgacagatggaaggattttaaaaatggaatattattcagccttaaagcagaagcaaatcctgccatttgcaacaacatggctgaaccctgaggatattaggctaaatgaaataagccagtcatagaaaaataaatattgcatgatctcatttatatgtggaatcaaaacaagtcagactcagaatagaatggtggttgccaggggctgggtggggagtgagggtaatggggagatgttggtcaaagggcacaaactttcaattataagatgaataagttctggaaacctaatgtacagcataatgactgcagttaataataatgtgttgtattcttgaaatttgccaagagggtggatcttaactatactcaccatacaaaaaagtaggtgaggtgaatatgataattagcttgattgtggtaattacttcacaatgtgcacttatatcaaaacatcgcggtgtacaccttgaatgtaaacactttttgtcaattatacctcaataaagttgaagaaaaatagccaggagccacctgatggaagtctttctctccagctatttcccacccctcaccgagagaggcccaggagctttcgagagtagacttgatgcttttttgcctttgaagttgctccggagaaaggaaccagggggagctgatgtaggaagttagctcatcccttcccactgagccaactctggtttatctttcagatcccgccctgcctggccacatctgtgtacatttacttattcctcacatccgtattgtgggcgtgggtatcttttcccccgactgcttctttcaaaaccttgccctaagcaggaggtttttaagactgtgtttagtccagatactttgagccaacacatccacattagcagactccacagagagcttgattccggctctggttcctacagatgttctgttggctcttgggccctagaaataggaaactggcctggtcagagatggcccaagcaccagcatgacctcatccccaggcctggtgaagggcgaacagacctgagtgtacaggaaggagcctgcctcccgggagctaagtagattgtagatttggccgttgtgtgttttttttttttttttccagataatgcatctaataaaaatgatgtatgggagaaaggcagagagtactgggttcaaatcctggaccaccacaagctgagtaactttgtctttcttgcttgatgtttctgagcttagtgtccttgtcaaatgggaataataacaccaaccctgttgtttgtcatgagacataatagatacaatatgcgtaatattcgtagctcaggcacaggaagccaggaagctctcaatcaatggtagtggatgttattaggactatcaagtagagtgtgtgtaggtattgttttccaaaaaatttcctagagaaggcaatgtttttctccgaattctggccacacatcagaatcacataaagtaactttaaaaacccagttgcctggtctttctctctttcttttcttttctttctttctttctttctttctttctttctttctttctttctttctttctttctttctttctttctttctttttctttctttcttttctttctttctttctttctttctttttctttccttctttctttctttcttccttccttccttccttccttcctttctttttctttctttctttcctccttacttccttcctttctttcttttggagacagagtctcgctgtgtcacccaggctggagtgcagtggtgccgtctccggctcactgcaacctccgtctccagagctcaagcgattctccttcctcagcctcctagatagctgggaccacaggtgtgcaccaccatgcctggctaatttttgtattttgaatagagacagggtttcaccatgttgcccaggctgatctcaaactcctggcctcaagtgatccacctgccttggcctcccaaagtgctgggattataggcgtgagccaccgcacccagccatttgcctagtttttcaatcctggcgattctgatttgtgagtctcttgtggtgctctgaaatctgtatttttccaagtgctccagatgactctgatatgccctctgctttaacccaaaggaatgaacagccctgagtagaattttagacaattgcttggggtgctatggggaggcagggagtgaggggagtttgaagggacagggaaggctgttttctggggactctgagatcaattccatcttacaattgtccctgtctgtcatgcgggtcctgcaaaccattcaattctgtgtattcccctccttcctgcagcgactgagacagatggtggtggagagcaagtgcctggtggggagaggaggcccgggacacagataccttagtctcactgccctgacaggcccaccccaactttccctgcagtgcctccagaactttgcctggaacttagtcaccctggggaggcttctttccctatctgctctgttgtgcttcgctttctcatccctgttctcaacaacatttcgtcccctctgccccacccacatcactcgctctgcccttgggagacctgatctctacctggctgtcattccaggaagcttgctttcttgttgaaacgaaagcatgtggaggttttgcttctctgtgtttatggtctgcacagataaccactcccaaatggagctgggtatggggtgttaaaaaaattataactttacttttaatcccagttaatttggcatctggcggctaatgagatgcctgggaggtggagagttgggccctgactagcctaagggagaccaccgatagggataatacgtgtggaccagcccctgagtgtgtcctcagtatctgaacagtggtgaggtggggaaagcagacaatatcagcgttccagtttctgtatttcagtttgttcagcatcgaatttcttttccaccgtagttgaattctttctagccctgggtcactgcactaatttaaatggatggcctaataggtcattatagatgtcgtcacaagcctctggacttttaccatgctaagatgttttttctttttttgtaaattagcttgttaattatcacacgcctacaagtgatagccaaaagaaatcagacagtggaactgaaggaagttaggcagcaatcctaagtatctgtctctgctttccgagatgttccttcccctccttttccctgccccttccctccttcgttgttttgctttctttcagttttcatttgtatttgtagggaaagctatcagctatattcagtcccatacctttaaatgattcctatatattgataattatggaattttcacttctgtccaaatcactcctctaaacctcagaggtatatccaactctctgggtatctaataggcttctcacacctcagatgtccaaaaccaaactcggttttccttcccaaatctgctcctcctgcagcctttctggtcctcactgttgagaagggcacctggcccatagtgggtgctcaaaatatatttacagaatgaatgaagactaagaaatggaaacatttataccttcatgcttggagttaggagtgtatccattccctattctgtagctgatcagctgtgtgtcaccagatgacttggtttctttgtcttcctaagtttctacctcactgaaatgtggatagtgctacttattctttgatggtttgtgccaggacaaggtattatatcattgcccgtaatattctccgtattttcagtgtcccgcctttcccacagcatcccatggacattatacaagacttttgtggctggcttgttttacttagcataattttacccagctttcattcaagactgcttgacacatccctatcctgcctacccaaatgatttcccagcatgcttcttctctccaaggacacagacttccttatcgtctcaggaacatgtcattgcattcctgcccttcagtctcctctccttatcccaggcctggatgccctcctttgtcctcatacctgtctagcctcttgctacctttcaagcctcagtccccgccacctctgcagtgtcccaccactgtgcaactgaactgatgacacgcttctctgattgctccactactgagacacactggattttaccctgcctccttttgcgtgcgctcatctcattttctcagagattataacctcttgaggccaaggcatttgtttctcattctcttgcatctccacagtatgtaatatgaaacaactgggtattttttttgcaaattaaaaaaattgtggtaaaatacacatgacacatggcataaaatttatcattgtaaccattcttaagtttatacttcagtggctttaagtgagtttgcatttttgtacatgcactctccagaactcttttaccttgcaaatctgaaacccagtacctattaaacactaacttcccattttcccctgcccacatcccctggaagccactcttctactttctgtctctatgaagtgcactactctagctacctcacataagtgggattatacagtatttgtccttttgtgactggcttgttttacttagcataatgtcctcagggttcatctgtgttgtagcatatgtcagaactgccctccttttttaaggctgagtaatattccattgtatggacataccacatgtggtttttctaatccattgatggatgcttggactgttttccccttttggctattgaataatgatgcaatgaacatgggtatacaactatctctttgagaccctgcttcagttcttttgggtacatactagaagcagaattgctaggtgatatagtaattctatttttaattttttaagaaaccctcttactgtttttcatagcagctgcaccattttacattcccactgacaatgcacaagggttctaatttctccacatcctcaccaacacttagtcttcttttttttttctttttggatagtaaccaccattttcatttctctaatgagcaatgttgagcatcttttcatgtgcttactggccacctgtatatcttctttggagaaatgtctgttcaagtcctttgcccatacttacatctggttttgctgttgttattaagttataggggttctttgtatattctagatattaactccttatcaggtatctgatgtgcaacaattaggtgcttttgggagggaacacattgacaaccattggttattataggagtccacatctgaaggcaggcatgtgaaagaactttaaaaatccatggatatatgccaggcatcatctcatgcaaagcgcacaactaccctgtaagatatgtggcatcattttcattttgcaggtgaggaaattgaggctcagagaagtccaataatttactaagcattccccagtctagtaagagtggcagaagcaggatgtgacgtcaagcctgcctgactccccacgttgcctcctgcatcttcaggctgcgtgagagagcgcaagcaagcttcacacatgtgttgctcatcactcttcttctctggatttcattaaagaaacgcctgtgcctggcaagcaggccgctgccagcatccctgactctgcaaaatgtgatccttctgcacgtttagatctcggtatgactcaaatacctaatgtccctttacccagccttcaatgggagggcagatactctggctttttggatctcttatctctacccttcagtctctagtttgggtcttctcggagctggtcacacacatcagtcacttcaacaggaagctttggagaggcaaggatttgtgttggattcagggggaagggatgatgctcctgccctgaaggagtagcccctacaggtgctagactaggtggcgaatgcacctgagagcaatgagagatgttgtgcctttgaaaaccaagtaaacagtacagtgcaggctatcaggacttcaaaaacagagagggaacaggatttttttttttttttctcagactgagtcttgctgtgtagcccaggctggagtacagtggtgtgatcttggctcactgcaacctctgcctcttgggttcaagcaattctcctgcctcagcctcctaagtagctggaattataggcatgcaccaccatgcccagctaatttttgtatttttagtagagacggggtttcaccatattgaccaggctggtctagaactcccggcttcaagtgatctgctcacctcagcttctcaaagtgcttggattacaagcgtgagctgagtccctgacctgggaacaggattttaatgggttcttgaaccatcttccctgatccaccatgggtatgtgctcagaaaagccaatctatttaatattaggcagagcaaaacctatttaggaagaataaatgctataagcaaattctgtagtgcagcccatagctgagagatgtgatcttcagctcatacgttattctagctcctgggcctcagtttacttgggaattgaaagagcatcattggcatgtggtttgcagctcatgggtgcagttctgctacaggacacagcccaatctcttggatggatgaatgtctgacataaactaagagaagttattgtaagagggcttcaccagcctcaaagagaattcacagtactaaatatgaaatgacaatcatacaatgtggattgcatgattttaatgttatagcacacataatgaaaattagtgataagcatgttatgaacagtgtctcatttaatttttgaaagaatgctatgaagtgtaggtactatgattagtgaggcaaagtgaattctccagagtttcacagctggtagatgatggaaccagaattgaacatgagtctgcttggtttctaaagtctttgctctcaaatgctgcactaaaccccctgttcattacagctgctacaggaagacaggacataggttgataaactaaagtataaatgccacttatcctggctcacacataacattcttccagaggtatttagaggagtcaagaactgcataaaaggataaggccttttggggggagaacatatattctgtattaaaaaaatcttcacttgtctgcagcctgtgttctttcttcatggttgatttttctaggctcttaagcacaagtggtgaataatgtatcatcttcatctcctttgttctacacccaaagggttggtgcatcctgttagggtttttaaaaaattatggtgaagtacatataacataaaatgtaccgttagtgaaaatatcgctaatgtacattcacagtgttgtgcaaccatcactactatctattgccagaatatttttatcaccccaaaaggaaaccctgtactcattgagcagtcactctctgttcctccctcccccagcccctgggaaaaattattctgctttctctctctcaggattttctggctctgggtattttatatagatggaataatacaagatgtggccttgtgtgtgtgtcctgttgatttaagcacttatagttcctccttcccataccaaaatttgcggtcccattgccttggtgtagagctgtgcccctgcatagggaactgagtcccaaggtgggtattggtttgggatcagagagactgcaccgggctgatgcccagacaagttatgtgacttctctgagtctgtcaaggttgttgcaaggattaagtgaaatgatgtcaacttccttgtttttgaacttgggcaaattatttaatactgctatgcctcagttttcttcccacatgaaatgggactataatcatacctatatcatgggtcattctgagaattgaatgagtaatacatggaagtatatagaacagtgtctgaatgtgggaggtgcttgatatgcattagtattgcatgcttggtaagtgtgtggtggcatgattttgaccaggccccacaccattcactggagcaatcatggaggccccttcagtggtctttctccttcctgtctacccttgcagccagaatattatcaccagagtgtcactatcacgcactcttcatctcaagacccttctgctagctttgtgtttaaggccctctgcatctcacttgctttcctttctggtttctcttcccatcctattccccaggaacccattgcctgctaccgctctggaccacctttggttccccaagccccctgggcctttcagcctctgtgcctttgcttatactcttccctcttttgggaatgaccttctactcaccatcactggcaaagctgtgctcatgtctttcactcagtttttcatctgccataatggtgtgtacatcatagggttgttctgaggattgactgacatgatacatgaccgagatgatacactgtacataataatatgaactgagataataaagcctgtatatgtgggtaccatctggtaattgttcaatatgttatcacatcattatataattatattaggactatttatacactcttgctttcctaattaggctgcaaattccttgaaaacagggccgtgtcttgttaatctctgatccctacttatatcaagcatagtaccctgcataaagtttccatattgtttatttggtttctcaacagttcctatgtataactcttgtttctctaatcaggtcaaaaaagtcaagtctctgaaggagggcctgtggtttctccttttctcaaatcctccgcagcttttagcaccaggttttgcagacagaatatgattaatacatacccaatagatgtcagaatgtaatcgactttaaaaaatgacccaagcaacatttttcaaaacacatttttgaaagtacagaaaataaaatgaaaatttcccataaccccacccccagtgctgttctaactccagcctccaaagctaaccactattttttttttttttttttttttttttgagacggaggctcgctctgtcgcccaggctggagtgcagtggcgggatctcggctcactgcaagctccgcctcccgggttcacgccattctcctgcctcagcctcccaagtagctgggactacaggcgcccgccactacgcccggctaattttttgtatttttagtagagacggggtttcaccgttttagccgggatggtctcgatctgctgacctcgtgatccgcccgcctcggccttccaaagtgctgggattacaggcgtgagccaccgcgcccggcagctaaccactattagcaagaaaacaagtgaacatcacatggaataactgatatgtgttgaatacttgttatgtgctaaatattcatctgatttcactcatatttaattttattcctgctatgaagcagatattatcgttatccccattttacagaacaggaaactgagacacaaagaagttaatttattcaaagccataagacttttaagtagaagagttgagttttaaaccccagcaatctggcttcagggtctgtaccctcaaccctgtgctgaactgcttgccttcctccctcctacatctactgagatatcgccctccctcccctccccactgtttaatggaactaattcagcactgagactcagagaagctgggatttctttctcctgtgcattcattggttgtatgacgttacggtgatcacttcacctctctgagcctgtttcctcatctataaatctgagagccggtctcggtgatctcccttgctcagccagaacattctgtgatttcatgaattagacactgaagcagggccttggttttccagcatatgctgccctcctctcatctcctgcgtctgcaggcgtattatcttttgtaccatgcaggcaggcagtcaggtcaccctgacctaggtacctacctccacctcagtgtgcctggagaagttgccagccagccacagccagagacagagtactccgtggggtttgctgagtactgggacttagtggcttatataagttttttacgacccattttaatagagtttgcatcctttgaactacagatggggcaccggctgttaatggggctttctggagcatagacttaggaggagggtccttggggtttatggagctttcctgcggcacacacatttcatggagactgtattgttttgtttcttctccccatcaactttcctggtcagggcacagggtgtagggcagagtttatctgagtagggtgtatgcatgtatataccgctgtcgtgtgtttaacaggctcagggtaatggctgggttacctaccaccccagggcagtgagcctcagaactacctgaagcctagttaaaaatgcactaattccacctcaccccaccctcctccccatgtttctgattaaggagggcttgggcagtacctgggcctgacaatgtgcgtttctaacaagttcccaggtgatgctgcacctgctgggccaggagccacacttcgacaaccactgtgccagagaagttttatggagaactttacatctttttaagtactagactgaaactaaactaaaacatttctgtccatgtttttaggtaaaaatgatttacttgtattccaatataccaaaaaagtaatatcatatcttcttgatctgtagtcataattatgaccattcattattgtggccagctgtcattccagggtgtgctgagcccgccttgagactgacccaggttgtttgagttgttggtttgcattctgtgtttgcagatcggctgctgcgcccatagcattcttcccttcctggagctttaaaaaaaaacctttcttattaaaatgttcacacctataaaaatagagagaatagtatgacccactcccatgtccccatcatctagatttttaacatttttgcttcatctttttcttgcggaaatattctaaagccaatcccagacatcctaacattcccctccaggcatcctaacattcccctcccaaatatttctgactgcatctccaaaaaaataaagacattttcttgcataaccacaaaaccatgatcacaacaaatccagcaattattcctaagtatcctctaatactcaaaccgtattcagattttcccagttgctcaaaaaggtctttgcagttgaatgaggagatgaacaaggcctatattcacattgcctttgattgctagctacctttccctacaaaatttgcttttgtaggcgtagggggatctgcagtgagctggggctagctagttgcaacaagtgacccagagctgttgaaatgcatctgaggtggggaaagcaggtttgaggtagggtctgtgaatagagtgcagtactgattctgaggcctggagacagctctgtgctgctgagatgctttcactttattctattttctttcatctgaagaggcaaggaggccaggcatgtgacttctagatcagtgagttgctttcatgtgtgaatatgtaactgttagaatatgtttacagaacagatatgttgcctggggtaagaagaggagttcttggccctgaagaatcttggctgtggctgttctaaagtgtttggggtatgcactttatttattctccgtggggtttctttctctttttgttaataatccagccttcattgcggctctatggagggaaaatattccttcgaactccaggctctgagagctcctccacacacctagtccacttaggtggcctggtttcatgccagaagtatgataaataaatattgatatgctgtgcctgcccccttgagggcctgcccctgggttcatccctcatgtaggtgttttgaacatgttacaggcttctaatttagcttccccatccaaatcaaaggtccctcgctgcaatttaaatgccatggtgtacccgtgactgggctgacgtgcattggaaggcaaagctgtcctgcatcacacagcatcagctggatcgccatatggaccacaatgcggtgctaggagaggctgccagcatcaagctggctaaggattgaggtgcgaggctgccaggagggaaggatttttctggacagagacctgattgtcaggggcttcagggtctttctacctctggttcgaggttggggagcagcaagactacggcgtagatactgcaagtaatgtagcctgcaagtaatgtggccgggccttggcaaggagggcctggaggcgaggggagtgtgcattgctgaattcctcattttggcacacagcagtcctctctgctgcttcctgacccaagggggatgattctgatagtcacccttgcacctcttttgtggccactccacattgtataaggtcgccaaccacgttgtataataatgggctggtgcgtagttcttactgttctctggactggaagatcctcaggggcagtggactattttgctatttggtatacagtggcactcaataaaggtgcagcaaatacatttttgcagcccagataagggagagaagggaagtgcttaggttaagcatatgatacagaaataaatctgaggtggtcctgagtgtcatagcaaatctaacctgcccaagacacggtccttcattctacagtgaccttcattctacggtgactgctaatggctgctgttttgctgagaaatgcttattgacttcctgcgcctcacattttcctgcctggcaaatgccaaacctccactatatttagctcaaatttcttatggcaattaccaggtcatttagaaatatttcagttgtaaccatgtcttattcttgatctggattttatgctgcatgagggcagcgattccccttgatttctctgtctatcctcctagggcccggctctgtggcttgtatatattattgtatgtattaccagtgactcaaaactagttgcccaacgaaatgcaaggctgctgggcttagtgagtcctaaagaactggctcagacaggggctgtcaagttcagaggagggaaagctccttggggctggagtcaccagaagaaacttccttaaaggcagctggaactggttggcactcggagaattggagaaggtagaagggaggaggatggagagtggattccgtgttgggaggatcagaggagactttgcatccccactgctgggtataataaggagttgcagctaattcgctgggaaccactggcttctgggcgtttactagacacacaatgaactgccaaggactatagaggctgaccgcagggaagagtggctacagaattcttaaaacatgatgctgactccagtctttggtgagactgatggggatgagtcaggttaagacagggataaacatttgcttatcagatgaagatccaccctgttttctaggatcctggacttctttgaaaaagcatgcctccaaataccagatgatagggcagagaggaagaagaggattaagggtatcctgctcccaggctctaggggttctgctggaaaggaaatagtggggtggattagagaggatgggaaagtacaaaacttcagatgtagaaaaagtttgatcgtatagtctctctggaaaacattttgcaagtttcttaaaaagttaaacgtaaacctaccatgtgatccagccatttcactctaggccttaattcaagataaatgaaagcatttgtccattcaaaatctgtcatgaatgttcatagcagcttcacttgtaatagtcttaaactggaaacaacccaatctttcatcaagatagaatggataaacaaattgtggtatatctatacaatggatactatttagtaataaaaaggaatggatggattaatctcaaaataattatgctgagtgaaaaaaacagacaatttggaatgcacattatatgattccattcatataacattttggaaaatgcaagctaatctataagataggaagtaaaacagtggttgcctcaggatggaggttgtgtgggaggggcaggagcaagagattataaactctatgaggaaactttgtgggctgaaggatatgttcataatcttgattatgtgatggtttcacaggggtatatgtgtgtcaaaacttatcaaggtttactcttatttaaagagtgttcagctgggcgtggtggctcatgcctctaatcccagcactttgggaggccgaggcgggtggatcacttgaggtcaggagtttgagatcagtctggccaacatggtgaaaccccatctctactccaaatacaaaaattagccaggctaatttagagacaggtgagacacctgtatcacgctaatttagagacacctatagagacaggtggtgcatgcctgtaatcccagcgacttgggaggctgaggcaggagaatcacttgaacccaggaggcggagttgcagtgtgttgagattgcaccactgcactccagcttgggcaacagagtgagactgtctccaaaaaaaaaaaaaaaaaaaaaaaaaaagagtgttcaattgattgtgggtaaactgtccattaataaagctattataaagagctgggcatcatagttcatgcctgtaatcccaatacttttggaggccaaggcaggagaattgcgtgtggacaggagtttaaaaccagtctgggcaacatagtgagactgtgtctctacaaaaaataataaaattagctggatgtggtggcatgcagctgtagtgccagtaacttggaaggctgaggcaggaggatcatttgagcccaggagttagaggttacagtggccatgatcacaacactgcactccagcctgggtgacagagcaaaatcctgtctctattaaaaaataataaataataaataaaagtgataatttagagattcaatgcaagtcagttaaacaagccattattgccaactccttacattcccatcccccacatggaattcattcatttcattggaaatgagaggagaaaaaatagcctcagcgtgcttaggatggcaggggaggaccactgtcaaaactgaatgtacataaggcaggtcttgacggaggttgatgctggcaaaaacaaaaggaactgcctttgaggactagtcaagggaagctctggggcagatgtaggatccaagtgacttcaatgactggggacaatgttaaaggcagtgaggtacaaaataagcaaggcctaaaagacggaatcaacaggctttgttgaagaaccaggggagaccagtacagagaaggctgagggtgcaaggggctactttcaagaatgaaagctagatgggctgagacagattgcctctctatgcatcctggctgcaccacttaaaaactgggcaacctttgggtaaatgacctaagttccctgtgccttggtttttccatctgtgaaatgggaatagtaatacatacctcatgatgttacactgaacattaaatgaattactgcatgaaaagtatttagaaccatgcctggcataaactaagtgcttaataaatgttattgctactgtaattattatctactcttggggagaatcttgaatgctaggattattacaaaacaagcaataggtacagcagtgagaacccctaaacaaaagtttgagaaactgcttctagcttgtccctacctcagagtctttgcacttgctgagacaactctgcctggaacacttttccttgagatgaactcctgcctcactccctcacatattttgatctgtgcccaaatgttaccccatcagagaggccttcgccagccactatattgaaaattgcaggcccttcctcccctactgcctaacataggtatgtatctttatttgcttatttttccttcctcccactagaatggaagttctgtaagctctttaagaatatggactttgttttctctacagttatgtcccctgagcctaggacactgcctggaatgtagtggatgctcaataaatttttgttgactagaagatttattaggctgtgtcttaggggtgaatcacctagcgtcttcaggcctcagcctcctcacctgtaaagtgcagagggtgcattgcagcctgaaggtgatgtgaatttgtggggagtccggcgtgttgtcttgaacaagggagtgatatggtgaagggaccgtgggagagtatcagcactcatgagatagcaggagagcttccgggtcatgcctcccacagggtgattgaatttacaaagtgaatttagttatttataggtgattttgaagatgactttccaaactctcccctctccccaatggggcactgtgctgtcccctgcccctgccctccattgagaaccccttctctagacacatacagggacagaatatgccagaacaaggcagtattgataaaatgacaaataagtgacaaataagtggtatgtgggctcatggttttagtatgtcttgagctgctctgttttgaaggacagctgactccaggttctgggcataaggagcacattaggctgacggggcctggaggctggagaggagctgacacacgtgtgagaggaggagccagccagatggctccgatttatccatgtcggtgcagggctggagaacgagctcggcccagctgggacgctactgctgtgaggcttcccgtgcatctcagaccttgagagaccaagcctctcttttcacacctgagctcctgcaggaagcaagggctgcggtggctgggagatgcctgttgttcctcacattcagcaattagcgccatctccttaagggcagacctccacgtagctgtaatctgaaatgtcagttattacactctttgatgtaagtatagaagtgcctcggttatgatctcaggagtaagacagaaatagctagtcagtgtggtgagtaatctgctaaaagcattcacagggatcatcctcgccatggcattatgtgctgtttaaaatctgagtaaatgcttaggagtccggcattcagagatgcagggaggggcggtggaatctcttggaggaatcctggcttaagtctcctcactgcttctgttgcaggtgatggatcatgcctatgctattctttgagtttctaatgtgtagttagattttatgggggatactgaagggcatgggagcagcccttgagtcttagcttaggtcccagttaggagggacaatacctatgcacgcaaaagcagatgcatttgaaagtgctgcaggaaagggctgtaacagctgctggaattacaggagggagcaatctctgtggagtgaggtgatcagggaaggttacttggaggaggcaggctgtgaaaaggagaagagattaggggtagaatgtattgcttttacttggttcctgacctgcctctgtcttctcaggatggaggcatcttcctgcaaaccaccttatccaataaaattaacacacaaatagaaaatcaaggccacagaaagaaagaaagtggctagtatggttgctccagttgagcactggatttggttttgcacttcttggcagccaggacataatgaaaaccaggtgaatcgcacagctttattgatcagaaaggggaaagtctaccaactcttcaggggaggcaaaattcttcctggcacatttttctaaaatcattttctcatgtgggagtttacataaaagacacagtggcataataaacataggtccatcgacaacaaaagccttcataagcgtggaggattgaacaccaaggcgtgacacgatgaaggtaatttggccagtggctaagctggcaaggtccagtgatgtggcttttaggggctctggcttgatgtaaaattaacttagaatcattttcttgaagacgagactgaagacaaattcccaaaggaggctttgtagtggacattcagaggggaaagctcgttggccttggtgagattatacccggtgaaaggatgtgggtgccctcctgcccctgggttcccactttccatcatataattaccctgtctgggtatcggatttggtgctgagtgtcctggtgtccagaggcataaagggaaacgcacgtctgattccagagtccagagctgaccttgtctctttaccaaaacccttagtatactattccctggtttatcttaactggggcattagagcacctgctcttgactttgacatgttctcaaggagtttgaagtctagacagggtgattttacttaaaaaaaaatttaaggccgggcatggtggctcacgcctgtaatcccagcactttgggaggccaaggtgggcggatcacgaggtcaggagattgagaccatcttggctaacacggtgaaacctcgtctctactaaaaatacaaaaaattagccgagtgtggtggtgggcgcctgtggtctcagctactcgggaggctgaggcaggagaatggcgtgaacccgggaggcagagcttgcagtaagccgagatcacaccactgcactccagcctgggcgacagagcgagactccatctcaaaaaaaaaaaaaaaaaaaaaaaatctaagtacagaaaggaatacatgccagtaggttggctttgcctcaattcctcctatcaatagctgccatgtgttaagtatttgctgtgtcccaagcgctttacctacaacacttatgtcatcttcacaatgacgtccagaagtatacacttttattgtctccattttatcagaaagaacggggcttgtggagattctgatattctctcaagcccccagcctgaggaagattccaattggcctcacttttgggtctagtggatctggacttgggccccagtctaatctctggcctgggtctctccctctcccctctcgcaccctcctctctggccacagtcttctgttctaagcttgccctggcttcctgcaagtttctggcctcttgtatgagataagcacttccctatctgatttcaaaggttttctactgagccctcgctgccatattctgatccctgagccaccccgctttctcacccttcctgcttgagccagggctgtctgcatcccatcggtcccttccaagaatcataaaagcagagtccaggtctccttgtttttaaagcctccttgcccttcaggaccacccagcaagttcctgcttcccatcagggagttactgcagatcaggcattgatgaggggtccctcccaacctgggtttccatcccaccctctcacatgggttcccttggttggcgtgcaccattcagccactctctaggggagtagctgctatacaccaccaccattttatcgtatcaaaaatatgtttcaaatacattgagacttttactctcatcaatggaagagaaggagaagcatggcattttgtcaagctctcttacttccgaaggatttaggactcttgctgcctttggccaccaggatcagtaagcattcatttctattggaagagattgtgtatctggggatgttgcccagcgggtctcactatgctgggaaaactggtgaccaactgagtaatactcaaatttatgccaaaattcctgcctttttccctgatcagtcttctcttttgctccctgctgaactttgtcacttgggaatgggatgggatgagctgggtggcctcaaactcacatcctcagaggctcagaggaaagtcccttttggtacaccaaggctctttttcatcctttgaagcttttgaaggatattttcagtggatcaaaatggcatcttgtgcctggctctatctggaagagcttgcctgggaaggcaaggaagatgttatctaaaagatacatggagagtgattcttcccagaccagcacatctagagttgcatggatagcttcatttctccatcaacataatacctattatttattgagtacttattttatgctaggtccagtgctaatgcatttgcttatgtaatctacccagcaacctaacggaaacctgatagcccattttatagataagaaagtgtcaagcctaggataaaaagcttctgtgctgttgggggccctcaggctgtaacaggcagagtggtcaaagagcaagctacaggtaggtgctgggagaaagctgtgtctcttgaggtgttctttcttttcttttcttttcttttcttctttttttttttttgagacggagtcctgctctgtcacccaggctggagtgcagtggcgcgatctcggctcactgcaagctccgcctcctgggttcacaccattctcctgcctcatcagcctcctgagtagctgggactacaggcgcctgccaccacacccggctaattttttgtatttttactagagatggggtttcaccatgttagccaggatggtcttggtctcctgacctcgtgatcctcccacctcggcctcccaaagttctgggattacaggcgtgagccactgctcctggccttgaggtgttctttctttggccagtctacatcttgggtgtgctttgctttgggcctgtgaatggaaggggcatttctttgttagataaggaacttttcagtaaaaaacagcagagacctgtctagtggatgattaagcctaagcttatgctaaagggcaggggctgaaatgatttcataacatttttcatcctcaccatctggacctagacctaatgttgtgcagcctagtacaggaattgttaaggctttgctcacgtcccaccccctccctagtctccaaaggacctcagccctcattgattttccctcttctaggacagttttcagcatttaagtttagtaatactcagtgtagggcttgattctgcaatctcccttggtataacccgccatgctgctgctagtctcaggctccctccgctgtcttttgctgcccttctgcccagactcagtgagcgctaaagtcaggaagggcccaagggatcatgtagtttaacccactcattttatcagtgggggaaagagaaggccagctctaggctctctctcacggtggagggaaaagtgacacacaccttgttaaaagaatcccaagccgaattgaacagattgggagctttggtgtttgttttggtggactctttcttgtatgcctgcagtttctccacttagatctgacatccttttacctaattaaattcccttcccagtcctctgccgtcttgcttatgttttaggttggttctgatttttagtatcaaccacagaatctcaaaactagaaggatcttttgatgtcctgaactgcgatcccttgggttggggccagtgcttcaattacaataccccaggagttcttgttatcagtgtatcttaggaggaaccaaaaagagtcctcccacaataagaagaattgtttttatctgttcttaaaacgctaatttccttgagtttcttaaagcaaagcccacctgtacgaatgtccgtaggtgaaaatattggcccatttaagttacacttctgcaacacaagaggggtaaaattccagcccacctgaggaaattcaaacacgtggtttaagagcttataaatgaaggcagaagattttagttcaaagaaagaaatggttatggctagtaaagccaaaatgggatcttaattcaggattaattgattaaatacttaactaattaatcttctaactggcttctgttgcaatcagggttcagtttttagacatgacccctgcatgtgaaagtgaatatctgcagctcgaatgtgtgcagtgggacaggcatggccccgaaaccagacagggcaattcagatctgaggctaaatgaaagaggtaggtgacagcaggtttcagcttcccaaatttcttttcatccatttcttttatatcataaatttgagaaaaaattgatctgttcatttagtaagcccatttagaaataagctcaaattattacttccatgccagaaacttgaggctggggttactattatttttgagcttggaaattgccattcattctgctgcaaatgaattagactatatatatattttaaacccattaaaatcaacatatattaaaaatattcctaactcctgtctttattcttgttcttatgtctcacacaatggtcctacttgaatgccttagagacaatggagtctctggcatctctcaggtctctccttgacatcaagagcagagcaaacatgctgaaggacgtggaccccatgtgaaccatagccttcctccctgtggctttggcctggtacagtccaaaatgccagccgctcaaaaacccacccactcacacgggccttgttttcagcaaatcttcaagtctggatggaggaaacgctttacccttaatacgttcttaagccatgcataactctaagcctgttttaaccatgtgcttctaattaatttttacttaattcttcagtgtttcctttatttttgttttttataagaagcagccacatgatgagtaagcctggagaataagctttctgaagaggttttcttgacaataaaaacaatatgtttattgaaaggtcaaactaatggccaaggccaatggagtctccaggttgggttgtaaggtgtgaactgtaggtagagtgctgaggagatgcttcatttggactccccggtgccttgaagctgtagagtaaccatctccgtttggcctcgttctcaaattctactacctccctgcagggctgttgtgctgtgtgtagcaataccttttgtggtttgcttccaaagttcttcattcaatacctcatctttgcctctgcagtggtgtcattctttttcacttctttcttcctcttcccctttttccttttcatttgggggaaagcatttatgaaaagaggtcaagtaacttggccaaagttctgatggtgctggaaatagaactctggactgttgacccccacgtcctaagcccaaagatgagaccacccagtgggatcctgggctgtctccagagcagcttcccagaactgggctcttggcagagtttgccttttagaatacagagaattaatgcacagaaggggatttccctttcttcctgccaccctccctcctcccacttccaatcaagagaaaagcctgtccaagtgtaggaaagggaattatattgggtaactgtgggtagcagaaagaactaagaaccttattgcaatgaagttgcaagtccagacgttggttccaacctgatcccctcccccacctccaggcaaaagaaaagttaaaacaaatactggagataggggagattattttaggactctggcaagcacagcagttcccttgcattgctggcaggtacccaagtttatctgtgtttatggggatctgcagtgttgatctgtggtgcatggaagcgtgcaggtccgtatactccatagtcaattacgtttcctgctcatccaaaatttcagggcaagataatcgactgggagaaggaaaggagggggcttttgattaatctgaaggacttgaacaaatgttctattaccttttttggtcctgggtgccgtgcagacctctgtcaattctgaaggaagacttcagtgaggcctagtactttctcaatccagtaagagaaaaagccctgtggccacttgagggttggttctactctcttcttttttcccagtctgcagaccttctatttccctttgggttagatcggagagattcctagagaattaatggggacacggagacagagagagatagttgagggaagcatgataaacaaatcacagtaagacaaaggaagaacctggggtgtttctaaccagtgagaaatcttcatggtggaatttcagaccttaggatggcctaataggcagggtacatgttggttagggtgactagcatatcttgggcctcttgaatcatgcttcataggtgcctcttccactcacattcaaattcctaattgtgggacaaaagaaaaagtctgggccgggcacggaggctcatgcctgtaatcctagcactttgggaggccaaggtgggaggattgcctgagctcaggggttcgagaccagcctgggcaacacggtgaaaccccatctctactaaaatacaaaaaaattagccgggcatgatggcgtgtgccagtagtcccagctactcaggaggctgaggcaagagaatcgcttgaacctgggaggtggaggttgcagtgagctgagatcaggccactgcactccagcctgggcaacagagtgaaactcagtctaaaaaaaaaaaaataagtaacttcctgtgggcaaatttggaaaaatggcacggtcatgttctactttggtctttgcgtttgcttcccgtagaaatgtactttttctaattatcaaataattatctcaaatataagatgcaggcaacagttttctcaaatacctctgcttctggaaggagggtagagaggaattagcccaaccctctaacttaatacattgatgttctttgaaactttttaaaaaaaggaacaagaaagtaaaaaatctgcacagcaatggctccttttaaccaacctcttaatgggcaattttaagtactttcagaatttggaagaatgtttatgtcagaaatatgtatcatctcagcatcttggttatgcttatccaaaagtcttggccttcctgcctcttcctcttgtaagggaatttatgtagaaagagggtatgtaatcaaccatgttcacactgcagagagagtttatacaggaaggcactggtttgggctttgtaatactgaaggctttacacccagaagaattttgtaatctagcacactcaatctccgggggcataagttttctccaattattgccttgaagttttattaaggatcaaaggaacggccttacaaagaatgtgccttcactgtcagcagtgcttctgtggacttgctgctttctctagcatgcatgtccattggaaagacccatgtgttggattccttattggatggttttactggaggaagacttagggctttattttaggaatttgaagacttccaccacccttcacagtatcacaggtgtttgcctcctagagcattgtaaactagaaacaccaagggatagaaaacatttgtgggaataatggatccatgcaaaaatacctcaaagagcaaaatttggcttgataccaagcagaggagtgaaaactcaagtgctgagcttccagaagcttcctggagaggagctattccttggcattggtgccagtgccctggtgagaagcaaaattgttggccagggttcatgagtggttacccaaacctagatgccagagatcatggagaagaaactctaagatggccaagcttttcccactcttctcctccagatgtttcccagtgggtagatgtgatctcttaggaaatttgaccattttcatagcagaaagaaatcaaaacacgaaagagccttgaaaagctgttacagtgctaaatgtatattatgggaatgcttttttccttggccttatcctggcctggctctaattatctacagagacatctgattaactccaaatgacatcgtctatgtgtgagtcccatggggatggcttctggaaggaacagttcagggaccatatcacatttcattagttgggttccccctttcatgatttctcattttggttgagaaatgaaggacattttagctttcccttccctcttttccttctgtaaaaacttaagtctctgatagttggccagggggctcgatgggtaggggagagttaggaggggacagtgagggctgggagatgatgctaggtgctcttttccttctcacctgagccctacctgaacaatgggccagacagagaatggatattgagcaattatgctgttttctttctctgtttatccaaatgctctgtctttcacatgcgagatgaaggaaaacccatttctactactgattttctctcccttctctgaatatgtgtaggaattatagtctttaccatgcagcttaacacacattttacatctatctgttggctaatgcttaattatatccaaatgttgtgtctccaccttgcagtaggctactggaggcccagaactcaatggacaacttcatatctccacgttaccaggacagggcttagccacagatatttatggatcacctgattgttctgctactgacatgttcacctcctcaaaacctgctttcaaagcttggcaaattccgggccattttggcagcagagctgtgggacaagatttaaattgtttgttgccatttattggtgaactggacaatcaatccaaatttaaaattctctaatcagattagtttatttttaatcatctggagtctggctgggtttgttctgtgtgggagccagtgagacccaactgtttcattgacttcctttgtatactcttgacaaaagtcttttcatcctcgcccaccttatgccttcaaaactgtgagtcaagctgcatttcctttttttctccttcctccccatggatacatcttagttgccattttttcttacaccccttttgttaggtgttagggcttcagtcatgctgcctccctttggcagggctgggaggggtgtgtgtgtatgtacatatctgcatctgtgtgtgtgtggctttttgcatgcgtatctgatggttgtgtgtacactcattcatgcacaatcgctggcgagtagtttgagtaacatggcatccagcagggatcttgggccccggaaactgaagaactaaccatttttcatccagagactagtttatttctcactgatattaagtttgtttaacctgtgatacagaattgtgaagggattctatttcatgagtttgtaagttcttttcttttctatgggttttagccagtttgtctttaatgtgaaatttgtattctgtgctcacatattttgatatgttttgcttcctggggtcatacttagggtacaaatcaaccagatacagattaacctgtggatgtttagcctttgctaagtgcatccttgtctctaaattcttaaattccagcaccctggttaaaacagtaggaggtgtgaggaggaacccttctgagaacagataggcagaaacatgtacacggcgccaatctcccatggctccttgctcttgccagggtgcagcaggcacacgtgcaccccgtactgtcactcacagacacatgcctggatgcccaggtgcacactcacacagccatcacacaggatttgcagttctgcaagaggtggggctgtgaaacgctctccttctctatgcgcatgtcttttatcccctctcttgggtggctcctgcagtagcgggtgctattggagtagtgtatgctccagccctctctcggactgcagccctgggggacactgttctgctcccctcctgtccggggagttgctgctctgccctagggtcaaatgcagactggtcagggacaatctggaaatactgtagggatgcatggggtaggtaaaaaccatgcttcctctgtctggaaacaacactgactgtggcttttttattttagggacatgatgtcactcttctgtttcaaaagtgtgcatattgcctaaggttctcatgttcacgtagactgtaatttttgagataggctgtgagacactagatatatggcgtcccttcggccacttgtgtttctggagctcgcagaaggacggtttactgtttccacagaagtctgaatgttggttgagcgtcctaccttcacaggaggaccaggcagggcacagccatggtaccgccccccacaaccacaaaaacaccctatgatttagacaagagacagttatgggcatctttacttcataggtggatgatgaaattgagacagcgagaagcccaggggctgggatgccagctctctaaccgtaccctctctctcaacctgcaggtcaccagtactggccccatctgcagcggattatttcttccttcctaaaaatccaggctgcttcttgccatgtggagacaatgagctccttaaccaagggtgaaaaagaccaaccaaatcaaaacaaacaagggctttttttttttttttaacacttttcttaggaagtcattaaggaattattgagctgattaatgtgagtggaaaatatttaagtttggtcattgtttatgctggccagtttgattgcattagcaattgacttacaaagctgctgtagtgttccctccaagcgtactttcattcctgggttgactaatcagtggatccctgagctcaatgatgatgagggtcccccagtgtttagaggggctgcactggggagtagagaatgcaggggtgggaagaggtgggtcaatgcagaccactcctcccaggctgagattcacttttgtcctttgttggcaaagatggtgatgctagggaatttggaagctgaaaggaaaacaaaggacggggctcaggcagaaggcaaagtgaaaaggagcgagcagcatctgtttatatagggctccaagaggctcacgttaggcagatcctttttctggcagatgctgtgagcagcctgcggaggaagagcctctcagacagctaatgacaggttccttctccctggcgcggccacctcccctctccagcgggtggagatggagaacctgtcggccggcctcagggtgacctctctctccacagtcccctgcaacggcctcatctctgctgacagcaggcacaacacagcacacactctgtgggccaggattttcctccctctgagagccgcccattgtgaagtggactaaatcctggccatcttcctcttcctccccctttgtcttttcttagaacttctgttccagttttgtacttgcctaagatacaggggacgtggagtgactctacagagtggggcgtgtgtgtgtgtgtgtgtgtgtgtgtgtgtgtgtgagtgtgtgttgggggctggctaacaccagtggcaggcaggctgtgccccttcctccccagagccctctagcccatttctgcccctgctatttccctggggtcccaagtcttccaaaggttggtttgggcagggatggtggagctggatctgcatgtgtcattccagcttcccggttggcatgctcagtcattgccatggggcccaaaccacagcccccaactctctgaacacacactgccgaccatgggagggaagggcaaccccttctcatatcatttcatgctctcagtggctcttggagatgtgattgttcccatttgacagcaagggaaaccgaggtcagagagactgagtagattgttcatcctggttaagtaggtagtccgagtgcagccagaattagcacccagacatgctggtgcctaattttgtgtttcttcttcataaagctggatagcagggagactaaggtagaaggattccttgagcccaggagttcaagaccagcctgggcagcatagcaagaccccatctcaaaataaaaaaaaaaaaagccagacagcaaggaaaagatagggagtaaaagtaacctaaggagaaagagaaacagagagcaatgggaaagagaaaagggaggtggtagaagtaaggagggatttaggaacctgggagggacagtctcctatctccaagggtcacaatgagaaagaaatgcaataaatactgtatatctcctaggaaatgcagattttgtcagcttgccatgatattcattgatcactttcactattcaattgaccatctcctgggtactctgcctgatcctaggctctttggggacccttgagactgaggagagataggctcttcccacagtgagcttgctgccttcactggacatccatgcttggagaagttaagtggcagctgcttactgaagagatgtgagttgagcatctgccacatgctcagcaccatttagggtgaagttgtgggttctaaggagcaagctctgcatggggaaggtggtcagggagtgtatctcggggaagaggagcaggggctgaagaggacaaggtgtcctcctcccattcttagcatggaaaggcatgctgcatgaaccctgagactatgtgctgtacccgtgacaccctattgagcccctgtttgtcattgtttaggtgtttagactggcccgaatggagtggtgatggcaggtggctgggccgtgtatgactgggaaggctttctgggagaagtgcaccgtcctgccctggaaggcaagagccctacctaataacttccttctggctgctctgctccttccccttcaggattccttaggcactggctgcatagcccctccgaggggcttttgagcaggacctctcagggtgggtctttgaaggtcataaacccaagaagatccatgttggctcctgggacccacagtcttccaactctgctctctgatgtcactgtccccaggagaagggtcacccaggctacaggagggtgaggccttttgggagtggtggccgaggagacctggattcaggcttgtttctggccagctgtgtgacattgagtggagatgatgatggccgaagtagtgacagacactattcattgagcctggccctgtgctaagcacttgacagacatcaactcatctgctactcacagcagctctgtaagggaggtgctgtcatcctccttgtgcagacgaagaagccaaagctgatggaactcctgggcatcaagaggtagggttgagattcacacctgctcttgctgactccaaaggccttgtgctaatgattaggccacactgcctccccagttattactcctgggcctcccttctcactgtgtaattgggacttgaattgactgtttgggagcattctagaattccagtgagaggtgtccccaagtaggccttggcctggggaaagacgatgcttcagaaatggcagggaggagcaggcccaagttacagagcccctgtttgccccacagcagcctgtgggctgcttctcacctccttcctcccctggccatccagagtggcctgctctgctagaagcccacgaagtataccctggggctcctgtacctacggctgccaggccttgggtaaggtgccctgggcagctgcccaaggctgccctcctcgtggagcaggccttcagcaaacatccctgctgagcgatgctcttgctcggtgctgtccgctgctgtcatcccgtggctgctgctgtctgccacatcaggttagaagtagaaatttccttctagaccccagagtcctcccctcccccgctgctgctgttcatcttgggggacccaccctttgttggtaggacctcccttggagagatgggggctggagggagccagggacttgtcatcctgggagttccagggctgggcttggctgggacatgttgggctgaccacccctgtggtcagggcctgcgactggtgaggttctaaggcctcccctctctcagcagctgcttcacagcctcacgggaggtgatcggacaccagcctggcagggcagcctcatctcatcttctgtagctcccagccttccactgtggaagtgctcactaaataggtgttgaacggaggtgtgaacccaggatgaggcagagtcccgtcagaggcctgtacaggcaaactcagcatcagcacggctttagagaccgagtgcccgctttttctctctttttgataaattctcttccctccctgtctctcctgtctcctttccatcatgccaaagcaccccatgccttggggaaagctgaatgccaggaatcgggtggcttttggtgtgactgtacagagcaggcagcctgtggggtagggttgcactgagaggggtattctgaagccacaggcccagggagacagacaggctgtggtctgtgagactacctgatttcccaccttgccttctgatagatgaatcaagccgggacgcccagtcaccctgactttgactctttcctggagggacccacccaagctgcacattcccagggccagtgcaccctttcccgtgtgcctgggagtctcagtcctgctcctcccattcctgagttcgtctccaagtccagggtatcactgtgacccgaggaagcccagtgacacggtcccagcaagggtgtggtgaaggaagttgtttttcttaatggtaaacaggatagtaaaatgacaatagcagcgtagacacttctcagttatttacaagtggattcctctgccttctggatgatctcctccccacggttgaattggttcccaaggggggccttgaggaaggaacaaagattactgagactgtattacatgtcaggtgtcgtggcaggcactttacgtaattgcccctcaagccccattgtccatgtttatatctcatttgctcataaggaactaaggctcttggactttattaaataagtttcctgtggtcatttggttaaaaagtgccctcaccaggccatctcactccatgagttactgtcttcctgctccgtgagtgtgccccgtgtgcatgtacacaagtgtatgcggaaagggcacaagggaaggtggactccacgcagtccgcccgttctcatgcttcatgcagtgctcacagcatttgaggctcatgaaattctcccaccagcaagagcttattcatactgcctttgaatttctggggccattttaaatcaaagagcccccaaacatttccatagagttgttttcaacttattttcatacctccctggaagatggaaagtgggagctgaaactattgcaaactaggaaacttagggcccaagaagagaataaatccagaatctgaccccttctcttcatttccactaccctggtctgagcctctgccttctcctaccagggaacttgcagtcacctcctaatgggtctctcggcttccacccttgagcttcctgctgcctcagccagcatgatcctcgggttacgttattcttctgctcagaatcccacagtgggctctcatcatgggtgaaaatccttaaaacagcctacaaggccacacatggtctgtaccccacccctgcttctccggcctcattgtgcatttttctctcccaactcctcccactggcctccttgcatccctgagacttactaggcatccccttgttgtcttggccattccctctgcctggatcacttttgatcactgaaaccccacttcaaatctttgttgtaatgtgcccacaataaggcataccctgaatactctacttaaaaccgcaatgcccttcccccatcctgatctccttaccccatgctatttattctgtagtgcagagtatgtacttatcacattctgaaagatcatataatttacttatggagttgaagagatttagaattctgcctttcagtaaaattagacaatgaattctgtgcataacatgggttgaatagcaaagcttctgagaaaaggcgacctgatgaacaccctccttaaactctcctcactttctgagccatccctttggcattttccttgaggtcagggatcagacatcattacttgaatcccctacgagtttcggcttttctgctggtacacactcagtaggcgttggtggacttgagaggaactgaaattgccactgctcctgaagagaacaaataaccaggaacttgcagattaaaggatgaaggtagatttttttagggtgtcctaataaacggaccaagcccagaatctcacccacatgatcttgcaggcttttgctcaagggactttgatcttaagctcagtattttccagtaggtggtctgctcgcaaacttatttgcttttaatcaagacctgcctgtgagaactattaattcagatgatctaatcaaaaccacacaggaggctttaatgatgctactctgcccctgcttctccccctccctccaccatgacactctgattccgtttaaagaagcccaaatgtggtttcagggccttggagaaaactgctggaggaaggccagcctcacagccttttgtcatgtatgcctctggttcttttctgactagaactctccaagcaaactcatttgaagagtccacagaccattcttccttctgatctgtgtatcttctctcaaggaatcaccccagccttaatatgaaagttatcattttttttttgatataactaaaaaccccttagaagcagtatggcctagtgagaggagtgcagggtctcatggcttgctgactgacaggctgtgtgggtcttggaagaataacgtgagttcccagaacatcagtttgctcatctgcaaaatggggaattacagtccacaattaataattcactcgacatttggaatatgtattataagggaaagcatagggtgttatgaaagcatgaaatagtgggatctaaccttgttgaaacaggcagagtgggactgggggttgtcagggacaactttcttgagaaggtaagtttgagatgggtgttgatagagggtgagttttaagtaggccgagtcagcaccttggtcccccttcctttatattcatgtaccagcttgatctcctggggaaatgtgagaagtgttctggagaagcatggaggtttagagccaccgtgaacctcagagcacattatgtagcccaccctgtctgccctcactcttctcagtattgccaatgaaggcagtggcgcccacgagctaatgtgacttcctcatacccctcagctgatgagcaacagagctgggactacaggacatagccatctttgtccctattatgtgccagacatacgtctagcaccctgcgtacttgatattgaatctgcactagcaactctatgcagtacgtattattattacttcttgtttacagatgaggaaacagaggccccgggagggtaggcacccctgtaaaggtcatacggttcgggaaagagtcaggatttggattcagcctgactgcacagcccccacactcctaatcacagcattgtccttccccctgccagaaacttggtttgcagtatttctactgaaacgtgacattttacctgccctcatggaggtatgatctttttggagagaaaagatagcaacaattcaacacagacaccacaccaaaggttcttgagatggaacagaatgcaggccccagggactcaaagtcatttttcagcatgggaagacttggcaccgagtctgtatcacaggatgagcagggctgtgcagagaaaacccagaggactggagggtgggctttgggaggagcaagtcaatttatctcttgggcttcattttcctcattgggagcattgaggaagagtaagggtgggagggaggggtgggttggcaaatgttttcccaagtccctggggttggtgggtggagtttaagccaattgctgatggctttgccaccaggtggcaaagtttagactttgtctagaagaagtggggagccatgaggggttttgagcagtgggacatgaaagtattgctttgggaagttggaatccaggaggcttttatcttccagtcttgcttctctggagactgatgtcccaagagaacatgcctggccgcttagctccgtggagtttatgctctgggagaccctgatggggagatcctcatttcgactggtcacattaatactacttttcgagtgtgaaaggttgagtcaaggtttggacttctggcaggttctcgcctttggctggtgttccgcctttgagatggtcccactactttcactcagcgtccctaccccacacacatctccccctctacacagacactaagggctcctcatggggtttcattattggtttttagcggatgttcctctaactcggtgcatttcctcaagccaacgtctattccactatcatggggaaattaatatagaaatttcctcctttgtatcatcaatttcagaggatgtatgttcccggctgatggccctcccctctatttgcataacagcaggtaaacaatactgccacctagtgggagctcaaggtgtgaccttcggagctcctcctcctgaccccgggacattatttctattactgttaatatttaaactaatgggcagttctgagctcagtgctcttcccagtgagtggatccacgtggattttcacgtctccttctcattctcttaaaacttggagttacaagtgtcagagaagctgttttgtgtacgcagaacgattgaaacaggtgcagggagttttacctactttactttgacttttgctcacagcagtccaggtaggtaactggattcccgttttatacgtgaggaaacccaggctcagtaagattaagtaacttggaactttactgagcacctaacgtgcccaactacgtcctggactacctaggtagtatggggattgtggcctgttttcctctaagaatgcgctgtccagacacagtggcaaggcgtagttagctcctggccaacttgtagaggagaggagagacccttgcacactgcagtagtgcagcaagactgcttggatggaagaagtgggtctggagctaggattcgaaaggtggcatgggaagagaatgtttggcggatgaaggcacagaggcggcgctagtgctagggatgtccgggggcgaggaaagacttgctgatcttgggctgtgccaggtgttgtgggttgaggggtctgggatacagagcctgcgagagctaggttgagagctccagggagtcactgcgactacttccttgctccatttgtgaactgagaagtaagactcgtttgatggacgaaatttaaataatgcagaaatatattaaagtaaaaaaaaaaaaaaaagagaaaatctcctaccaggcctattctcccccagaaaacatgattaatagttaaacgtttggggtacatgctttcagaagattttctttgcctgtatatagatatatatgtctattcaagtatataaaaattaatacatgcatatgtagtgtgatttattttaatagggttatgttttaactattattttataatttccttgtcatcaaaaattcaaaaatatatcacagtcatcttttaacttaaaccttttactatggaaaattttaaacatatgcaaacctagaacagtataataaatctccctcagcttcaacatttatcaatacataatcaattttgttttctccctacctcactccataggttctcctgaactggattattttaaataaagctccagacatcatacattgcatctgtaaatacatctgtatcgatctcaaagacacttttaaaacatatataaccacagtgccattatcacattaaagaaacctgtattctttcatatcatcaaatagctaattagtgttcaaatttttccacttgtctcataaactttgaacagctgatgtgcttgaatgatgattcaaataaggtctatacgttgcatttgagtgctgttttttatgtctcattccattcatagatttctactccctcctttttctttttttgtttttgccatttctttttttgttgaagaaactagtcattgtcctgtaaagtttcccacattttggattttgctgattgtattcccatggtgtcttttaacctgttcctctggccctatattccttgtaaactggtaatgagttctaggtgcttgagcagaattagatttgatttcttggcataaagatgggagcttcttaggcaggagaatgaggcgaccaagagccagagtggtgggattgaagaaagaaggacacatctcactggcctccccaagcaatccctttcacttgtctttcgaggcacatgtgagagacaaagggggcaccccaaacctctgtagggttggcctcagggatgctcagtttccagggggtcacatctcagagccttccatgggtggcccacccaatcccaccatctggtcagccagggttgctcagtaacttgttctcatgatgagtggaagtcatagcttcctcctctcattgtggtttcacatttgctttcttcccttcttataacatgtttctattttctaaaatatcacaaaaatgctgtctttccaattctcagctagctcatcccgttgacactgctgagccactgaggacagcttaactgtctcagctcagagccaggaaaaatttggacagtgtttgcagaaattgccagggctcgtgaaatgctttacatattgtatcacaagctcctgaggaagaatcacttaatttagaaatcaaatgactaggccgggcatagtggctcaaggctgtaatcccagcactttgggaggctgaggcgggaggatcacttgagcccaggagttcaagaccagcctgggcaacatacggagacccccccatctctacaaaataataataaaaaaaaaagcctggtgtggagtatgtctgtgatcccagctgcttgggaggttgaggtgggaggattgcttgagcccatgaggttgaggctgcagtgagccgtgatcgcaccattgcattccggcatgggtgacagagcatgaccctgtctcaaaaccaaaaagaaatcaaattactacctctgactcctgcttaccaccctatcgcagggagtccaacctcagccctgtttttcttaaatgatcatattcagttcttcagtatctttgattagtctcccctccccctaccttaatgacaatttgtttgttattttctattaatcaaaatttgcagttgcaagtgtcagaggggctgttctgcatacaggcagaacctttgaaacaggtgcagggagctttactcagaacaagagatgctcatcaccagcagctgatgcagggcctccacccgcgcccgccccccggcccccgacatgatattggaacagctacatctgataatgtagtttgctgtgtggtctgatctctgtgaaatatttgcttttctttaggctttcagaaatattcaaaatagcttctcattatcactttcctaaactcctgtggtgtctaggacaccacagtgcggggttacttctgttagttattagaatcatcaatttcattgctagaggggaccacagaagccaccctggtccagggtcctgcctcatccatccctcttcagtctactcacttgaaaaacaaattacctgaatcctagacaggttacatcctttctcaggaccaatagataataaatggaggtgaggtttgagcctcgtttttggttatgagttttatcaaaattattttatttttaaataattcatctacagagagaagaaagctcaaattaagggccagccttcatagatgcagtccgtgaaagtgtttctccttaagtctgtcttgtaaactcttcggagctgagctaagaaagggatactttctcaactccaagctatcagtgctttaccaagcctcctctcgtccaggcccatcttccgacttgaccccagcaagtgcccatttcctgggaatgaatgttgattttagagactgtccttaggttttttcagggaggcagtatggtgtcacaacacaaaccccagacagacttgggttctaatcccaagtccccacttgattagcgaggtggtgttgggttagtcacttcgattctgatcctccatttccttatctttaaaataggccgagagtccccatcccaggttattcctgactgtgcatctccagccggtgacatatcccacacgcgtcataaatggttgctattgttcctgtgggaaggcagagttgaatctagcctctagggaaaagaggatgggcaagacctaagatagaaagccagtgtttccaagataatgtacccttgtgtttgaccctcagatttgggaaagatggttgttttttatgaactgtccacttttcttcctcaccagctagaaactgagttgagataatcaaccctctgtcaaacaatctatacacacacacaactatatatatatacacacacatacacacacacactcacacacacacacccagaaaaggggaaaaatactcagcaaagctctatccacatgttggcatgtgatttctggaactttgtcagccagttttctcgtgtctgaatccagaaagcaaactgggttggagacagttcacgagaaacatcccctcagatgacctactcaggtacttcctctatattatttcattacttttttgtcctgatgaattttgctcttacagtttcaagataatcaatttattttcatgcgccttccccgtccaaattggattatgaatataaatagccatgtgctggccccagtggccagtgtgcactcccaggctggtgcttggcagactgggtcctggggaaggcttgggctgtttgtttattttcaattgaagctctaaatgctggaatgacttccagctcctttacgcacagccatctcaaaactccctttgttccctggttgcagaggccaaatactcagggttttctttagctatggtaagaatgccggtgctctgggcatcatcctgctggtggctgtcctgtggtgagcctttttatataaaaatcactgtgtgcacttgtgcacacatagacccccacccaccgaaggctgcaccctgttggttttctttctaggaacaggaaaagcaccactgggtaatgtcataagggaaataggacggagtctcaggtcaggaactgcagtcatctcctttgctgggtttcagcatttccctccttgggaatctacttctatctgcaggttttttataccttatgttcacctttggttgtatggaagtcgttctcttactgtttaatccaacctccagtgacagaagtagaattaactaaaacacaagttaggctccatgctagccaagaactcagtttttcttggtctgcagatgaggggatgttcagtatcctaacctgttctctggtcacaggatggtgtttctctgggtgtggctcacgagcctcccatcttagaatcttctaggagccgggaagtgtgcaagctctagagccctactccggacttgttgaatctgaatgtgtagtgctggggctcaggacctgtgataggaaagtcacagaaagcatagatctgtctgaagaaactgctgcagcctccattcatttctttcttcatcttccaggccatgacttcgaactttgttaggatccaacctgcagggagatttcatgtcagttcagtcacacacacactcacccactagcatcgctgtatccaatatcttctctggatgtcaggagagctctgtgctggcgctcaaggacctcagggtctagttgaaggaatgaagtgtgctcatattaaaagaaaagtagcaatgcaaagcaaagaaggccaagtgcaaatgtgcagtgtaaacttgattttaagggaggggagaggctttggccttggccaggatcccaaggaaggagctgaagacatggaattggaggcagtgagaaaggtggtctttgcagagggagcagtgttgacaaggcccctgtaggcgtgagggccacttgcgggtgaggtgtggaaccgaacctgccaaaaaaggaagaagtgggctggctgtgaatctaggagaagacttacatttggagagcttaaaagataatcagattaattgggatttgccggagaaactttggcaaatcagtgctataatcagcttcgtgttgggatttgcaaagtcggaatccaatttcctaatttgatgtcttcccagttcatggtgccccaaattgtagatctcatcccattagagggttagagggtctagagaagattttagataaagtaagaacagggcatctcctagctttttgtttttttttaaacaaacctttttattttgaaaaatttcaaacacttacaaaagtataacatgagcagaactttgatttaacagtgatgaagctacgcctgtgagccaataatatgaaattcaaaaacagaaaaaaatgaacctatggggatagaaaggaaaatggtggttgactttggttgggtacttgactgtgaaggagaaggggagaactttctggaataatgataatgttttttgtctttattggagtatatgtgatttgtcaaactcagcaaactgtacacttaagatctggtactatacctcaaaaatataaaggtatttcttatccttttcctctaattttctttcagtccttctcatcaaatcaaagagaaactctcagcttagggctagagtgtcattaccatctctctaatacttatcaccctcttcacacagaggcagagggccttagcatgatattatttcattttcattgcattaaaaaatactatggccagtgaatctaattttcttaagttgtattatagcatttttcttttaaaagaaaattatttaagaaaaaaagaggccaggcacggtggcgcacacctttaattccagcactttgggaggctgaggcgggcagatcacttgaggtcaggagttagagaccagcctggccaacatggcgaaaccctgtctctactaaaattacaaaaattagctgggtgtggtggtacacacctgtagttccacctactcaggaggctgaggcaggagaattgcttggacctgggaggcagaggttgcagtgagccaagatcatgccactgcactccagcctgggtgacagatgagactccctctcaaaaaaagaataaaaaaaaaaaagaaatgtaagtggtaaacatatatggtgaaagctggaggcagtgcatgactggcagaggtttgagaaacgctgtagaaggggagctactacttcaggtgtccctgtgggatggatgaggactcttgctgaacacgatctgttcttctgactgggcatcactcaggcatcctatgtagcacctggttttgttttccaaacttatggtgaccactaccctcagagccagtggcactgagagatgctggtcagggttaggggatctgtggtgaactggagaccactcaacccaggccgaggaagcacaacagatgggagtgctcctatgacaccaggaggccaaactcgaacctctgcctcacatgcagcaccgggcagactgagctgttggagtaagatggagacagcagggatggctcgttgccttgaaacctctcccttaggcacctgctgctgagacccagaaccttcctagggttctgctgcagtcatgctgcctcagcgctgctgaggggtctagagtctcacagccctgctgggtcatcgtgggggtgaatagatacctgcttctctccagggacctatggccttccataggcacctgctggggatctttatttgaaatgagcaatgtattattagcaaggggcattgattgcagtctgccagtgacttatttatcccccgtgctgcttcttgctctccggtttccagggagtgctgggctttccaggttgcctgtccagcgtctctgtgtctccctggcctggccacacagtagaattcatcccaagtttccaggaggagttacaatgaagagacagttcaagtgacagttgctgtttaaccgcctcatccgtggggttccaagaaaactgtgacatcagtgaagtttgtattccctaccgcaacttccgtttctgtacccacccactccctctctttctggctgctcctagtatctgctttcagccattttatctttagtttccatctgcacactacctaattcacttcaacaagacctgaagcagacaggccccactaacaggaacaggacaggccttaggggccttcagaccttggcactggaggttcaactgggaagacagagtattttgtatgagattcaggggtgggagtgagggggcaagggtttaagtttattatcaaggaacagcagcaaaccttactgggggttcaccctgtgccaagcaggctctgagtgctgtgtacagcctcttggccacctaatcctccaacagttcagtgaggtaaccactaccctcacccccgttttacagaggtggaaaccgagggtttagacagctgaagtaacttgcacaaaatcacatggcaatagtagagatgcgattcaaaccctagggaatacgattccagaacctcactgttaaccaggaagctggtgtttctcaaactcgcctggtgagtcacttgaggctttggttcaagtcgggatttcccatcggtttcccctggatccgatgatcctatgggtttgggaatctgcacattgaatagagaccctgagtgaatcttatctgctggtggatgtgggaaaatctacacttggccatttggaagtgaggtgtccccccaagctgggaggagcgtggctgtagctggcagccctgctgggggcgctgagcttctcaacaggagctggtgatagctggagctgagtgcaggctcggaagcttgaccaaaacgggattccaggcacaggaactcaatgatcacacctagatagttttgggggtggatttggagaacaaatagcctagtaggataaaatgtgatgagggagagggagagacagagacagagagagagagagacacaaagtcagagacatctgagctgaatagcagctgagaggcccctgaccagtcatcacctctgggcaatgctggccacagaatgggactgagcctgcaggtgcgtctggggaggggaagttcagttgtaggcaatggagccaggcaggtcttttccagatggtttcctaaacaggtgtttcatgggaacctgatgagagggaggggtgacaagactcatgctatggaaagcccttcaaccaggggtatcccattttctctttataatatatttgggttccatataagatttcatctggagaggggaaagatattgaaaacgacaaggcttaccgtatcaacagaagagacctgacaacttggctcagggttcgcgatacaggtattaaccatcccatggatttttgcatctaaagaaagtgtctgggtagtgggatgtatgacctcaagggatgaagttctcagcaaggaattgcaggcctggagatcctgtgcaggggagtgatatgtaaccagcggcccatccagagcattgcgatcctgccagccacagaggcttctcactgctctccctttgtcttagctgtctctcatgttaggttttcaatgaaagcttggagtaccctgtgtgtgcctagaaaccctgaaggtcaggatcgttcaataatattctcccccatttcaggcctcaccgtgttctgactctgagagggacaggatttcttcctggtcaagccgaaacttttcctgccaaagtgtctcctactgaagtctgtggctacttgggattctcagggcatgggttgttctgggtgactgcaatttccaaatagctaaaggcgtattccttaaactacacttaccttttattattactattttggatggaagtcatcacccctatttcagctttcataaaatggttataatgaacataatttaactcatccttggtgactctgggcttttcttaggagcatcggtaatgttgctatgcagtggcacgttgatgttcacagagccattctggatacatcaaggtgtttgtcccttcattagagaatcctgactccagtgtttttacgtgcagtgtctacttacttcagtttttctgtgtcttctctatcagcactcacttctcattgcaatcagggggcctgcttctacacagcctctctcatcctttctacctacccctccattgcctctaatttacttgattctgatcagctgttggtttagaaaccagataagtgatcttgtttcaacagtgcatgaaatgaaacaagcttttcatgaggaccagagggacactccgtctgaaagggatgtatgtggacattataacatcaaatctaattctctattcagatgcctttattacttactttctgtctaaagtaggcaaagtagtgctattctcgggatttttaggtctgaagaaatatatgaagatacatttcctgattctttagcttcatatgtttaaggataggtcaatcagagaagggcattgacttacaccattggtcctcaactctggctgaatattcaaataatattcaaataccagaacctagtcctaccccagaccaattaaatcagaatctttggagatgtgtcccatgcattttaataactctccttgggattctaatgtgcaagcaaggtggagaaccacccacttagaccctcgcaaaaccaccgcactgaagacttgtgtcttttaagacagatgacaggttcttggtgggggaaggtggctcatgcctataatcccagcactttgggacgctgaagcaggaggattgcttgaggacaggagttcaagaccagcctggacaacatagcaagatcccatgtctacaaaagaaaaggtgcctctggattttgtataataatgtgataactcagaaatttgtgtacagagaccataagattgaccatattatttaatacatttattaaaatactgttcacagttcatgcatttattgcatgtcttctttcactgtgctaatgtgtatgtttgacaaaagcctaggaccatagtgagaccttggctctacaaaaattttttaaatcatatgggcatgtaactcatcactgtaactccagtggagcatagctcctgcctgtggtcctagctactcaggaagctgaggcaggaggattgtttgagcctagtagttcaaagctgcagtgagctaatgatcatgccactgcactccagcctgggcaacagagtgagactgtctctctggttgggggaaaggggggaaagacagggattctcaaccctcagccctggctgtccttaagaaccatctggaagagctaggaatcatttgaaaatacccctgccacccatttttaatgagcagtcagggctgagaatcacaactttaagatattttgcctgtaattaatatttatattttaaatctacattttctgagaagctcggaattttaaaaaatgtattagtatctttctgaagataatgaaaacttgtgtctttagattagctttacatatctgacacctaaatggtagtgttcattcatattgataggataatgaaggaaagaagagctttgatcaaacgcctgggacaccaaagatttatctctggtcccaagagtggaaatctcgagagtggccctgaattacagagctggcaggagctcacaagtggtttgtggaaagatcagctcttttgtgatggctcttgggacagacagttcctgtgtagccagctcttcagtattgtctaccgtgcattttgtagttgcaaaaatgcacatatgcataaatgagagcatccttcagcctttggatgaaatgtgcagctgaatgaggaatgctgaagagatcatcaatgccaccaaatcctccagtgttgtatgaaagcatcagtttcaaccgagattcaggggaaaagataatatgaaaatgtgtcgagggtggcagcacgtgggaaaacttgcaggatgcgctgagaaaaacacacacgtgtgttccagtctcactgatttggagcctcaaatctgctaatagggcctgtgatatttttagccttgttatcagagcgtagagcaagttttcaaggcttgtaggatgtatctattaaaataacctatgtgactgagtggctgctctctataacatttttgttccactgaaatacaatgagaggaaatggggctgcaggaaatggccattctgtcagaggacccaaagcacacagggccagtccagtatttacacacattctggccattgtgcttgcaaccttgggtaacccttcacgtttttcttctcctttttcatcttcttcagattttgaaggttattcggcttgagaagggatgtactatgctctgggaaattgatttgtgaatacactttgtatctgtttctgcacaatccttggaagttttcaaggctgttgattctctaacaagtagctgacagtatgaacttctggtcctgatgatggtgctggtggtggtaagcggggaatgtggtggcacaactatcagacacctgaggcccgtacctgattaaggacctctagaaaggcgtgtaggcctcccacagaggccaggccagcgtctccagacctttgaaaagggaacagagcaggcatgtgttccagcccctccacctccgcacaaacgtctgcagtctacagccagctcactttggtgaagaagggaaggttttgtgtagaggtctctgaattggctggtagaggtgcctctgactggtcacggggcttggggactagggatagtttctgtgccctgctgaacctcctcattcccacctaatcagcccctttaagtcctttttacatattgagctttctggtaaagaggttcctgctgtccaaagattgaaaccaactaaaaataacagaacgcgagagatggaaaagactgtaaggcaagctctctggctttcagtggggaaagctatagtgagcacgtgggggtcctggtccagagtccctttacccatggagccccaagagcaggccctacacccgctgggccttgcccccttctagtttcaggctaccctgtgggccagcaggctcagcattacactgtatttgtataattccctatgtcctttccttccatatcctctttcttttagttcttttctttcttttagttctttcttgaagaatggggtcaattgattgatcttgagtaaacaaatagtagcctgagtgaatacctgcagaattaaattctgatagcttatttcactctagaatctttatgggtagctgcgcaaagtggtgtactttccttaaagacagcctttccttgatgctgggttaatgcgctcctctctgcccttgctggtgctaaagggtcactgaggctcagatgctcactgccatctgtaactccagtggagcataatggtcaggagcacgggctttgaccccagctctctcaatgagaatcccggttcaaatacatttgacccacaggacctctctgggtctcagttttcttatccctggaatgaggataatggcacctgttccacggggtatttgtaaatgaccacatgcctgtagtgcttagttgacacacagtgttttagtccatttagtgttactctaacagaatagctaaggctggataatttataaggaaaagagccttgcttagttcatggttctgcaggatggcaagctccagaagcctggtgctggcatctgcttggcatctggtgagggctttcgtgctgtgtcacaacatggcagaagggcaaaggggaagtggtgcaaagaggccaaacctgaggggtgtcctggcttttaacaacccagtctcaccagaagtaatccagtctccccagagcaagaactcactaccatgagaatggcaccaagccattcatgagagatccatccccataacccagacacctctcatgaggccccacctcccaacaccaccacacttgggatcacatttcaacatgagttttggcggggacaactcaaatcatagcatacgatgagtgctcagtaaatgctaagctattgtcagtggtcactttccatccctaccccaaacacaaagctagagaagggtgcccttcccaccctttcccttctatcagcttgttctggtggctctaacacgcaggagagatgctggccgagggtggcttctgctgcctggtgctcaagttcctgtcccacttttactgctcactaactgtgtgactctggataatctacgtagcctctctgtgcctgggtttcctgccttgaaagatggggttaaggagagtttctttcttcaaggactggttgtaggattaaatgagataatgcttattgtaaaagtgcatccattttgtcgtgagcactgataaatggtaggtggtataattaattaattttttttgttgagacagagtcttgctccatcacccaggctggagtacagtggcacgatctcggctcactgcaacctctgtctcccgggttcaggtgattctcctgccttagcctccagagtagctgggattacaggcacccgccaccacttctggctaatttttgtatttttagtagagacggggtttcaccatgttggccaggatggtctcaaactcctgacctcaggtgatctgcccgccttggcctcccaaagagctgggattacaggcgtgagccaccctacccagcctaattaatttatttgcccttccttgttccagaatagatttaagcagggcagagaagaggtgttgagtaaacaaaatgtcctggaaagctctttgctgactgagagagagctgcagaggagccttcctatttgttgaatttgggcgaatggggaaaatgcaaagctcccaatcccccaatttctccatctgtttcctgggctgctgctcttctttctcgcttgttctctttcttcttctgctcttgtgtgttccatgtttggttagacacttcgggggagggaggcaagctgagaggggaagaaagaagaaaaaattatacccagactcccccaaatcctgctctttggaaaccctgagagctgacaggtgttctatctcgtttgtctgcaatgaagattactgatgaatccaagctgcaggttgtttttctctagcaatggtaaagtatgtgtccaaaagcaactccagacggtggcctcagcttactgattttctctctgatgctctggcctttgagttctgtgtgagcatatgttgggcagttagccaattccaggtgtagagttttgttttcacagccatgatcaaggccaaacaccatactttgatcgaggccatcaggaaccatcaaaaacagcaacaattgtttaaatttccccctagatatgtttggaactgggatccgggctaaacctgtgctggtgcttgtcaaggacaaggacagggtctcacactgactggtgaacagccctgttacatagccaggaacaaaggactctgagtcatgagtgttcacattttttttttcttgcttggttcggattggttctagttattgggatattaacagaaatgaaaaggtttagataaaatccacagcaatcccacatctccatgcctgaatcccagagagtatgattcggattagccctaaaaccttgccttattatcgtggggcagccgccctgggaccccagctagagaagcagggagacgcagatgtttcagcttgttgcaaatggaattgttgaccagtcaatgcagaactcttcctcaggagtgtggcatcattgatttatgaattatggcccttttaaactctctgcttgccttctcggatatcgacgttttaaaaagcgattgctcatgtggatccttttcagaaacacatacacatggcccgagatgagctcttatgtcagagtaaatggagtggcgcactctgggctggcgtttccttcgaataatgaattattcagggagggatttttgtttttgaaaatggcaaatgcattgacggggcagacaggaaggaattacactctgggctgagtactttcttatctttcaagggaggggttaaccagcctggatgaagcagggtgccaattcgttctcattcctgcggtattctagcacggaccctgatgcacggctttctgtggtttcaagcgcctggggaggaacctgggcaaggctgtggcaaggaatctcaggaagggcatggatctcgcctgacagccccgtctctggagggagatgtgtgacagtctctgaccactcactgctttttcattttccttctgaacatctctgacttcctttcttcctctcccactcccaaggttggactgttcgaatacaagcctcctccacttctaattacttgaagtattcatcaaaatgatagacatcctttattgatcacctatagaatcctatgggggagggacaattattgccctacccccccccccatccaccatttctttttttcttaacgggagaagaaactgaacctcaaacaagtagaaatgtcaagatcacagagctaatgagagcagagtgattcagactccgcttctgctgttgttggtttgttgctgttgttttccactctttcctttcatctttgtgccacccagccctgtctgttcgaggtacatgaccccaccttctgaggaggtgaggccagcacctcttctccttcttgaggtcccccacgggggtttccagagactgcagcatccatgctgatgagccagccagggccccagcctcacagtttctggtcttccttggcatgggcgtgtcgtggagtgaccagaccttccacctagagctttgaccctgccctcaactctcccaccaccccgcaccaccacatccatgctctgctctccctcaaacctgaaccacttgaacattattgttattattttttttgagatggagtgttgctcttgtcacccaggctggagtgcagtggcgtgatctcagctcactgcaacctccgcctcccgggttcaagtgattctcctgcctcagcctcccgagtagctgggattacaggtgcccaccaccacgcctggctaattttgtatttttttagtagagatggggtttcatcatgttggccaggctggtctcgaactcctgacctcaggtgatccaccctcctcagccttccaaaatgctgggattacagatgtgagccactgcgcccggcctgaacatttttaattgcccagtctattctgctgctctccatactggattctccacctggcctgaaggtcatagtcagcttcttcaaaccacacaaactggctctgtgggccctggttccgtcagcagggtgcttcctgggattggccactatgttctttgccccttctcatgtcactgtctgctggtcctgctcaggtggccaggagcagagcagagctcggcaatgctgtgagaccccccgcagagttgtcttctgcaggtttgcacagcttttagcatgacctccactccacccaggcttgacagcgctttttcaaatttcaagcattcagaaaagttgaaaagaatagaaaataaacacagctcattatttctaagcaatactcccatcctccatctcccttcactctaagcttctttgcatttctttgaaagcagttgttcttcacacctctgtgcctttgctcatgctgttccttcagtgtagaatgcccttccctgctctacttgctgaactccagctaattctttgatgtcttctccaggttctccattcccatgcctgccccagttagttgtcttattctaggctgacaaaatgtccaggtgtcgtttgtataacgtagtaattgatgatagactctagagccaggctgcctggcttcaaaccccagctctctcactagctgtaagaaaccttggactgttactgaaccctttatgcattaattttctcatgtgtcaaccgaagataataataatttctacttcttagggatgtaatgagcactaaatgaattaatatacattatgagaacaatgcttggtgtatgggtgccacataatacaagcattggctgctattatatctcttatgatgatttcactgaaattatcactaaaattgaacttcttgagaggtggcactgtcttatcttgacttgggcaatctgcttccaggccaattaacttaacctctctgacttcaccttctccacctgcaaaatggggttgatatgatatactgggtacctggggggatgaaatgagtaaatacaggtatgtcattgtggtcaaacaagggtgagccatcattcttagctattgtgcatttttcccagagcccaggtcaagacttgcagagctagaaaagacttcacaggtcacgaggttttactttttgttttgtagagatgggggtctcactatgttacccagactgctcatgaactcctggcctcaagtgatcctcgcgcctcagcgtcccagagtgctaagagtataggcacgaaccaccatgtccagccaccttgaggatttttgttttttaatgttatagataaagagctcagaacagttaagacatcattgagggttacgtaactccatttactatttatttgagacacaatggtacaagagggtgaatccctaggagtgtcagtgtttcagacaaagcagctttgggaagagggagaataatgcttgctgtctagcgtttgatgttttcacagattgcctgtgaccgcctgtatgtaacaggtatagtatcattagcttgttgtccatgtggggagactgcacccaaacccattctggtgacatcacacagttggaaggccactttactcattctgcctcatggcttagctttcatagaacaaaacccctaccagaaataagctgcagggtgaaggggagggagggagccacgcatgtccttgtccttactagggtttctcagctctccacgactgcggtaaccacacaccctggtttgcccagaacaatctcagtttacacctgtggacccagttccatggtgcaccacatacctgttcacttgcagaagtgccttttacagtgctggggagccacatcttatgttttgcttttttaacctgccagcaggcttcttgcacgcaccaggctgaggccgttgttctccttaattaattcgctctgcaagccagccaaccccactgaagctctgggagaaggacaaggaacatttaaactgacctgtctttggttggggcggtctctgctgttggggcaacagcactacgcagaggatggctggagtccacatgctcaggaaggactgcattgcacttcatagttttgttttcttcccagccccatctttttcaattgggactaccgtggtagctttggcgcttggcgctttcagcataggtactgctattcttacaagtgctctacctcagtaaaggttgaggggatccaggccttctcatggaactctggtatttagctggattgtagctggaaggagaatgcacattgccaacataacaaaacaggcgctgggcttactgagttccttcgccaaaacccaggaatgtagacttgttctcatttcctcattttatactcctgtgaggaattcttggggctgcataaagtgattaacccaggagccagctccttggcgtgtcgggtagagaggccaggcttaatgagtgtactttctcctgccttgatctcaaggagctcagcaaagtcgtttgtgcaaataaagtatacagtggaaaccactgtttactccattggattaggctaaaccagattgtaaaaggcagatgggaaaaataaaaaataaatagttctaaaataaaaaaggaatttatatatgtggagcatataagctaggttttattatgtctattttagagatatagaaactgaggctcccaagagttaagagtagcagagctgtggtttggatttggaagcccaagctctccccaccaaaacacgttgcctcctcctttgcctcacatacatgcctgcccccgacttttgtgggacctcctgtaggcgctaagggagagccatatacaatgtgtccaaatattgaaacattagatgtcaaacataaagactgttaagatgtgttccagcctcccagcttgacaaatataccttcagaatgacaaaatttaaaaagtgtaaagccagagttttatatgattgaaagcaaaatatcaagttcaagttgcatatttaatgggaatatttttcttgctaattttcattgttttgatcagtaattatttcctaagtctttattaaatcgagaatttataatatcgtttcaaagtgtatatgggccatgctcaacagaagtggcttttttttttttacctgttttcagtgtttttaaaatttaaaaaactatattttatattgtatttcttattattatgggcacataattggtgttttctgttttttaaaatgtgagcattggccgggcacggtggctcacgcctataatcccagcactttgggaggctgaggtgggcagatcacaaggtcaggagatcaagaccatcctggctaacatggtgaaaccccgtctctactaaaaatacaaaaattagccgggcatggtggtgggctcctgtagtcccagctactcaggaggctgaggcaagagaatggcgtgaaccagggaggcggagcttgcagtaacctgagatcgtgccacggcactccagcctgggcaacagagtgggactccgtttcaaaaaaaaaaaaagaaaaaagtgagcattttcattcattattgatgttctattatttattcttttcagctccttttttctgagctccacttttctatttcaatcataatcccaatttatactcattttcagtgatctaaagaattacacaaggaaatttaattatattcaaagtgtataaaaattgagtatatatttagtaaatagataaattgtagtaaatataaaagttaaaatatttggtcaggtttggtggcatgtgcctgtagtcctagctactcaggaggctgagtggggaagattgcttaagcccaggagttggaggctgttgtgcacgatgatcatgactgtgaataaccactgcactctagcctgggcaacgtagcaagaccctgtctctaaaagaaaagaatattttttaaaaaattaaaattatttcaatgttttcaaaaaaagattgtcttccaaatattcaaaattaaaaggcacatgtcagtataattagtgcatactcaaaatctgatactttttaaagcatggggctcagggcaggctcctgttgtccctagtctgcggatggcactgctcacacatttaatttgtacaaggagaagattccatttcttcttgctgagatgatgtcagaagtagttaccagaatcaggacccagtctagggtcagggttttccagcagaggcaggatcaggaattgcagtcatgtcaccaggctgcagcttaatgaggtgtaggttaagctcctagcatctgaatgtctggacttcttgtccacaagacaaagaaagcctggatttgagactgtttccatggtgggtcctggggaggaggaaggctgatatgtgggtagtcacctccaggctggtcaagtggggagagattttccccctagttctctagtttgtataatgctgggtagatgaaaatatagttgcagggtagggtagtggtggcgcaggagtgcccagcggctggatacttgatagtgtgttaaagcaaaggcatggagcagtatgctaaactctgcacagtcaggctacaaggttgctgggtcagctgggggtcagggtgttttcacaaaataagaaaggactgaacgggaaaggctgttcagtataagtcaccttgagagcatggggagtcacactgcccaggcagcagcccttccataaagcctcatgctggggggtctgactcgagagagcaatcaggttgcctatgtcattggtcaggcttctgggccagggctggagtggctggagcccaggtagacctgtggcacctggcaggtgccaagggcagttttagtcagcagttggctacaggctcttgccaataggcaatgagaggcctgtctagactggggtttgagggcagccttcactccttactcctagaaggagtaagttctggagagaaggacaagggagagccacagtcttggcagaactgggctgctgggcaaggggtcaagtccatgccttaagccccacaaggagtttcaacctatggggttcaaggcagaagaacaaaataaaacttccgccattaaaattggagaaggaacttgggggtagaactaacagtagagctggcttccttcggcccgtaaatcttcactaattatctcctatgcaccatgcactgtgctaggcactgacatacatgtatgcatgagccatggttccaggtcctcccagagccggggattataatccactctatgagagaggcagaagagcagatcattacaatacctggaaactaacgcagtcatagagaaatgcagcagttgcctgggaaagattcctcaacaagtctcagaagatgggtaagaattagtggggggaagggcattccaggcagggggaacagcataagtgaaagcagagaggtggtggcagcactggagtgttctcgggtgtataggcagttgagtgggccaagttttcagcagggtggtgagagatgtgttgagaagagttagccacatgtggggactgatggccgcgctcaggagatcttcctttgatctcatggggtaccatagaagagtgttaagctgaccagtggccaggaaaatttgaattttaggaagacatttggtatttttagtgccttattagaggttggatttaaaaatgaattttcagggatgaatgtgaaggggagaaggccagaggagggaatccatttagattgctgttctggaatttcaggccaagggttgcaaaaacggggactggggctgtgctcattggaacaggaaggggagcagtggagaagggggtaaatcccacaggactcagtcatcagtgagtgctgagggtgagggtgagggagagggaggaggcgggaatgctgcccaggtttccagctcaggtgatatgtcctaaactctgcacagtcaggcttcaagatgctgggaatttaggatgaggtgctgggaaggaagatggggagtgcagtttgagagccagctagagaggaggctgaggaaggccgttgggcagagccagggtgggagactgtgggaaaggaaatgcagccccagaaaggacgttcttccctggtgtgtcctggctgtccatgggacaggttgccaaacctgaagcaggctgctgtgggtgtggcctgaggatgctccagagacccaagtcagaagtttcaatgttgtgctgatcctagccttgctgctggggtcaattttgcacttctcctttccttttctacaaaatggggataataatacttaacatctaggctgcggtttgaaagcaatactaggccaggcccagtggctcatgcctgtaattctagcactttaggaaggccaaggcgagaggatcacttgagaccaggagttcaagaacaacctgggcaacataacaagaccctatcttaaaaaaaaaaaaaaaaaaaacacccaaaaacttagcagggtgtgggcatggtggtacatgcctgtagtctcagctgcttggaagggtgaggcaggagttgaagctcaggagtagaaggctgcagtgagctatgatcacactccagcctgggtgacagagtgagaccctatcattccttcatacatgagtaaataaataagcaaataaataaagtatgcatttggttaaatcttacatttttccaactttcaatttctaagaattccaaatacatctggcaaaggtaggctattatattttatattggtcccttttttttctttattaatgatgcataaaggtccatcttaaagtgatagtatcttagataagatgatctactgtaattgatgtgaatgtgttttgaaaacctcaacggagtagactattataaagcctttcacagcctgcctcacactgatgaggctctgtcttctggtgtaatcttcacaacaacaaatacattaaaatgtattaaagtacactattaaaagcaaatggagtaagccctccagggaagtcagtcactttagaatgctccactccgccccacttcacagcccgggatttgacagatctctgaaagcagaaaggctggaatacacatgagcttttcttttgttctttccatagggatccagttcagtggctctcaaactttactgtgaattaagatcggtggacatagacgtataaacatgcacagtatatgcactaaatcatatggtgctttaagattttctaggaccatcttgattattattcagtgtttttagtcaccaactgtagaacacagctcgcttctggatatgatgcaatgtcacctttttaccgaggaaggcccaagtgttatgtgaacaagcaacttagattggagccatttggctcacagtatgaaaggtatagacacgtatttttttaagcaataaggtatggcttgaaaggtggcacttgatttctaaacaatattccaaagcaatcttaaagagaaattcaaaatttaacatgtctcagaccgtggtggatcttagaggaatcattaataaacattatgagctttgaagaaaaaggagaatgtttagatacaagggaacaagatttggtctatacctaggtgtttgaattgtacaggatgatctggtcttttagccgtgaccatttcacaccacgaaataatacactgaaattaagtcctagaataaagattttgggtaagtgctttggaatctgttgagcatcataggcgctggtgctacccttgaacacagtgaagtctctagtgtttattccccactggaattttgccatatggacagtttccactctctttaggcaaggattagaagatagcttgtggctatgcttttcccaatggcattatcagagacagtgggaagggtttgctagaatccctctgccctgcttgtcacatttgagttaggggagtggtcacgaggatgcttttaaatgtaatccctctttggtccccagctgtaggttggcctttaatatttactgatggtttggatgtggacagtcaaggacttcttaccatcctcagcggtaatgagtactggctcagtcactgtgggttatgctcaatttaggtcaatggaataaatgtttagtaaattgtttctgaaatgttttaataacagagtgcttccctccaaaatattgtatacactgtaaatttcattaatttacataatgtattatgctttgcagggtgagtgggggctccatgaaatagtctgtctaaagttgcagagattctgtacacaggatgttgtttaatgggcaaagctggaagtcaggatcctccggtccttatccctgccccatccaggagagggaaatttagtctcacatttgagccaatctcagattcaccatcttgcaggaacctgtttctcccttactagacagagggtcctgggttgcctgggctatctgtggctggcccatcaccacctctacagcaccagttgagtgtcttgcctgccaggagtgcttaatgcatgactctagtgggtgctttatgatgatgccacagccagtgggagcaaacccaatgctgcgtagccaaagccaagggctccagtaggagcaaacccaatgctgtgtagccaaagccaagggcttttgggaaagaaaatggaatgggtttcaaccctgactaaacatcagcattatgtggaggagctttaaaaaccaccagtgtgcaggccccaccccatccctaccgacctgaattccattgagaggacctgggcatgccgagtcgaggtggccgcaggttattctaatggccttccagggttgagagctcctggcctggttgagcaaggcagatcaggaaaggcttgttttggttagcaatgacttctcctatactgaggtgctgaagtatgtgggtagcagaaggaacaagctctgggaaaatctctacaggctgttctagaaagcactctgctgcctgggttttggagttggccagctccttgtagaggctgacttcatggggaaggaacatggttccactcagaaaacaattcaactataattgagaaagaggagaggttgctgttcgttctccccagtcacccagtaaatttggaggctgagggacttaacattactggcagtcggcttggcagtgttgatgtatggatgttggaaatcagagattaaggcaaattagtataggaaggccaaccaggaatcaaatttgattgtttcaaaagcctttcctatttgtttctttgggacaggattttgttttaagccttttaaagactttgttcagctaaactcatcaactttttttttttttttttgcatttgctctatgttctgttttatgctagaagagatgactgttctagaaaacctttctagaatgaggctggatatatggaagccaaggaaaggaaatataaaagacaagtcaaagattcaataattagaatagctaagtcataactgtcttcttctttttagatactgttctgagcactaatttatctaatctttacagaaaccctgtgggttagacactattactacgattcctatcttacagatgagaaaacagagccatagagagggtaaataacttgcccaagattgtatagctggactcaaacccagttggacagcatgattttgtgctcctagccactacacataaggccttttaagtttggagcctggtgaggggtcatcacacaattatagatgagtcctgccttattggtttggttcagtgttccttctcagcgttcgtgcccacacacaaaggatgctgtgatattgtttacttgtgccactctttacttgtgtgactctctaggccatgactcccagaggacaggtgtgggtcctacagtgcacaccctgggaattaaagatttttgaagaaagttcacttattgaagcttatgctaagtatttgcatacattaccttcctctttttttttttttttgttagacagagtttcattcttgttgcccaggctggagtgcagtggtgtggtcttggcccactgcaacctccgcctcccgggttaaagtgattctcctgcctcagccacccaagtagctgggattacaggcacctgccaccgtgcccggccaattcttttgtatttttagtagagacagggtttcaccatgatggccaggctggtcttgaacccctggcctcaagtgatcctccctccttggcctcccaaagtgctgggattacaggcgtgagccaccgcacccagcctacattaccttctttatcctatcacaactctcctgttttacacagaaagaaatgaccttcagagaggtcaaggagcttgcccaaggtctcacagccatctactgtttctgtgtccatgctcttgagctccccactgtctaactcaatacatccttgctgaatgagctccaggattttgatgcagagttttagttgcctgggatattggaggaggggatactggggcgctcatcccaaccttcaaggggaaagttcttaatctacatctacatccttgagaatgaagattatagaaggaatttgcttcgggaatcctggctggcacgtgaaccaaagggtcccatgtgtgtgagaaggcttgtgagcaggagatgtgatttacagctttgctggtccatgatatgcatgtcaatggtgctgcccttaacccacccgctccccaagcagggactcagagattgacttctcttctttcacttgattcatttattcatttgtttaattagtttgtttattttagaagttgtggcaaaatacacataaaactgaacatcttactcgtttttaagtgcacagatcagcggcattaagtccgttcacattgttgtgcagccatcaccaccatctatccacaaaactcttttcatcttgtagaaccgtaactgtctctttaaacagcaacccccattcccctctcctcataagcacaggcaaccacccttctactttctgtctctatgaatgtgactactgtaggacctcgtgtaagtggatcatacagtacatgtccttttgtgatcagcttatttcacttaggtcgctggattctttacccttaattgttctcaggatgagtacagatgagggaggaccccggggtgggtgaggaaatgagtgtgcagggagataccatgtacgtcagggactaaggaggggaaggctggggaagctctgagatcccatgggcctgggaaggtagggtccgggcttgctgcttagagcttctgtgaggcttctttaaatagttgggcccctgaggatgttttgcctagagagccactgtgggtagacctcaggaggctgatgagactatgctgaagctgcttccaagagctttctgcaggtctggatagatagaacaggacaggctgtgggattcagggctggcacgggctggggagcagataggccttggtgttgaatactggctctgccttttgttagaggtgtgatcttgagcaagccatgtaactggtctcagcctcagttttttcatctgtaaaatggggataataatcgctatcttgcaatgttgctgtaaagaggtaatatacataaagtgtgaagcatagtgcctagcacatggcggatgctcacacataacagtggaatgatcaaagatgggcttctcacacttggcatttttaaagaagatgaaacctccaactggacagtgtcttctggtctttgctgatggcccagaatcatggctgctaatttctctcaaaaggcgatgtgtttcacacagaaatgagaagtggggctatgaatagatgtgacagctagtggttggtgtctcctaatcccatttacccaaaactagaaaacagcaaagggtacagaaaagccatttgtagaaatggagacgagcagagtgcaaatcattcctccagacaaatcatgacttccactccgtttccatttagtcgaggcaaggtctcccagagctcccacctgcccaacattcatggctaacagtctagctgagtggttctcaaagccagaactctgcaccagcagcatcagcctcacctggaaacttgttagaaatgcaaattctgagacccccatctcagacctcctgagtcaggagctgccaatggagcccagcaatctctgctttaccaagccctccaggtgatcctgctgtgagctcaagtttgatagctccagcccctgccccacccgatttctactttctctccccctgctgcttgacacacatttcctggtccagccagactggtctcccttttgaaaattcgaagggtatttctactctccctcccttgctgtgccaccccctgcatctggactatcactggaagcccactcatcctccaaggctgcccacagatttcagcgctcccagactgttgctgatcatggtagcgcatagtggtcactccctctctgaccatctgtaaccctcaccacctgagcctcacactgccacttttattggcagttaactggtcttttcccccaagccagagttataagtgtctggttggcaagcaccaaccagttctttgcttcccctttaacattcaacgtgtgttttaccattatgagcactggagtagggcacatggtagacactcagtatatacctaggtgatgaattgacaattgtaggtttggaggttggagaaaaagaactgtggaaaattgcccagggaatattgttcctgtcatttttgatggtacatcatgatcaacactaacaaccataaaaaagtgttattccctagatgcccaacttttcacatcattggaggaaactcaacaggtgttgctggagtgctgattaaacaattatcactcctccctggcttcctgtttgtgtaccgtctggagaatgccaaagtcactgatggtgccagcccttcccattgtcacttgagctatctgccagggagctgccaggatcggagccccctaccgtctggcactgggttgggtggtgggagggctgtctctgcacgtgaccctgctgagctgaagatgctctcaaggctgctgagattgttttgttctagaagtatataatcttaggactggaaattggttagtccagtctcagatggggaatctgaggcccagtgagggagagtgccttgctcagtgagactaccagttagcgggaggggatgctggttcctcttattcctagcttagtgcttgttctccaacaatacctgggatgggcatgaacagagctatagtttggggggtctcctcatatatcctactccctcctgttgccctcttcctaaattactactgtacccggctctaatctgcccagaatcctgaacctgagagtcctcgtctaccctggtggtgtgtcccttctgtgatttctatgggtatgggccggtgaggaagctcactgaagggaagggccttgggcttggtgcattctagcctgatgggactggtcatctagactagggcccccttctagtcctggaactctataggcattcatacaggtccctataatttgctgccctaaatcctcccaggaacaagaggggtataaataaataagtttgcattagaacctggacaactgagaaacttgtgctgatttgttatcctgtagcaggaatggtaattaagcgtcattcataactctttttgatactaatggccacctagaatgtgaccttgagaagcattttgagtaagggctctggggcaaaaaagcttgatgactgattaatgatgtctgccaagaacagtaaaaaggagaatttgcagctgtgcaaagatgaaatcactacatattctattagtaaaaatttctcttgaagtcgtttcattgttagatttgactgtaacagaaagcctccaataatagcgacttaaagaagataaatgtgtttttttttctcacacatgaaagtctgggtacggtcgggcacggtggctcatgcctgtaatcccagcccttcggaaggctgaggtgggcggatcacctgaggtcaggagtttgagaccagcctggccaacatggtgaaaccctgtctcaaaaaaaaaaaaattagccaggcgtggtggtgcatgcctgtaatcccagctactcgagagcctgaggcaggaggattgcttgaacccaggaggcagaggttgcggtgagccaagatcgcactattgcactccagcctgggcaacaagagtgagactccatctcaaaaaaaaaaaaagtctgggtacaagcccaaggagggcatggctctccaaaatcacagataaaggtcacctaggctcctttatctagaggcagtttcaatcctattcttcaagatgatggcacctctattccaggcagcaggatagagagaaggatgtttaaaggataactttttttgagatgaagtctcgctcttgtcccccaggctggagtgcaatggtgcgatctcagctcactgcaacctccgcctcccaggttcaagcgattctcctgcctcagcctcctgagtagctgggattacaggtgcctaccaccatgcccggctaatttttgtatttttagtagagacggggtttcaccatgttggccaggctggtcttgaactcctgacctcaggtgatccacccgcctcggcctcccaaagtgctgggattacaggcgtgaaccaccgcgcccagccaaaggataactttttaaaaagatgaactcttgactatgaaacaaatattatctttgcacatggcaaagattttatttaactaattaattaatgagggaaccagtaagatgttatagctggttcaaagaaggactaaatatatatacacatagatgccaccaagaatgctgaggtgagcctataattagctgcacaatgaacgaatattccactgcaatgttaacttcatctccattggacatcatttgcaatgttttggggaggacagggtctcaccctgttgcccaggctggagtacagtggcagaatctcggctcattgcagcctccacttcccaggctcaagtgatcctcctgcctcagcctcctaagtagctgggactacaggcatgcaccatcatgcttagctaatattttttattattttgtagagacaaaatctaactttgttgcctaggcttgcaattttatagtagggcacattcgtattattaacagtatttgttcactcacagaatgataaaatggctccaagacaatgaaagtctgagataacacagaagtgtcctctagactcgatacccaatcatcatttttgtccatttcaaagtctttcacaatttttcctgacgaggtgataatggagagtgttaagggagtatatttgctttctcttacggaaagttcctgaaaactgtcacatatacatttgtttgtatcctatggcgagatttagtcacatggtcacacctagttacaagggaggttggggaatgtgttctttataaaattctgttgtacaggagaaggggaatacagatattgccaggaactagcagcctcagcctcagccatcatctctagttcctgctgtagcattgctcttaatagcaagcaatgagaggccaccaagggtccatcagataatctgtggtatgtccatgcaatggaacattatgtagccactcaaagaaggaggcagctgcctaagtactgttagaatggtctccaagatacagcgttcagtgaaaataagcatgcaggagagtgtgtataacagagtactgtttgagctggaaaaaaattatgaatatgtttgtgaatccatagattcttattaaaggaataatagaaaggacgaatggtctctggatgactaggggccagacaaaagagggaggctgactcaccctgcgttgtaatttttcttattctttttgaatttgtaccatgttcatgttacctattatcaataggataaaataaaagtcaccatctatgtatggctctaaaaaacactgaagttgatctgaggccgggaaaagggtaatgtttataaatagtttcaagatgttccccaattatggggagaagtgggaaccttggagaaactggaaccctagaataagaacagatgatagggagtcatcccactgcatatctttctgagattcttgaatttcaaaccacttggatttaatattattttaaagccttaaaatatttttaatattaaataaaaattgtaaaattatgctagctgttatagatgtttatacctccatgcgtacacacagacacacacacccctcccatgtatttatttactcattaatccattcattcattcttgctaggggattccaccgcaggggaatactcttggcactgtctgtagtcatctcttcttaagtgggaagaagagggaaccaagagttaagaaacctgggttttagcctcagctcaaccctgatgagcagtatgactttgggtgagtcaccccacctctctgagtaaagatctgcatctgtgaaacaggcttcactacacttgttctacttacctaacaggatcattttcaagatttatgtttggaggggaggtaatttgtcagcacttgtgaaaaatgtaaagcatcgctcaaatgtaagggattattatggcccatggagtgagaagccacagatcttgtacgggaaattctatcctaggcagcagaaaggctgtttgaaacatgaagcctaaggagggaactgttgaactgttacccagcaaaacaagtacttacggagcattggtgtgagtcaagccctgtgcaggggatcccatagaaggcagcagaatgtgatggtgaagacaagaaactccaggagtgctggcttcccatcttacattctgtgtgcccttgggcccttctgtgtctcagtgacctcctctgtgcagtgggagtaatattagtatccacttcacaagcttgtgatgaggattaaattagctaacagacgtaaaacacttattacgcccgtgcctggcccatagtattagtaaatgctgtgaaatggtaacagtggtatctactttagtaggttaggacccttaaatgtgctgttgattttaaagcacccggcagggactggatcccatagcagtagtggtggtggtaagaatagaagtagaattgatagcattgttctctgctcttgcatcacttaaaatctagttgaggaaagactcatgtgaaacaacacacattagcaaaaataatagtccgccaggaaaatgtttatatatggagtggacatgtttgaattttttaaagctttgacaggttaagaagtaccttaaagtttttagcttggctgtgaaaaacacaaaagacacgaattggaagaaaatggctattgaaaattctatctctggggtttcctggccccgctggcggcccaggaatgagctttgtttgggatggagagaatccgcttttggcatccagttccaggaggcaaaactgcagggaattctgcatgatctcatccagtgcgctaatcaccagccaggaagccattacaccttcctgaggcacttatctaactggattcagaagtgcagctgcctccaagggcctgggatgggctatttggcttcattctgcggggaccttgttggccatgggtcattttcaaaagaagggccttgaaatgactccctgactgcattagcaggaaagggcatgctggggttaatggctagaggcagatccctcttcctcagtgactcagtgtgaagcagatgcagtgctaaggaaggggcttattcctgagcagagaggagacaggagtgcagacgggggctgtagtttgttatcccctttccttctggccacgtgcccagctccctggcagacaccatgtgggacatgagagttgagagctggaaggaaccttgggagacaaccctcgtctttcacaaaagagaaaattgaggtccagagaggtgcaaggaggtcacccagcgacttgaatcaagccacttccagcatacaggacttcagagcccaggccctggaggccaggcagtacagcaagaaaaaagaacacagacagaccgagcagggtctaaattgtggcctgttgtgaattctcctctgtgaaatggaaatgacccagtggagcatttgtcaggaatcgttgagctgatgtaaagtgcccaacacagcccacagggcatgtgttccagattgcatctgttctcttctgttacggtataaatacagctgagattagctgaatacttgtgaaagctaaacctccaagacacgtgcagtaaattcataagtgagtatcatcagtgtataatcaacatgaatctcataaattgaccttaccaaggtgggcaggacatcagagaagcccccacctccggtcccccctccccctcccgcacagaggggaatgatgctgagaaaaagagggatttggctaggtgagtttcaaactggaatagtgaagagggtgactactctcctgccactgtgatgagtcttgccatgaccgggaccaaagtgtgactttggtgccaggttgagaaaaattttgaagccagagctatagattggaagtggcaaacttgacggatttgatcagtgcagcccatcaagaatgataaggagccattttcctagagaatctcagacctgagtaattggatgccccgatacccttgcctcgcagccaagggtcgtcgggggctctgcagaagtgctccctgcctggaaggcagtggtttgctgattgcagctggaggtcagagccttacctctgtcctgatctctggtttcatccctggcaacactgctgggggctgagttcactcctcctccagagggattttagaaatcttttatgctgaaaaccaggaaggcaaataaaactcatggacaaaatatgtacttgtacatggaaaaggagggatgggatactccctcatcaccaccgatctggaagaaaacgaggagcaccaattctcctggggtctgtgctattcgggggtgtgagccaggcatcttgattcttttagacctcaggcacattcaggttgggtgccaagaatatttggtgcaacagagttgctgacatgtcctagctctggacagtgtcttgtagagtacttcatcctctctggagggaggagggaggggagttttcatagcaccttagccacaggctgcagttgtcctgatgagcccttattaggagaagagacccaagaagggtcccgtgctttggaggctgtggcaatgtgacttctccaaaaaccaacaaggtgttggtttgggtgttctctaagttcctttctgctccaaagctccatgttcctggttggagatggcttcagctcactcatttacagcaggagatcagaggtctctgttcccaccctgtgtgatagaattaagcatcctccccatgggagaattaccctgtggcataatttagtccccaagccagaacctcattaccatttaagaaggcactaatctcataagaggattatgcaggaaatttgatacaccagttaccccccttctttggtctctcttcagtggttcagggtcaagaaaataatttttttttacaatgtttatccagaaataatttgacaaagtgttagttctagaacctaaagaaagcagtatgttctttgagctgcaagtgtagcaggcagtgatgccagaggattctgaatcctttgttctcctcagaagctgagggggtgcattcccagactgccccagcctacgccattctctcccctgattgtgtcctacattcccctattcttagtttgcaattggttgtctcctgtcaggttccaatccctaggtgctttgtctttttcttcctcggtcccctccattagatctcagtaaacaagtgcccaagaagcacttcctgaccagtcactttgcagtggaagatagcctaagtacaaatccctcaggcaaatgtaaacaaccaggtgtttgtagccagactccatgcagggagatgttttatggatagaatatcccagcaactatactactttctatatcttatttgtaaggaataactagggaggttgttgaggaatgacatggatctagagtggaaaatcactacttctagtaactcctccttttagaactagtagattctagttctgcctcagctgccttccagttaggtgaccttgggtgtcatcctcaagtcccagtttctcacctgttaagtgggagcactggtatccattccacaaatcccatgccagccctgggctgaagagtgtgaatgccaagagctacaaatgagaagccaagagtgttgatggtacctttatggcgattaatgcaagacacatcccaagtacatttggggctctcatttaaccattttctcttggcctgtaaagagtactggaaaggcacaactttacttatgcttgtatttatttatctgtttgctttttatcacagctaccaaaatccctacagtcatcaaggcctggcactgcgtcatacagaagtttcatgtgtggactttcccagtgagagtgatttcaggatctgcttgaggggctttacttacctctttgctgggctcagccctgctatgaatatagaaggagaattcatcctagatgaccaggctgaatgatatttgttcactaccccctggagtgtcacgaggtttaaagtttttggagtgtcctggtgctccggagctgggaaagccatcagtgattgtttttcctggggatgagacagcatgggcttcatccctacagtgcaggggtggataacttggcacctcaccatccctaacacccagaggtgcctttttgtgtcaactagggagctggcaatctagcactggccagactccagacttcttgtgaaactcctggattttgtttgttttgttttctttccttagccttagattcatgccatatttttatgatcattatgccagggctttgtctttggagcaatcttcctttcctctgtgcactctcttgcacagcctattcctgtaccagggtatccccagcgccaccctgcatggccctagccccatggatcagatggccccttcccagccttctcactgccctgttacctcctcgatattcctgtccatcctccctccccctaattgttagaggtgagctggccctaggtgtgaacaaggggatcggcttaattccttttggtacagctcttttaaagagaccccctgctcgggggttttgtgaggatgaaatgattaaaaacatgttttctataattaccattgtgaacttataataacagtaggtgttactaaacatccacagagacacagaacattggggacaaagagatcgttgtgtaaagaaatgactcaaattatatactgtaagtagagtgtgtgtgtgtgtgtgtgtgtgtgtgtgtgtgtgtgtgtgtgttgtgggtagggacatgccccagggggagcgacctcttttgggcaacgctttgcagccctgcctgcaaccctaggccttgtcatgatagcagcagctcatttcttattgagctttgcagttgatgtgtaatcaggcttcacagtttatcaagtaccaactttcaaatatcttacttatttttactttatctatatttttagaagtttaaatcagggtagtcctgtttaattatacaaactcatcatcagcttcaaagttaagtcttatcatgaatcaaatactttctttaaaaaaactttccggctgggcgcggtggctcacgcttgtaatcccatcactttgggaggctgaggagggcgaatcacgaggtcaggagatcgagaccatcctggctaacacggtgaaaccccgtctctaataaaaatacaaaaaaatcagccgggcatggtggtgggcgcctgtagtcccagctactcaggaggctgaggcaggagaatggcgtgaacccggaaagcggagcttgcagtgagccgagatcacgccactgcactccagcctgggcaacagagcgagactctgtctcaaaaaacaaaaaaaaaactttccaatcctgagattctgctgacaccgaggctttgctaggttcagtggcctgtctgcagtcaccctatagatgggtgacaatgaagctgggagtggaatcctgccttttaaggcaaatctgggtctctctctctgcctgccctctgaaggtgagaggagccacgtgggcatctcactgcctgctctcaaagtgtctgggcaagctacaggccgagtttcctccagcttcagtaaccatcagaccaggctcagtctccctggagtttgtccttctcagccccggagctgagcagagtttaaatcacttcgatccttagagtatgacctgagacaagagggtagcacatttgtgattctgtgactttttctccttcatgggataggcaaggggaatttcataatcattttacacaatcaattggtccataaggtaaaatgtatcatgtgccacatagaaatttaagttctgtttttgtttttactttttggcattcacaagacatgttttggtacatcaaaaggttcattccaaatatttgggactgaagatgtaaacaaaaaatcaatcttgtgacttgtagatttctatcttttttggcttcagaagatggatgaactggctgccccacacccctctggatttgaaacttgactttcctctgagccataaggataacatttatgagatcaataccccaccggaagttttagcaaaggaagaataaactaccctgggtctcaatcatcctaacagatgtttgcttaggaaggacgggacttgggtgggcaagtctctcagaaactgtgctattaaatgagaacatctaaagggttcaacttacactttgagattcaacccttctaccctcctttcatcctcagtttttcccatctgccttatctccttcctaggccagccctttgagctggcagtttgaattcagaagaacagaaaactcaaaggagcctctggcttcgggggagagtgaccacagcagttttaacacgaggaggtggagacctgtttttgatcattttaataccttgttttctcctttgccctgccgcagcactcaccatggctgtttccaaaacatggataatgacgaaaacctatgcaaacactcttgcatttgccaccgagtgtatctaatagcttgcaagaatccagggtgtttgctgagggaagaaaggaagtacagcccagtatgaaggctttgaatgctcagatggagatgtgatgtttgaagtgttagaggcactaaaaggaggtagggaggaaaaaggatttggggcgtggagcctcctgagacaggaagcttggtattgagagtgaggcatttgctcttctccctaaacaaagcagagaggagtaggtatattaataaccagggagatgctgctgctgatgctgatggtaaatatttactctgtcaggcatagtttctatgcattttatataaattaactcatcagatcctcacaacaattctgtgagggaggtactttgtccccactttgcagatcaagagtgaggcacacaaggaataatgggtttgcccaaggtcacacagctgctaagtgatgcctgagcccaggcagtctggctcccaatcccatgtggtacccatcttgctcttgtcttgagaacccatctggctcagaatgctgcctttcctctggggctgtcagggagaacaccacgtttatgagtcaaggtccatagcatggacccaagaggacacattgtcctcagttgcagctgagtggccgttctgtccctccaaggctcaaggctgtggtttcagggatgattctcttccaccttgctccctgccaaactgactggttgttccttctggtttttcacgttcctgggcctggggacagtccaggtgattggatggaagcacacacatactacagatgggatgtgggaggtgaaaggactgaggccagcctggatgacactgtatagcaagctgtggtgtgaaactgttcaactcaaagccttgagagccatcgactagagctttgaaacccatggtggtgctctgggaagtgtggaatgtaaagcaatcatattcatttttcatataaagcttcagacaaagctgtctgggtaaatgaagaacaatagtaagactacagtgaagcaacaatacagggaaacaatcgcatcaagctggtttggggctgtgtcattgcacagcccactgtattcctaatgtatggatctggggtggctgtttctttgaaaagcaacagtgagtttaaggggtgttgggagtaatcactgctgtggggattgcagtacttttacaggactgagatgagctcagagcaaaataaaggaggatgttttaagtgggttggactgaaggggcgaatcctcaatgggattttccagacgaaggtaatggaaacatcacggcgcatcagcttttcttggtgttacatcattcaaccaacaagagtttattaagcaccttttaagtgcccagaaatgttctatgtgctcctggaacacatagaacactgccaggcacttgagaaacatgtggggagagggtaatctccagggaccagcaagaaggatacgggtgtggacctgcctggtggggaactccaggatcgagagggtaatagattcgaggtggaagtaggcctgaaaatgtaggtagattttatttggagggggagagggggagtttgggaggaatgaactgtgctaaggaagggcagaatgagaaaggcctggcatagtaggagggcaatatggctgaggcataagggggtgggagacagttgggaatttcagggctgggttttgaaggatgttaaatgtcagcaagagaaatgactcgtgacagcaggaatcacagagttgaagattttttaactttgctatttggaagtgaggtccttaggaggccttttgtccttgagtcttgtttcccgacacaaatgcaattgaagttttcaaactgaaagcttctctgtcttcatttgttgttctcgatcattcccaactttctgtttggtgcatggttgttgcagatttttgcattgtccctgcaagagtttacagttgaggccccaagagattgtcctgggtcatgttgaccttagtggcagaagcaaggcaagacacctggccttctgtctccccacccccttcccaccccccagcatggcaacaaactgcaatcttatgaggttctagctctagctccctcacatccagaaaacttgtttgggtctggcgacaaatcaccttatacaagagattacacagccagcatatttgagccccaagggtcaggggagccaagcctggggtagggaggtggaggaggctcttggttcaggacttccaaggctagtctgggataattcaccccttcaagcctcttgtaccctatctcacaggctgtgggcatacttcctttttgtaatatttagaagttggtgattgatggaaaggagggacagcatttaaaaatattatttatgtctagagttactttactcaacattgaatatttacaagtggaggtaattatctcccctaagttagagtttctaagggaagagacagaccaccatagcctggagtggacacaagcaacaaatgtgaattgagcagcctctaaatgtaggaccctttgctgggcccaggaggatggtgggggtggaggtatagagcaggccacacctctgaagggctacctgtggaacctacctggggactagtagtacaggtgagaagagagttcctgacaacccagttgaccctcaatgcccaaggggtgtctcagagggagactgctggaggaaggattgaggagtcaggatgtgccctaggaaagaaggtatttggagcccagcatgaggctgatttggggactggcatgtgtcgggggacttgggcaggatggtggccaggggagcccggcctgagcattgggcactggtggtggtaaataaggtatgattggaatgcaggccacagtacagaagtgggttgcagtgttgtggaaatgaatgtcaccctggggacagagggaaggcttgggcaagaagtgtcccgatggcagctgtattgtagatcagctaattgagattctatctgctgggtggattcatgctgaggagagtaagggaagacctaggagctgtcaggctagaggctgaggattggcaccagggacgagaatggaaccgaagggtgggcacagcagcttacagtgaagggcttgagggggcttagtgactgaggagctctgaggtgcggggcgtgggaggacctgtagccggcttcggctgaagggcctgggagagcagggtgcagaatgttctggcacctgtccagggtactctgtttctgagtcatttgtgtgtaccttttcagaaatggttgtgtaatgtccacacatatcagtttttgtagatatcaaatttgtgtgtgtacaaaggcacacagagacagggaagctaaatgttcctgtcacctccaaaagggagaatggtaattttgtattttgtagtttagggaaggccccatggcattttaacagcagccgatttacggaggatgaaacttgagccagcccgggagaaaagtgctgtgggctcttgggagaaatgagaaagcagcccacattgtgtacccacaagcaaccccagcagatgaggtcagcgcctgggggtgcaaaccctctggggtggcccaggtcctgcctgcagggtcgtggctgtctgcagatgtgtctgttgctggatgtggacacaagggtaactgccagccatccccaagtctgcacagtcactctcttccttgtgcctgggctggggtgccctgtaatgactctgggcatagagagctttgtgccatgggatttgcactttccacctgggtaactaagaacagcttggcaatttaagtggtggttggggtgcctttggaggtgctgtggggcaagacgtccgaatccgtgtcactcactgagtgagttccatcattgctaagacttttctatagatttctcttttctgccttagttaggagtgcttgctttttaaccttctgtctctgtaaggagagttgcttcttaactttttatttcagtaatgattcccttatgcaaaactctcattagtaattacccttctctcccactgtagggtatacgattggtatgggatggccaaaatataatcacagataagtgatggatctatttcattttttgattgggttctgttagtcactgccttgtcattaattcctgttaaacccccactcccaccccaattgaccaggtgccatgctaggcccaggggaaacaaagaggtatggactctgtccccaaggagcctgggctcctactgaagttgttccttgctgtcaagccgtgtgctccaggaaacttgtcaaggaatgaaatggactccactagggctttgaatattgggatagattcccaggcctgggattcttaaggcttgagaagtttgtcctcgaggaccacagccttcctgctacttcaaacgacacacctggatctatgagagttatcagcagtaacgttgagcctctgctctttctggatgaaaaggaactggaattggttggaaaatatttcacccctagtagctgagctgttgaattactttcgcagacaggctattgaaacttttggatctcattaaatcaggaaacctgccattcactgacagattaatgaattaaagaatcagagagtgacttgactttcaaggaaagtaagtggtggattttcttctacttgactaattgggtaccaggggatgtgttacactccagatagtcactccacagcaagaaagtcgggggtagggagcagaaaggaagccaggagtgggccatggtggcaggcactcccaacttcttggtttaaatgccaccagtaggcatcctaggagagcagcttccatctgcctgggacagagagcttccagtgttccatacctgtgcctctggctgatttcccaggttgttccctgggcccagttccacctctgagggcatgtccagctttgctgctggcagccacagaggcatctgagaggcatgtgctctggacaactgggtctgttccgtgctggcagagctttcgcagaggcctgcccagaggctcgcagctcctgggaggagcaaggatatggcgtctggctcagctgagatggactgggcattgcactcacaggatgtgctcactggctcactggctttccttggcactgcagggaggttggcaggcttatgtcacacaccctgcaggctgctgcagttccatcctgtgtagtgctgactgcactcccagctttctatgagggcacagcccagcatggctgtatgcaagtttactatgtttgttggtggagaggtaatcttgaggcaatcaaagagaatcagggataatttgcaggcttcagcaggactgttctgttgttaacacaattagttccattaatcctctccaatcatctaaggtaaacagacagcctttgaagtcagggcaaacatctttatgaagaaaggaaaggatgaagtgatcaactcctttctttccaaagcccttaccattgtgaatcctgaacaaaacattaaaagcaccaccacctgctatatccacacaggaggaccagggaagcagctcggggagtctcttaagcggggcgtgttgtgtccccagcagggcattgggttggactggtggggaggactcccttccccaattgagctcttcaagaaagcctagaattagcctttggataacagtccggttgggctacttaagttgaccatttcctccctccctccctccgtccctccctccctcatttcctcccttctttttctcctccttttctttttattttattatggaaaatttcaaacatattcaaaaatagagcagaataatggaccctcatgcctctaccacccagtttcaatagttgtgacccatgagcaattttccagttggtatttaatgatcgccacccctccctttatgtgagttttctgatttgttgtgtgttgcttatctgtttatgaatgaagggggaaattctaatggagatttcctgtctcttctttctcttctcccttagaagttgaatgggccaacaattttggttgatgtggaggttttctgggccaagaaagctgcagtcagggcaggagacggggttggagaggttgggtggtgggaaccgggaaaaggttctgctgaacgtgggttcgcctggtggggtacatggattgagaaatgagactgcctttttgtttagatttcagcaaatttgccaactccacattacttttttcctccggggatgaatgtagaactagtagccttcataacaacagctatgccagtgtcatctttgcctggccttggttctaatcctcttactcccttttctgtgtctcaccttaaaacaggagctgcaccttgtggggaacttgtggctctgcagcctaagtaagagagcaccttgggcaataggtttaggcactagccacggttttcctgcaacaggcctgggacttgggggggccctgctgcagcccccaccagtgtatcttgacagaatttcggagctaaggtgtttagcggtgaggggtgggacaccaaactgtgttagagcaacagcagcaggcagataggtttcttagcaacaggaaatgccattatgccaacttgaaacattagttcagttttcctactttttttttccccaccacacaaacctcactttgcaaaaagtgcagacagttagttcagtggtgcatgaaatcaatgttacacctgatttaataaaaactacagtatgcagctgggcccagtagcttgctcctataatcccagcgctttgggaggccaagagaggaggatcgcttgaagccaggagttcgagaccagcctgggtaacgtagcgagaccctatctctacaaagtatgttaaaaaaaattagccaggcatggtggcatgcacctgtagtcccagctacttgggaggctgaggcaggaagatcacttgagcccaggagttagaagctgcagtgagctatgatcataccactgctttccagcctgggcaacagagcaagatcctatttcaaaaacaaaaacataccccacagtgtatatttggcagggacggggggatggggggatgatagacttaggtttttttgccatctctttagaagatatacagaaagttaacagaagcagggcttttataagtcatgtgtctgtgaagagggtgcatgtttggtggtgatggtatggaaggagagaagtcaaagtagaccccacccagggcagtagaagtcaggcctttgcattttcagacaccggagcagatcctcctcaccctcctggtctcaatgtgttggagggctccagggtcagtcctcattcctctagtttcatggctcaaactacagatccatatcttttatccaaaatgcttagggctagatttgtttagaaataaagcatttgggggaattttagaaggttaatatagtaaatattctgtatgttacatgacattcccactagattctggggcaggtctttgtgatcaaacaaataatatttctatatcacaaatgtacaaatattcacatgaagtagaataaacatagacagcaaatagccttatgtcattttgggttaggttttattgctgaataattttgacccaaacttcaataaaacttttagtttttagagctgtggctgtcaggattgtgggtcacagattgtgggtcagtgccatctatctgctgccaactaccaaattcaggtcttaagcttggaccttccccccgaacttcagatctgtagatgcagctgtccccggctgtctcacagatgtctccgacatggccagtgcaaacctgctcctgttcaccccacccaccctgttctgatcaccgtcttctgttcagccaagggcagctccatgtttaggtcaggccagaagtctccatgcaatccctgcctcccctccttatctcacacactacgtgcaatcccgcagcaaatccttttggctctatcttcaaattacattcagaatctgaccaattcccatcacctccactaccaccaccccttcccagccaccatcatcacttgtctggactattgccataggctcctaagttgccttcctgcgtcctcatgggtgcctgaagtttattctccatgcagccaccttttaaagtgtgagtcacagcatctcactgctctgcagtctctcctctggcttcccatctcactcacggccaaagccaaagcacgtgccaggccctggctctctgacctcatctccaactgccctccacactctgctccagtcacacccgtctgcttcaactactggcaaagaccaagtcttcccctacctccatgcctttgcatctgctcctctctctgcaccagtcgggctggctttttcgatgatcagggctttcctggatcaaagatgatacaattcttacgtgtgtttgaccaaaatatcatatggaaatctaatatctaggatagaagatcataaatgaaggatctattctgacattcagagcttgaacagttttcagatcctttctgctgtgtgcttcaggaaatatcttcccttgtggttcagatcgtggtgtgggcttgagcatatgtgagtctcatttgttgtccagctgtatgagccggaattgttcatttttaaaggcctggacttcataaatcatgtagaaaacaagcacagatgtataaggagagttgcccattttcagagaatagatagtccgtgcttccatatataatttgtacttcaaaacttatgtattacttagttacagaataaaagccagttggacagtttagtgcaccattagattacatgttaaggcaggttctatcccagaaaacagaaaatcatgtcctccttcttatttacatcttgttcattgttttgatataaaatctaaaagtcttaaaaatttgatttataccttcaaaattcaacacagagtcaactgattaatattggattaaagggaaatgtcactgactttgacatacctaataaattctgttttactttatgttatataaatttgagacttatgcttcgtttccttagagcaccagcatttttctttttttcttttttcctgtcttataaagaactcgagacaaataggagaatatattccagcagattcctgtacatacaaagatagtgactctgaatagctggatgataggcactgtatggtcatatcatagcagaaatgtttgcccattcctgatcaatgaagtctgctgttatgacagtttgttacatgaaaggtagttaaaaggtaacattgtctggaatataaaaaatgtggactgcctcacctcacaaaagtggaggaacaccatcatatagaggagattcgatcaaagcaaaggatttttcaattagattaaaaatctgttgaaaactctattgataatcccaactactcgggaagctgaggcaggagaattgcttgaagccaggaggcggaggttgcagtgagccaaggtagcaccactgctctcgagtctgggcaacagagcgagactccgtctcaaaaaaataaaataaaaatctattgagctattgaagcttttccttaatatgttcaaactgtatccaactaagaaatacacttgactacttaccactcagaattggtgattatgatagagtagtgctataattatttgaccaggaaattatacttttcaagatatatgaaaatttaaaataatttgtctcatttttaatttgtaccttaaagaactgaaaatcaggatgactgagtttcttttcttttctttttttcagctgtaggcaatttactcaggtactttaatggattgtttaacctcattatgcctcagtttccttacctataaatgagaggagtgaactacataatgttcttaaagcaaaaaattacttatttttaacaaaaaagctatagtagaaggtagaagaaaagtagaaagttgagaaactatagatacttaaaaagaaaaaaattattccactattccacaaacacctttttctttagcatatgtacctaccacatacttattttagttttacaaaattggatcatagaatatatgttcctttataatctcattttctcccattgaatacaatattgtgaatatctttgcatgttattacatataattcaacaagttttttttttcatgatggcatggtagctaatggtttgaatatgctacaatttatttaaataattttattattattgaacaattggtttctaatattacactcttaaaaattctgtaatgattattcttatagttaaatcttttcacatatgtgtgatttgagataaattcccagaagtggaattgcaagattaaaggatttttgtcatgtaaggccaaaacattctttataaattttgtgtcaatttacatttcgtcggcagcgtataatagtgtttgtttcttccccattctcataagtactgcataatagtacttcagatgacatattttggagcttctattcaaggtggtcctggagaaaatgagttttggggtttttgtttgggtttggttttgcctgcttaagaccccatataaattacagaaaaggagaaaagggggaagtctgtattaaccaagtgggcagaaagaggccatcatcaaactatttcagagaatttctgggagatgaaagtagaaggtggggtggcagctaatgaagcagaatagagaactctggagctagagcccagaacatgtgcagagggcacaggaacctagcatagagcagcttctctgcaggaccctaaagggctccaggcttggacactgtacttaccccaggtaaaaacaagtgacctttggaaagtctgtatgtggaaccatatgctccccactgtcactatggaagggcctaactttcacataaaaaattggaaggctcggccgggcgcggtggctcacgcctgtaatcccagcactttgggaggccgaggcgggcggatcacgaggtcaggagatcgagaccatcctggctaacacggtgaaaccccgtctctactaaaaatacaaaaaattagccgggcgtggtagcgggcgcctgtagtcccagctactcgggaggctgaggcaggagaatggcgtgaacctgggaggcggagcttgcagtgagccgagatcgcgccactgcactccagcctgggcgacagagcgagactccgtctcaaaaaaaaaaaaaaaaaaaaaaaaattggaaggctctttgaaaaagaaatagtataatggtttggggagaactagcaaagcattgtgggtattactctccagaagaaaccaatttctcattcagggacccatgctctaatggccagatcccaccatctaaccctatggcacatggggctgcaattcttagaaatatgctgcattcataaacaaaaacaaacgagagagagagagagagagagagaaatgagaaaacaggaaggcactgcctgtacatgagaaaggcattatgaataaataggaaggcatttctggaaactcaagatattgtcagaaaatttcagaggaagaattataaagtcaaggaaatctcctagactatggaataaaaagataaaagaaatggatatatatatgtatcacatagtaagagacataaggatcattcctactggtccaacatctgaataagaggagtttcagaaagaaaatgaagaagaggcccatgacaaagaacaaatagaagagtatctcccacaaattcagtttcatttaggacaatgaatcccaaaagacaccctgagacatatcactgtggcattttagaatactaggataaagaagacccaaaaacttccacaaagtgaaaacaacgtcacctattaaacaacagtaatctggctgacatcagagtccattgacaatattgatgttagaagaaagttctgatagattatgatctttttaaaacctagaattctatatccagctaaactatcaattatgtgtgagaacaggcatgaaagatttctgattactatttcaatcagaatgtactgtcctagcaaaaacaagggaataactcagaataaggaagataatggatttccaagacagtggctgcacccagcagaacagtgaggagatatgcagtgctacagttgtgcagcagaccagagagcgtcagctcagatcagggagaataggacagtggggtgtcctgataggtacaccctccgagaaaagaatgctgggaagactcaaagatctgagaaaggcaattggtagactgtaagatgaagaatccatttgaattagatgctaggtatattagccattgagtggcatgtgaattgttacattgggcccatgggaaagaaggtgtatgtaacaccatttacaaagtcataataaggaaagacgattagttttcagattttagaactaatgtatacacaaaacatggaaattaactatggttagagaacagaatgtcagtgttgtcaaccttgataggttaagagtaaagacaaaaatttcagaggtggctgggatggagggtggcaggcagaggatggggaatgctggaagcactaatgtcctctgggtacaatgtggagggtcaagggatatattctctacagttgatggcataagaaattggcattttaggtgtgtgagtttttttgtagttgtagagaacagagaataaacagaatttgtgatgtataacttttgtggaggggcaaaagaggagggaagtggtaagtaaactgaatcctcttctatcatagcagcaaggtaagagaatgtctaaaataagaaatcaggaaattgaggcatacacattttatttagggacgcagcagtgaccaccagagaaacctatataaaaattactaaaattggtccctctgaggagttatggggcagaggactgttgcttctcatgacaagcagacatgtagcttttggtttcttaaaactgaacacatcacagtacttacttttggctatattttaataaataaataacacaaaaatatataacccaaatgaaactttgactaatttgataagcaaaagaaaagaaaaaagatcttatcctttattttatttttgtatgtatatttaaactaaatgatttttaaggcatttctgactcctaaatttcatgcttttatagttttttataaaactgttctttttctcacaggacatggttccaactaaacaatgaaaagcaatggcaaataagactggtatacagagtattatgatgcaggaatattccccggagagcaattattccccaaagttgggcatcctgcgtcacatttgtatgtcattgtctgagcctctcggctattttgctgtgggtttagtgtaccttacaactatgagctccaggaggacaatgaaggagcattactctcattgctcttgtgtccaaggagcaactttttttttttttttttgagacagagtctcactctgttgcccaggctggagtgcagggaggcaattttggctcactgcaacctccggctcttgggttcaagtgattcttctgcctcagcctccctagtagctgggactacaggtgcactccaccatgcccagctaatttttgtatttttagtagagatggggtttcgccatattggccaagctggtcttgaactcctgacctcgtgatccgcccacctcagcctcccaaagtgctgggattacaggcgtgagccaccgcacccggccaaggagcaactttttatcattcatgcagtatgggctccatgacagctcacaacgtgttctttctacagatctcccagagctcaggctgtctgtggggcagcctgccaggcctcaaggtacctattggaagcattgggtctccacttggagaacccggctttaacgcacactcctcttctgcaaattgtgaggatgcgcgcaagttatttaaattcctaagcctcagttttgtcacccatcaaatggttaagaacaacaatattgccttcttcacataggtaacacatgtagagtattcaataaagggtgcttatgagagttgtgattattagtattcataacatagtctctcttttgaagaactcagaaagatggaaacaaatgatcgtgtcttggctttcaaagggagtcaagaactgaatatcagcccggtgtggtggctcatgcctgtaatcccagcactttgggaggccgaggtggaaggatctcttgagggcaggagttcaagaccagcctgggcaacatggcaaaaaaaaaaaaaaagaaaagaaaagaaagaaaaaataactgaatattttttgtgagcagccattgataaaagttctattaggttgtgatactacagggacagaaaatttcctgatatgaagataatttttctggttacaaattcctgagttcctgaccgagcttgcctctgtttcacatggattcattcagttccacttagagtctttattgaatacctatctcaatcccagccctgaatcaagagctgtggaatcctcaaaagaaagacatggcttagcaggagaggtgctcacagtctaggtgggaaatagcaatcataatgacctggcagctaatatttacaggaagttgtgtgccagacagtttcaagtgctccaccatctcctcgaatcctcccaacactctgaagcaggtcctgctgacattcaacttgtaagatgaggaaatcaaaataagcaccacagagctttaaacaggcagaactgggattggaacccgggtaggctagcttcaaaacctttactttcaatctctgagatatattgacttagtgtaagaaataggaaatgtaagataaagcacacacattcaaatatacctagtgatagggaccattgcaaatcaaaatgcaaaatgtgaaatgcaaagtgcagatcggcagtggattatctgcttcagaatgcttgggtaggtggctacatttctgctattagtgctcacctacctcttcttaggatatacagtcatgtactgccatttctctcaaagtagacaggcagactgtgctgtgagcagatgatgctctgtacccttacacactctccacattagtttaggcacttttggatgttttctcagctcaagaaagcatttatgtatacatagagttattcgtttttagctacctctgtcatcagagggagccagctctctggggccatttctgagcctgctaaaaaagaggaagtaggtgctaacttgagcctactccatttgtggtgtgttgagagctaagatctgtaacgtgggcctctggtccagccaacaagagtttcacaagaagataatggctgctgctaacttggttcccagtgacctggctacgggtgatgagaatgcagtgtttcagccagttttgaggggtgtttatttaaggtgtgtctggcaactgaagcaagctgtagtctgggggattggagattataaacagccagtgcagtgaaaagggacattttatttttttaaatgggtagtaacttaaatttttaacaagttagctcagaacacaattttgtaaatgggcgtagaataaagaataaggcctcctttcctgatttctggtttgctcctcctgtcatgtccatctcttgagtcagctcttgccttttgctgattaagactccttctggagataaggacgtatgtgcagatcacgtgtgcgcatgtgtgtatgtgtgtgtgtgtgtgtgtgtgtacacccacatgctcccccattgtattcacacagcaacacaacatcatgaacttacggtgtgttgctttatcccccctccacttaatgtatcacagagctagttccctatcagttggtacatttagatctttttcagtcttttttaggactcgcatggtgatctaccatatgatgtaccataatttatttaagcagtctcctattcatggacatttaggtcattaagttcattaaaaggctttctataacatttggtctaattatcttgttttatatatgaggaagttcagatccacaaacacacagacagatttaaataattcagcagactctcaaacctacattttggatgtgtttatcttgctattattgtattttgatcacaggagacaggagaaggtggctcagctgtgtgcctgtgagtgtgtttgcacacgtgggtgggtgtgtgaatgtgcacgcctacacaggtaggtgtacattatgttgtttcacagatgtgctgttgaaaaactctgaatgagtccttttatttttaaaaatggaatatgaaattttaaatgctccgagggtgggaataggatttgttatttaaaggaaacttgtggaggaatccttatgcgaaataaatcgtttttttccatttttaaaaactgcttcattgaggtataatttacatacaattaagtgcattcattttaagtgtaggcttgatttgtcccacccaatgtctacattcatggagcagccaccacaatcaggatagagaaaactcccgtcacccaggacgttcccctgtgtctcctggcattcactggccacttccagctccagggaatcacagatgtgcttttttgttattgtaggtttgttttgcccgttctagaacatcgtagaagtggaatgctatggtatatactctttaatgtttggcttctttcacatagcatccatgttgttgcatgtatcggtagtatatttgtttttttttttttttttaagagacaggatctcacctaggctggagtgcagttgtgaaatcatagctcactgcagcctcaaactcccaggttcaagccattctcctgcctcagcctcccaagtacctgggactgtaggcatgcaccaccatgctcagctatttttttttcttattttttgtagagagaaggtctcagtatgttgtacaggctggtcttgaactcctggcttgaagcgatcctcctgcctcagcttcccaaagtgttgggattacaggggtgagccaccgtgcccggtcctcattcttttttattgctaagtaacattccattacatggatgtagcatggtttgcttattcatttacctgttgttggacatttgggacatttccagttttgggctgttaggaatgaagctgctgtgaacatttctgtatagtagatggcttccccagtaaatcatctccacaactcagcgtacagatccagttttttaatatattgaagtagtataagctaaggccatgcattcaataagccaacatgtagaaatctgtattgaatccctcccatgtgcgggacagacagggtcctgctttgcagggatgtacactgaagcctgcatgtctttgcactgcagtggaagctgtttgagaaaaacgatctgcccctccccttattttatgaaagtaagtgctattataagcccattaacagaatagaatcttgaacatatttgattacatgtgtactctctgctttttgaccagtcactgcacactaccaatagagcaagtagcaaattttaccccaaatgaagagtctttaattagctgctaacttcaaaatcagcaccccgcagctgctgctgagttgctcattgtattgcctcaatgctttctgctttccaaatgcagagctgggaggacacctgctgcctgaatgtcccctgctctgtccagctggcctctcccatgccaggtgggtctggggatggtagtgtgcctgcggtgcctccaggggagagggggcatcagtgaaggggtacaggacttgggcagtgggccccctgctttgggaaccagtcccccagtcttctgtcctgatggttccccgtctgcctcctcctttctcactctccaccctcctccaagtaaaaaagaaaaagacacagcagtagattatctaggaccttactggtggaacaagggcagtgcaagccttcccttgtccttctcatcctttctggattcatctttttcagaccctgtccctgttgcccttttgcctctctccacgcctttgtgcctgacagcagatgggaagggaagtgaaactcgaattgggcctgtgtgacctttgtgggctgtcccaaggaaaggtttgcttagacatctcaggcaaaagttgaacctatggttaggaagcttgactttgtatattagacctcccttcccttgaagccaataacccccaacatgtaggtgtacagataacctgtggatcacggggggctgacagcagcacatcagccagcagcctggagatcagcataggtggagtcctcttgattttgctgttgtggttgtcagaactcctgctgggcaggtgtggtgtcgaggaagaaacatgagactgagaaacaggagttgagggagcaagttcttttatttttttaagacggagtcttgctctgttgcctaggctggagtgcagtggtgcgatcttgcctcactgcagcctccgcctcccaggttcaagcgattctcctgcctcagtctccagaatagctgggactacaggtgcatgcctccacacccagctaatttttatatttttagtagagacggagtttcaccatactggccagggtggtgtcaaactcctcacctcaagtggtccacctgcctcagtctactaaagtgctgggattataggcatgagccaccacgcccagtctagggagcacgttctgattctgccagtccggctccaggggtctcatgcacagacataggtgtgaatggcacctcctggggttgtgcagctggtgtgatctcactagcacactgcatgatataatggccacctatcttccttaaccccagctttctcagattctcaacagcactaataatactgttaccacgcctgtaatcccagcactctgtgaggctgaggtgggaggaaggtttgggcccaggagtttcaggctgcagccatgacggcaccacttcactccagcctggggcacagagcgagactctgtctcaaaaattttttttgaaaataacaaaactcgctaccttacagattaattgtgagaaatgaataaatgaatgcgtatgaggggctttgtaaacggctgagcaccaccccaaaaaagtccctaacttttggcttttctaagattgcctttttagggcttgatgtgggttgggctcttccccattgccaagttcctaattcacatgagaggcactctcattgctgcccagacctcccctcagagcaccatggggtggtcaaggtgtctgaggtattgctgtgccttccaggtctgcctggggaagccagtgacacctgaaaaggggaatgagcccactctggggacgggagggttgaaggaaggagactgcacctcggactggattgtcagaggaggctcagttggccaggcagggctggggttgtgagcatgacttgcaagctctgttgacctctcctctgtgccccaggctgacctgggtgagaattctggctgaaagctctctaagcctgttttttcatcagaaaagtagagaatattgctgtctcacaggagattagatgaactaatgcaggtaaggtgccaacatggcgtcagaggcacagtaggtgtcattgcccttctttcatgagtaccacacgtcctcccgatgcccccgaataccctgggtatagcccttcctgccccgggtttcccccagaaagggtgcatacaatactcttaccttggattttaaagtacaatactcttaccttagttaaaaaaaaatgttttcagagacaggatctcacttgtcacccagactgcagtgcagtggcgcattgcagcctggatctcctgggctcaagcaatcctcctgcctctgcctcccaagtagctgggactacagctgcctgccaccacacctgacctttagctctttatttgatattcacaacaacactgtaaagtcatcaaatgtcctggaattacatgtaacaataccaactttgttgaggaaagtttgttatagtagaaataacattggactaagaagcagaagacttgcctttttcatgataactgcaccaatgatgactattttatgccggtgcctttgctaagcactgtgcatagattatctcatttaatctcacagcagccccatttcactgacaagcaggctgaggcatacagagggtagctgcttgcttcaggccacaaggccgctaagtttgctcttacccaccacgtgcagagtgtctcctgggtgcttagttaaaaaaaaaatttttttttttaactaaggtaaggtgccaagtgctttgcatgtatgtttcatggaattttcatgacaacccatttcacggatgaagaggctgagaggctcaggaagagtaaataattgcctgaggtcactcagctgataaaggacaaaatggattctgccctgatttgacaccaaagtctgtgtttgtctcccccagtttgactgccttgcttctggcccgtgctggaggggtagccaaggcaccgtagtgtgaaagagaatcatagtcaaagaaaatagaaatagtagctgggaagatgtgttaagttgggatatgaggtccaaggaggtttgataaattaggttgcatctgggagaactgggaggagcctggtgcaaagaagaggctcagaactaaccctgggaatggctgggaggaggtagcgagtctgcttttgtgtcacgccagctgcctggtgccaatgcagactgacagcttgcagggttgtgcagggctgggcacttacattgcatcattatctggaccatgtaatcgtgagcagaatttatgattaaactaattcagcggtgaagttgtgccacactcttcaccatcttttatacttggtgacccctccagtcgttgaagacccaccaccttggatggattctcagagcttcctcgcttggctagctggggcttggctggcgatctgcggccatctgctcatgctgcaaagctctttgttgcttttggcatgtttaatagcttaatttctatttttctgtttggaaatgcagttcaccagcacggaggctgcagtgggtgctaaaatgctttctgattgctatcttgaatgttaatatccgaatacattttatcataaatgacctgtcctccctgccacgagttctcactccccttttgcaaagatgggcatggtgcctgcctttggataggccccgaagcccatctcattcctttgctctctccctccctgctttacacagatagcattgtactttgccaataaagtccacagtcgtgggaaatctttgagttggaggatatgagaaagagtttcattttgccggcagggtttaatagggatgatctaatctctaaaaggcatacattatttaaattccatgcttttaggcaagagggcccctgatatttttgacttttgtcagggagaagattctggtttggctctattcagcagagccgactgttggttttcctgtttgtcattcgctgcaggggctggtgagggtcagcactagtggtgagaattctggagaacattttctttacccagaaacttaaaatcatggactcttggggagaaaggaatgagaaaaggcagcatgcggaattaccagtttgttatttggttcccatctggatttaaaaccgaagatcccaaactcaggtgagcagctcccccggggtgcccagggggcaatgcaggcctgctcgtggcactccctcactcctgtgccgacggagcacctcagctatcaccaggggcctctcccacgaggcactgaagagtcttgtgggtgaaaatgaaattttgagggaaaccttaagctctctcaaccattagaggctgagtcaggcaacaagatggggtcaggagtgactctgggagcctcctggattgtgtgtggggtgagacgttgggagagtttggagaacaccattccagctggtcgctttgtctcatggggacatgtggtgctcatggtatagctgcctcatctttcctctaccctttttcaaatgtcattttagtagagatgacatgcctgccttccttcctggggacagagccttgggagggtgaatgttcccagaatagactctggaagttctgaacacagagccttttcccacctccacgagtgtgtgctgggtgtttcctaagagacagtgagctacgaactagggatgcaaatctggttatcatactttctgtctatcaggacagagaggtagatggacaatgtattacaacttaataggagctgtattagtcagtgttctctagagggacagaatcaataggatatatgtatatatgaaggggagtttattaggagaattgactcacacgatcacaaggtgaagtcccacaataggccgtctgcacgctgaggagcaaggaagccagtccgtgtccgaaaacctgaaaagtaggaaagccgacagggcagccttcagtatgtggctgaaggcccaagagcccctggcaaaccactggtgtaagtccaagagtccaaaagctgaaaaacttggggtctgatgtttgagggcaaaaagcatccagcacaagagaaagatgaaggctggaaaactcagcaagcctagtctttcaaacttcttctgcctgctttattctagccacgctggcagctgattagatggtgcccacccagattgagaatggatctgcctctcccagtccactggctcaaatattaatctcctttggcagcaccctcacagacacacccagtaacaatgctttgcatccttcagtccaatcaagttgacactcaatattaaccatcgcaggagccatgagtaagatgtgtctggtgtattgtgggaacacagatgaggggctaattaattctgactgggcatatctggatagatttcagagaggaggtgataattgaccttgactttgaaggaggaggagatatccactagactgactgttctgaagtaattcttgctaaatgcttgcctgctctttgctggggacagtgaaaaaggaaaaggagggggatagtggttcctgccctcaagatattcacagcttgttggggagagagcctggcactatgaaccaatgaaagctctgtgtagacagatgggattgtggaggcggagaggctagcagggggacttggtgatccagggtttccagagttactactctcttatagagagaacacagtttctgtaaggatagttcagtccttgcaaagatgtctttaactacaagaggcccagccctctggcttttgtctcacccaattatttcaccaccttgtctctgtatattataagtagttagctggatttgaggtggggagggaggaagtgagggtgcctgtgctgtttcttacgccttgcataccttcccttccctcttcccttccgtcttctacactgatttcaggttcgtcagatactttatcagttcttctctgtccttcatcattaagctggattcagcattgttccccattttttaactccacaatgagatgataaacgccataaaagcaggagtagtgtcttcctgcttctcttatttcccctgggagcagtttctgtggtataaagaacatgggtttctcaagacaggcttggcattgaatctcagcattaccacttaccttggaatttgggcacaatttccatatctgtaaaatgggataacatagggctttctcaacctcaacatcattgatgacatttggggctgaatgattctttgttgcgaggggtcatcctgtgcactgtagaatgtttaatggtatctctggcctccacccactagctgccagaagcagcactctctctctctccaatcatggcaaaactgcctccagatgtttgccaagcatcccctgtgtagcaaaattgcccccagttgagaaccactgggatggtgctacctatggggtatgcatcagtcctcccaggtctgcatctcacctagcactcaacacattgtaggttggtgaattacatggagctgtgtctctaggttttagcagtttggggtagaaatgttgtggaactcttaggttgcccacacaatgcactaacagagtcactgtcattttcttaattgcagattgatctggagccagaaggaagagtgtatgtgatcatcgatctctcagggtcgtcgggtgaaggtaggagagcgtgacttctcatccctgttttcttccattggccctttgccttctgggtctcttctttcccccccttggccggaacacattatagtgacatttaattaattggcatcctttaaaggaaaaggttattttgaagatgcttacgcctgtgtaccaaaagggaccagccatctgttaactttggtggagcagagggaagattttggacttaccaagtgaggccaataaaacgggcgtttttgcacgctgtgtgcaaggcaggcttcagtggcagggcagcctctcccaggaggcttgcgtggggtttgtgtgtgtgtggtgggaaggaagtaaaaccagttggtctaacggcatccagaaatgaaacgaataaggtgacaaacttcagaatcttctttagagctttgatagaagtgggacttcttttaccagttctttacacagacaaaagctctgctcttaaagagaaataatggggtgagggaacatctgctccccactgactgattagatggcgtattacaccctcttcctcttacaccctcttctttcaatcctttctttgctcacttaactacacttaagacctttgaagggtttgctgggtgttgaggactgagcagtcaagggaagaagggaagcctagaaaataaaaccttatccaaacaggaacaaggagataacaaccaacttaagctctaagaaagatttggaattcggactgaaatgtagttattgtggccttcttttctctcctactcctccatctgtgggcagggggacagaacagttggctttaatgccatggcagggatattggaagaccatgtgtagttcctcttggcagtgagaaacaaacagtgtttggggactgtgtcccaaaaggaaaaatggacactcagctctctcagctctcctgcctggaacacttgggcctttcacaacatctccccagaatactggggatcacaagctcaaagtcacaatcccacacacagtctctagtttaaggctcagtgatagaaggaaggattacatattcagttagtcaaatgatgtgcttgacagtggtgcctgatgatttccattcagctaatttatcacccaatctcaacaggtattcggaagaattcaataattgtgtgtatatggggattataatagaattaggccctcttttaatagatcccaattatttggcataggtttaaaactttaaacagccttccaaaattggttgcttacatttcctgctctttattgcaattacattttggcatttccaacttcccttctctgctctcagctctgaactgcccagaatagaacctgttgtagaagatttgaggatttaacaatatttcacatgaaatatttaagacctacaaaagggcataaagacaaattaaatgagcaccagtgtgcccaccgccccaattaagaattagagcaagcagtgaggtgaagccttgtccttgcttttaacatagaaagtgatccaaattcaccagacttgacttaaggttttgcagtgtggcctcctgattctagacactggcgaaacatttgatgggcaaaatcaatccccttttttccttacataatctgtgtgcaatatgataattaattaaatatgtatttcctgtgccaagatgctgagcaaccaatgggaggctgggactattttctctttctttgaaaagataaatgacttgcaaaattatagaagacatccttttttacattagagggaaaggagatggacaaatgaatgaataaataaatcagaagcaattgatttttttctgcttgcttctacagcttattgcatgtgaatagccaaagcaattttcactgggctaaattctgagtctattttttaaatctctttcatctaaagaaaatagagtttactttagaaatgctgacacatgccagagtctgaaaagtgctagcatgtgttgctctgaagaaaagaagacatttttctacttttttttttttttttttaaattgctgttcttggacttgggatcctttctttcgatggtgggtaggactttcaataatccgttctgagaagctgctcttgttgtttgtgttatacacatctgttctcccagtcctgttgctgggactgtgagggttcctagcctggagggggttttggaagagttgagagggcaaggggaggccctagagaatgagaaaccacaacatttcatacctaaaccacgtgagatgggtctggggtgaagcaagttgtcacaaccaccctcctggatttacagactgtggactaagtatttttttttttttttttagtgaaaatacctaactctgcattctgtgaaagggagagagttgaaatgaggcacagctgaagtttcaccactccattattctgccatcaagcatcccttcagctcccatctctcaaatgctgcagccccatcaatggaaaaaaatacattcatgggaattgcacaaagtttacaacacatgcaaattccaaggagctcagagagaggtgtgggggtgagatggtgtgactacacccccttcttctaggatgcgccgaaggattctttttcttgctcatatgctgttagaaagcctgggcgtttacgtctgctggagctggagctaatgtgatttctaactgtctaataaaattccactgcttgcatgtcctgtgcagttcactatagtggaatctggccagtgtgtgttttggctaaaccagccatcctaaccccagatgtaagggggtcaggctagatgacagttaaggtcatttccggccatgtgattttatcctttggtacaatttgaatagacatctgtcagagctcgtggctgagggctggctaatatgtacagaaaaaaggagttgcaagaaatggactcgtttggtgctaggtatggtgctaggcactttacctacattataccaagtagcaaacctgctcaaaatgctcttatgggaagctccagtctcagtccatgttttacttgcatcgtaagtaataatcacagggggttctggtaagggtggctctccaggctctccagatgcttaaatcaaagcacaattagcccaggtaacagaggcataaacagcaatgtaattctcacctgtgcaaatgatggtttcctgctgtgcccatttgttagtatttcttcccttcatatgatgtaatttgcatattatttcttattctttctaataatgtggcaatgccccatgattcacaggcttaccgatgagagacggtcggcgcctgacctggggactgataggttcttcttcccatgccttgcacctaggtgtcatgctcacctgggagagttcttcagcatctaaaccaacaacagcaataacaagtaggcccattggtatgtttggatcaccaaactgtttctccaacaaaatacagaggatacaaaggaataggaatgatttttgcaacacgtacctcacaaatgatgcagataagtcaagttctggagggattgcatattgtggaagcagaagagcagggaacaggaggcaccctgtttctttctgcagccacaggctgaaaggggtcagtcttctctgtgggactcaacagatagaggagaaagagcacagccttaggagtccttcagacctggattgaaatcctggctctagtgtttagtagcttagagcctcagatttctcacccacaacacagggataatggttcctatggtaggtgctaggccaggattgtcataagaacagtgctttggtacagtgccctcgcatgtaagagatgatcagtaaatatcatgaagccttggagacctgagggcagagaggttggcatagctctacccagtgcccttgaagaagcatctggcaggctattcagggaaactgttcaaggacaggtttctgacgctggggtgggacatgttcacaagggccaagaacagagccaggtaccaaagaggcgacttaacagagtaatctatctggcagggactgtgcgattgctttctgcacagttcaggccttgcctcagttttgcctattgtcactccatttattccttatcctctcccaagtaaagtaattcctggaaggacattctctagcatccctgagccactcatttgcattccgtggcccttaatgctagaggcttctccttgtcagagcctgggcttgtcccatccctgcttagtgtggaccatagcatgtggtccccatcctctcaccagcccttgggtaaaaggcctttaaatatttgaagacagtttttcaatatctcttttttcaggctgaatcaatcaaatcccttaacctttcagaagggatattttagaaatcttaactcaactttgcaacctcttctggacttttttcaagttgcacaggcagacgtgatcaaaccagcttcgcttggttctgaaataataacatgtgtgtagagctcttagctttaccaagtgcccagcagtattacctccatgtgggagatggtgaaattgagaggtcagatgatgtgctccaggccaaaaggttgattatgagaccctgctgggtccagaccccaggccacaatccaggtcctgcttccattcatggccccagtaatgagtttgccacatggcagtgattccccactccacccctggttcgatctttttattttagttctcttcttcagaaagctttttatagaaatataaagccaaagttcttagctttgaatccaaaggtgaccagagtctccttcataaataagcagatcccttttccactgtgttagaaataaaagctcttttggtccgagctcaaggttggatccttctcaggttgtctgtaatgtggatccatggctaagtcttggtctgaaactagacctgactcaaatcccagcaggttaataattcttcctactgacctgccctccttgctagagatgttagttttgtatgtgaagactctgagtccatagcaggcattagagcagtacctccagggctgaaatcaaagtgaaaggggtttttctcttgaaactctgtcttagccagtgggcaggatacatatcgacgggttctctcagattcaagccccactggagcttcaattcataagaattttacctcttttcttctaaattctacgttaataatccaatgtcttctagttagtagaaaattaaaaagaaccattcattcaaatgaccaatagttagcaattcattttttttttctttttttgagacggagtcttgctctgtcgcccaggctggagtgtggcagcaggatctcggcttactgcaacctttgcctcctgggttcaagtgattatcctgcctcagcctcctgagtagctgggactacaggcatgcaccaccatgcctggttaatttttgtatttttagtagagacagggttttgccatgttggccaggctggtctcgaactcctgacttcatgtgacccacccacctcggcctcccaaagtgctgggattacaggtgtgagtcactgcatccaggctaccagtgcatttcaacaaatgtgcccagctttgtgtctgtgctgggtttggggaatggagagtggagaaggaagtagaaaatgggagatggcattcacaagaagtgtaaaacccctttgccttcaaggagcttgcaattcaattaggcaccctagacttgcaggatgaaagcattagagaacaatgcaaagcattgtgtgtttgattaggtgttaccaagagttctccaagtaggaataagtcgggaccagaataacccaggaaaacttcaagaaagaggcaaggcttgggttggaaaggaaaggataggcaggctggattggcagggaagaagtggagagaccattgtgagtggagggaatcatgtcatcattatcaaagacagctttgaagctcttattttcggggatggctggatagacaggataagttaaatagatgcagtgtgagctctctaggagcatccaaacaaaggcagtcgtcagtattgcaggcagaaattttcatgctatgcaagcaagaaaatgaaatgccttaaatgtttaaactgtctgaagattgaaggcagttccttctgggtgtgacttctgggtcaagtctttctctcaccatgacctacaatgggaaggagtgttctaggtcaagtttggtcaagtctgggacactgggcagagcacattttacaactatgacactgaggcatttagaagatcaagcccaggtacaggcatcccatcgtggtctttgtggtctcttttctcgcttagcaacctcatagagtcccatagcaatccttctgccatcctcagcattctcttcctctccatcctttcaaaagtgccccaaaatcaagcccagatactcccacgctttctcttttcaaattctcttcagtctttaataagaaatgtcacttgagaggttaaggagagcctccagcttcccaaacaggggacctcaaagccagacaccagctccaaggtgctgatcaggctccctcacatgttgtgccttacgcaataagatcctgatcctgttcaccacacagactccctagacatgcatggacatgtcaaatcccctggcagtgcacggagcccagaaaacaacaaaataacaaaatccagatgttcaacaacattgatcttacaatatgcaccccacgttaccacaccccaccccggcataacttcttcctgtggctgattctcagacccagggagcaagcctctgtgtcttgggatttttggctctatttttggtcctgatggaataaattcttgttcccagaagtgactatatgcaccagatgagaccaaggggatcagctggaaaacagtgagcaccaagcccccatcaaggagtttataatgtcacaaagagacatcgctaagatgcttgatgagacataagccaagaaaccctcatttccttccaaatagcctctagatgcacagcagtgcctctgaaatgaatcacccatggttaacaacgccaaatgccaaccattagcagatgagaaacagaactgaatcttgagtgtttggagagcagagctcttttgatcacaactagagcctccttcccctctgccattacaggagcgtagatatatatttccttttgactggtgtgcctgtcttaccaataaaataattgaaggaagaatagttacagtgaagaaataagcttattggaaaggtggatttctaatagatccttggtcaagaagtgggtcccacatgacctctagttctatctccgttgtcttgctgtgtatcatttctgtgtcctataaagaagattgtttctggaaattcctgtttgcagctgagatcatactggcccaaaatgggttctaatttaatcatttattgttgttgatgtcttcatgatttggcttaaaagaaagggtatttccattcatttaacctaatttagagttgtctgtctttcaggacctattactttattcttttatccagttgaaaatggccagtgctaacagttttattgattttccttattacctagctttgttgaaacatgcatgttttcacaagcaagtgcattcaccatttttaatcgagctgttgacactggggcttttatcttcctcctttatttaaacctttggtgtgagctcataggggccagtgtaggggtgtacatgtgcccaagtgcacacaggtgagaatgagtgtctctgaatcacctattctgtctccccctcatcctccatttcttcagttggaagcatcatttatttgcttatctaatatatacgaggccctggggatgtagagctaatgaacacagtgcctgctgtcaggaagctcatgctctgctagaaggaggcaagcaatagaccagtaagcatcatcgtgtgctttagctgttgggtagctactggtagggcagggtgctgtgggaccaccaaggagcctcccttctgtttgcaggctctgctgtgagtaggcagtcagtaaatgacagccacaaacacttccacgtgatcactgatccacatggcaaccctgaaatgcaggtaccaacagttatcctctttccttggttgaggaaatagtgccacggcccactgaagattcatttgaacaggagataaaataaagagggactagtatttgattgaccacaatttgaacttttcaggaagacatgtgatgtatacattgactcattcaacctatggctgttaggcactttctgtatgctagttactcttctcagaactgggggcacagaagtgaataatagaaacagaaattcctgccctcatggggcttacattcaagtggatatgcttgtgtgtgtttgggaggggtatgtgtgtgtgtttgcaggttgtctatgcaaggatacacagcagattgagaacagtggctgtctctggggaaaggaaagggaaaatttggaaaggatgagacatttcttgtcaagcttattattttgtttttctttcccatgtatgtgcatgagctattaatttttttattacttagaaattgtgaaaaaaaattgaattatatagaaatgtgaccattcccattcacagagtgacttgcccatggccagaggctacaagaggctccagcaaaccctgccagagaggagtgactcactgaatccacagaccacgtctaatggcagggaactccacaaagaatgctctccgttcatttattgcttgatagacacctctaatgtataaagggctatgttgaaatttaggattccctcgggctatgcctgtcaccgaggactgagtgctcctgccatggagaggcaggtgggccaggtggcctgggctcccgcaaaatgggtgaggcaagaccccctcagagcagtaactccaggaaccacttgcctccacctgccagccctgcctgcacctcgctggacagacaatcccactgtggcgtttctgatggcagcattttccggcatttagcctccgctggtacttgtcccaaacttggtcatctccccagacagagtgctttcattagctctgcccttctacccagctaagtagggcaagtcagctgccgatggtcatacctactttccaaacattcaagtttgtgtgtttcctgatattgaaaatagtggtgatgtttagttcaaagggagaaatgttctctgcaacaaaaacccgtgacctctactattagccaagtgtgaatttgttttaaactgtttaaaacagttaactcaagggaagttaaatttactttcaggtgtatccatctgttattgggttctgcattgtagttcctgctccataattagttaattacttgattgaccgattcattcaacagatgtaaactgagagtctattgcctgcgcaggcaccatgctaagagctaaacaaacaaagatgaaaaagacataggtcctgccctctaggagctctcaagccaggagatgtccagcaacaagtcatttactctacttgggtcccactggcctgctctgtacacggagaggggtgatactcagggcttcttctagctctatagttctgagtcaaaaccaagagaggtttgcatacagctgggcacctggaagggggaagtgggagataataaaaatgttcaagccagatctcaatgcagaaattattttatttaagtctaaatggatctgccaggtaggttttatcatccctcttttacatattggaaaagtgaggcttgaagagcttaagaatgtgaattgcctggaaaacctgtaaaaatggagattctgactcaggcagcccaggatgggggctgagattctgcattgctaaccagctcccaggagatgtctgtgctgctggtccctgaaccgcacttggagtagcaggagactggaagccttgagatattccgcctctgaaccatgctgagcaggcaccagttcctacttgatggaaaactaagaaggaaatgtgcagatttttctttctcgagtcccgatcacttagtccttctcaaaatcaatgcctttgaatccttttctgtttggaatcttctccctccccattctcctttcttatggggaaaggagttgagaaggcatcagtgttgttagagagctgggaaatgcccaggccttggttttttcattctggctttcatagtttgcagtttccattctgagaaggtcaaaatggacaacatcagtgttcttccaagatgagaacaagaagcaattataccaggaaaacaaagcactaagtaacccttttaaaagcaaccagtcaggatattgaattttttgtttttgtgtttgtttttctataaatatcctgaagtattgagtggtgcctgaatttgatcccactgtgctaattttttcctggttcctggggctttaattaaaataactcacccagggaccttgctagaacttacctctatgtgatctcccctgaggtaggcaggtcgcacctgctttttatggaaggggaaatgcagagttctggattaggtgctgcgtacacagtaggggcataatttttacttgctggataaatgaatgcatgactaaatgaaaataacaggaaaaactgtcacttctaaaggaaactactgagataaacaaggtgtttggcctgactttgctttggataatcggttctttcatattccactgtacaatcaatttcatgagtgggcatggatctgaatgtttaagcttactgtatcggatacttactagggactttccaatgccactcagggcccgcatgcacaccaagtcctcagttataaaaccctgtcctctccctgtttatttagctacttctttattctcaagtttgccacctcctgggagccttcccacacacgggcccatcccaccagcattcccctggttcatgacactggatttgccccccacactcctctgtgtctttctatacaaccatgtactcacatatttatattgtacctataattggagtccaggttgtgccctgcttgccccatctaagggcacaagtcattcaagggcagaggttcctgtactggtccagaactgagacctggcccggtgcagtgtggctccctgttggccttgcaatgtggcattgctgagccgggagcaccatcctaccattctgactacacaaaacaagtatggggacaaggactgtccctgtacttggggcctcttggtccagtggggaaccagacctagagacagatcaccaaaacccagtgtgaaacaggttaccatagggaggcatggattaagtctatgagggtcttgcttattccagggcctcaatagccctgggcacaagacccccaactggctacgctgaattagcattaggtggcatcatgatgaggtatagtgggaggaatccttgtattaaaataagaagcttggattctgttcctagctgctactaaccagcctattgaaggtaaacaaatcgttgggtatttctgaccttcaacaggattgcaaggaaagcattaagaggcgatggttaagccaatgctcaggattttgaattctcagattgaagactttccgaatacgggcgtgagtccatgagaaagtttcctaatctctccttacacttaccaccagggagccagacccaattattcttggccaaagaacaggagccttaatattaatagtagatgagacctggtaggtgtcttagaaacttaaaatgtggccaagtggaatagagagagaacttattctgtggctcctcttgcagctttgggatgacaagggttacaaggagttatagggaggcagatttcagcttagtttaatgtatggaaaaagtctccaataagcagagctcaccagcagttaaatatactcaaacagtaagtagggagctctccatctctggaggtattcaaggagagaccaaatgagcattttgaaatatcgtagaacaaatttatatattagctagagggctgtattggataattgcagttcttttttctggttttgatgaaccagtgtttccatttgttctattacaagactgttcttctaatgatcttttgtaagatctggatgtgacaagtaacttccataaatatatacaagtggaggctgataaggcagtgtttattttactttttaaaaatccaaggcttacactgtaagaaggtagagaaaaagagtgtatgaaataaaggaaaagggaaaaagttggatcttagcaggtatttacagaatgcttaaaaatcttacaaatttaggcaaaaatggaaatgttaaaatttgaaccttgttcccaaagaactagggaagctccctatttgaatgaacccccaattgtgtgaacccttcctaagaagagtttttagaagtgaaaaagtctgtaacatcaggatttgctccttaatgtctctctcgtgtagctgcacatgtggagtttgttaaaacacagtgcatcggtgtgtgtctgggaacaggtccatctgggagaaagggaaatggcaacacaagcccttgactttaggggaaacatcctttcatcgtgcttgcttgtgtgtcctgtgaagtaaggattttctcctcaaacttaggagttttgtctggaagccacaggagtagaaagagactgaggtttctttgagaagaatttagcttcttaacttgagaaggggttttgttttgggtagaaagcttctcactgcagtgggtgatgtattgccataaatgggctgaacaatgttttgcccctgtgaggaggggcacaataaggctgttgactgctgcccctaacactgacctaccttctgtctttgcttgagattttgccttcagggttttcatgatgatgatggtttgaagtctccgtgtgcattaaaaggcgaaccctcccttccctcaacaaacaaaaacaaaacccttatagaaagatggaatcctaagcctttctttcttttaaaaaaatttttttaaaaaattataatcgatacataataattgcatgtatttctgggatacaatgtattgtgtatatttctggggtttcaatgcatgtgtacatagtatagtgatcaactcaaggcaattaccatatccccctctctaaacatttatcatttgtttgtttctttttctttttttttgagatagagtcttactctgtcacccaggctggagtgcagtggcacagtctccgctcactgcagcctctgcctctcaggttcgagtaattctcgtgcctcagcctcccgagtagctgggattacaggcatctgccaccacacccggttaacttttatatttttggtagagacggattttcaccatgttggtcaggctagtctcgaactcctgacctcaagtgatccacccacctcggcctcccagagttcttggattacaggcgtgagccatgtgcctggcgcatttatcatttcttcctgttaatagcattcaaggttctctcttctagctctcttgatatatacgacacattgttatttgctgtagtcatgctactgtataatagaacaggaaaacttattcttcctgtctaactgtaactttgtacccatcgaccaacttccctccatcccccctgacttctattttccccagcctctggtagccactattttactctcttcttctatgagatcaactttttaagattccacctatgagtgagatcatgcagtgtttgtctttctgtgcctggcttatttcacttaacataatgtgctccaggttcatcatgttgctgcaagtgacaggatttcattatgttttatggctgaataatattccattgtgctgatgtaccacattttctttgtccattcatcatcagatgggaatttaggttgattccatatcttggctgttgtgaatagtgctgcagtaaatgtgagtgtgcagatgtctctttgacatttgatttcatttcttttggatatatacccagtagtgggattgctggatcatatggtagttctattttaattttgtgaagagcttttgtactgctttccatagtggctgtactaataaaggaccaactgctaggtttgtaggcagctggttccctaagttgcacgtgatgctttctaaaaatgcttctggaagtcaaaggagtgaaagttgaataattcagttgaacattattatggaggattccattaccagaaaactaaaatgcattacaaaatcccctcactatgtctcattgttcagaaacaatttctggtaatatttccagcagtttgttctttaagagagtttttaaaaaatgttcacgtgatcatctgggcagcctgtcaacctgcttaagttctggaagggcccagctgaggctaaagctttgacgatgtgccctattagcctctatactctgaagtagatctatcgctctcatcacaagggccaacattttaatttttttctaattcattgtttcgatggattgattggtttgtttatttatttattttggagatgaggtcttgctgtgttgcccatactggtcttgaactcctgagctcaagcaatctgcctgccttggcctcccaaagtgctgggattacaggcatgagccaccacacccagcattttgattttttttttttaaagggtaggaggcaataaagtattcaaataattgtacaaactctttaggatctaagctctatcggggcagggactgtgtttattttcatctctgctgtaccttcatgacctaaaacagtgccaggatacagtagtccttaggaaatatttgttaaatgattaaggaatggccgttgtaaatggtgccaggtaaaaatggcaaagctgtggaggtggctgagttgcttggctggcagaaagcatcctgtgacacgtgaccgccagctgacggctgagcgtccacgtgtggcctgtgtgctgtttgaaggctgaagggatgaaaatcaagaactgcctgtaataggtgggtttgagtcaccagggtcattggcagagtggctggagcttagaagacagacttcacctgcttaattacagatgttgctcaggccactcaacctctccctgcctgtaacgatggcccttctagccgcgacactaccaggccaactagaaacacctggctctgcctggagaagaacctattttgcttttatttttaatttttttaaacataaatcaaaccagcgtcttttggatttaacattcacttcctgtactgcatgaggccttcgtcagccttctttgttttagaaatgatggggtttttttttgacttaagaaaaaaataccctctgtgatttgtttcccttgaatcaatctgtcttttggacttaatttaaatcagacttaccctccctcccttccactatttttatgctgaacttatattgtatatcatgggtcatatgtccctatgatccagctttaaaataagtgtatggccagtgcctttcagcccctgggcacccttcactgactttgtctttgccattttttcccccaatgggggaaagattttgtaaatatcttaaattttgtattattttcttgcatttctttatgattttagcacctaaatgtatgctttcccaagtaatgtattgttttgttttacctgcttttgagctttacttaaatagtatcaggccgggtgcggtggctcatacctgtaatcccagcactttgggaggccaaggcgggcggatcacttgaggtcaggagtttgagaccagcctggccaacatggtgaaaccccacctctactaaaaatacaaaaattagccgggcatggtggtgggtgcctgtaatcccagctacttgggaggctgaggcgggagaatcacttgaacccaggaggcagaggttacagtgagccaaggtcagggcgttgtattccagcctgggcaacagagcaggactccatctctaaataaataaataaataaataaataaataaataaataaataaataaataaaatagtatcatcctatgtttcattcaacattctacttttgagattcatccatattgatgtgtgtgtggctgcagttcgtttttttattgctgtatattattccattatattaatatatcaaaattaatttatccattcttctattcctagacgttgggattactttcaagttttttctattaaggacaatagtatattatgggggtgtccttgtatctatctatagtttctctagattatttacccaggcatggtaaatgatggttcaacagatacgtgcacattcggctttgctaggtaataagttgttttccaaagtgattttaccagttgatgccgccaccagacatgtttgcaatatccaattgttttttatcttcatgaatatttggtattatcagacttttaagtttctaccagtatggtgggtgatatgccattatagttttaatttatatttatctgattattcgtgatgttgagaatctttttatgtgtttttgacctttcctcaaaaatgtctgttcactcccttagtgcatttttctgttgtttttgtctatttcttagtgcttcagaggcagtcatgtattgcaatatcttcccctcatttgtagataatcttttcattctatggttatctgatacatagatatccaaagaatgaaacttggtggatcttgaacaaatcatgtcacatatctgggcttccaaatatgtttctgcttgggccaatgagtatactgatgcattctcaccctgctaactcaataggtggcagtggcaaaatgagctgatgtgcatgaaagctcattttgaaagtgaagcaccacacacttgtataatgtagaaagtctagttttctttctatcgtcctactgcctccatttttatacataatatacttcctggaaatcttttttgttactggagctgcttttatttcattgtacttttagtgccttattaaactagtatcagtttgtttactaattatccgtttgcccctctagaatgtaagctcccgaggacaagaatcttatctaagttgtttatcattgtatccccagcaagctggaatagtgcctggcatacagtacctgctcagtaagtatttgtttaatgaatgactgaatcagaggtgttaatagtagccatgttatcattgccacgtaatcacccaaatgctgtgtttaggggttgctccttgttcagataacttgcaaacttacatagtgtactgatccatgtaactctggccttctccttttcagagaggatgggtggagtcagaggaagggaattgtgcctttgggagctgaggttttagacttgtagctggggccccctgatgggctggcactcctctgaaggcagatttctagggtgagaacagaatttcccaggccattttctttgcccttctgtatggttgctgtcaagtttactgctttttcaaaccctgttagcttttgctttgttactataggaacaagagctggtagtctgggggaaatatatgtgcatgtgagtgctggggagggggtgtagtggctgtggtggctgtggactgaagggagtgaggacagcagaagatgttcaccgctgaagtctctctgggggccctgcccactttggccagtgctctcttcagagagtttttgactttgcatggtacactcttggggaacaggcatccctttgtagatctgcagcactctcctggcacccatccagtccttcagtggaacatctggaaagcctcggcccctccccatgccaaagccactgagccctggagacagagatcaatgacctcttctttgctgctccttaacccgtgtcccagacaagtgtttttctgggaaccagtgaataacgcagatctttgatgccagcgcttgtgtgctgttgcagtaacactttcacttttgatgatagggtgggggcagaggaagggcctcggtagggagagcaacgagaatttggcttttcaggaaatcagaactcaagtggggaggcttgcttcctactcactggttttctggctgggaaaacagcaggctgagccattgcctgatgtgaatgctccttcgtgctggggctggtattaggggtaggggtgggcttgaggctagagactaatttggttctaacctccacaggcaatccttgtaactcctgggagataatgctgaaaaagtgcatggtgatttttcatgcatgtagtttataacacactgagttatgctgaacacagtgaaaagaacttacgatatataatagattgggggtaaatatgctatgtaattacctgctctgcagtaatgttttacaacccatgtattaggttgcatatctaacagttatcaaaaatatatacattatatatacatacaatagcaaaaaaatatagagtagaaatgcccttagcccattcttcaataaatacctcttcgcatgaggcttcaggtccccaagactggcttattttcagtgttactaaaataaattttcttttattctcccttctctcttgcacattgtaggtactcactaaatgccatttgaactgttggcgagaatgaaactagagttttccttgacccagaaactgctgtaggtttacttcactgatgaacctgcctaggtagtgcacaaagtgccaggtcaaaacagcagaatattgaaggcaaggtaaatgtttacagctgaagggcactggtaactcctataatggagtaattaacaaccattataaagttttaggtttatttttatatattaatgaagagaggttttgaaaataaatggttaagtaaaaaaagtaagttggaatagtagctatactgtgatcccatttgtgtgaaaatgaggaaagaaacacaaaaacatacgccagcatagtgtacacacacacaaatttacctctgaaaagtggagatggggaccaagggacttatgctccccacgtagccttttaactcattaacatttttgctgtgagtttatatgtatgtaaaacaataactgccctggagaatggtcttaggtactaccccgccaccctagtgtaacctttcttcttgtatacacacacacacacacacacacacacacacacacacacacacacagtatttcaaatctgttactctgaattcttcattgtgttccttcctggtttaccaggactacttccatttccctccaacagtctgcctcctcctcatccgtccaggtctcaccacctccatgtcacctcctggatccctctccagtggaacttggccttctttgaagagccacagaacttcctggtcataccacctagtggtgcattaggccggagattgttccatcttttttcttggtgtcagctcctctaaccagactgtcagaagtgagcatggtactgtgtacaagaatgcatcaggcattgcctacctgtgcagtcagaggggtaggggattctttggctggatcttctggttttctgtgtccctggagctgggctcagtcactaacttctgcacttctgggaaaccaattgccaagttaccctacagatcacgggaaccaggtcacaatgcgcagggctttggggattgctaggactcagagcaggcagcttattaccaaaagtcagctctattctgctccccaaggctgtgtgtgtttatatgtgtgtggtgtgtgtacatacatgcatgcaaatgtgtacacacatgcacccataatcacctgcgcagggtgcccctaggctcaaagcttcgcaggggctgcattcacattgaaaacttagggaccctgtgccccagatcagggccttctggctgagatccattttgaaaaacagccttactcactctctaatctactccctggtgtctccaccccctctacttgctgtggccccactgctggaggagaagagagcagttggggacaatatgtgtggtttgagggactggggggttgtgggagagggaagctgaacccacagtttgtcctgttagtgtgtgcttgcggttcctggaagttgggtatgcagaattaggctactcatttcctggcagctcatagcctccagtctagaccctactgtctagggtctaggatactttggtaggaagatcttgactcttcaggaaaatggaaggtctcagggccacccactgtgttgcctatataatgtagcccttggtatctcctacataaaggtaggaaaactcttttgtaccctcaaagggcttaaaatttagtcttagagacaggcttgtctgcaaacacaataccagggtaaaatagcacttgcaaagtcccaaaggctgctccgtgatgaatcaggaccccaaacagctctacctgcaagggccagagtggtgcctgccttccctccctcccttcttcttgccctaccttccttgtttgttaggtgctcacgggccaaccctggggatgcaaagaggagtcacaggcagtccctactctcaaggagttcatgttttagtagtagaaataggcgtttaagcagagtaagtgcaatccagtgccacagatttaggagctcattctgttcaggatgcattgaggcttaacagatgacctggccagctcttcctggctcggaatacggcttgcaagcagagatggctcttttttgctagggggaggacaagtggtcatgatagcaggcttcatctgggtgtgtaggagatgagctctcagggtgggaagggctaagctagacagtagggacgggaatggtgcgcctggctgcactggagagtctaaaagggggcattgcatcctgctgggcagcagacggcccaattcaaaggccatagaggttgcaagtctgaccctgccattggtgtcctagactagctctcacttttccaggtttcaatttccttgtttgtagaatggcaatagtaaaactgcccttcctacagctacttttttgtagaggaggaatctgaggctctggtttaactggttggagagaatgccaggattcagcctgggtgtgaatccttctacccctcaaagagcgtcattctgctctctctggctgctccccacagcagaatggataccctcaacatcagtcccattggcctagggggcctcaatcttctgatattgcatgcaaaattttctgtacgttctgggaacgcattttaagggacgaaggttcatggctttgctccagctctcagaagaaggcaagacctcagaaagcctaacaataactgccctggagaatggtcttaagtcctaccacaccaccctcatgtaacctttcttcttatccttcaacatttttaggaacaatagactgtcctaagtagttatttttcacttgaaagaaacataaaacattgtaatagaaatatttttttaatgtaaacataattgccttcttaatgtactgagaatgaactgaatgaacacaacttaagggcttaatgtcttacacatttttatgaacatcggttattggtttgtgctcttctgaagagtatagggagcataggatttattcccataccaagggatcccaggttgcttgctttcttctttaattcctccccaaccattcctatggattataaagagatatttcatgtataattgtttgcgtgggagcccgaggatgacttcagcttctcttttgaggtagagtacttgctttcataatcatctcttgctgcttggagctctggattcatagcaatatggagctgtgtttcaggcttcagagcagggggcctcgaacttgagaatacatcaacatcacctgcagggccagttacagcttgctgggctccaccttcacaatttctgattctggcgttctggggtgaagccgaaaatttacattcctaagttctcaggtaacctgagacctctggtcgtaagaccaagttttgagaagctctgttttagagtaggacatctcaaactttattgtccatataagttacctggggaacttgttaaaatgcggattctgaatcagaaaatctggggtggtgcctgagattctgcttttctaaccagctcctaggcgatgccagttctgctagtctgtggaacaggctttatgtagaaagacttgaaagcagtgattctcaaccctctttaatcaattggaattctcaacctattttaatcacatgaggaacttgtggcaaaaggaggaggaggaggagaaaaaaagagtcatacccccaaatagatgataaatcagaatctcagagggtagggcttggacataggtatagctccccaggtgatttgaatgtgcactcaaggttgagaatatctctcttaaggttgtgtggctgctggaaagtctgtcctctaaataaatggaggatcgtagtcttgaatagtgctatgtgttgaatatgtcccctccaaaattcagatgttgtgcatgtgatagtattaagcgctggggttttgaagagattattaagccgtgagagagactcgcttgtgaatgaaaagaaggaccttgtaacagaagctccatcagcattcagcctgcttgcctttccaacatgtgaggctgctgtgcttctcccctgtggagtctcacaatattggaagcagagagcagccctcatcaaacaactgaacctgccagtgccctgatcttggacttctcagcctgcagaactctgagaaaataagtttcttcttcttcttcttttttttttttttttttttgagacgagttctcactctgtcatccaggcaggagtgcagtgatacaattaaaattcactgcagcctcaacctcacaggctcaagtgatcctactgcttcagcctcccaagtagctgagaccacaggtgcatgccaccacacccagctgatttatcttcatattttgtagagacacagtttccctgtgttgcccaggctggtctcgaacttctggggttgagagaccctctctcctcaacctcccaaagtgctgggattacaggcatgagccaccgtgcccagcagttcgttttctttataaattacccagtcccagatattttgttacagcagcacaaatgggctaaaacagcagttcattgctttccacctggggttttacatgtgaatcatctggaaggctttaaaagatatgggtgagataatatgtctgggattttctttttatttatttaattaattaattaattgatttttatttatttattttgagatggaatctcgctctgttaccgaggctggaatgcagtggcacgatctcagctcactgcaagctcccgctcctgggttcatgccattctcctgcctcagcctcccgagtagctgggactacaggcgccggccaccatgcctggctaattttttgtatttttagtagagacggggtttcaccgtgttagccaggatggtcttgatctccagacctcgtgatccacccgccttggcctaccaaagtgctggaattacaggcatgagccaccacgccctgcctgggattttcttcagactaacaatggcggggaagcaggcgacggtgttaatctgcgttgttcaggatgtagccactagccacctgtggctatttacgttaattaaaacttaaaaaattaaattcagttcccctgtgacaccagccacatttcaagtgctcaatagtcaacatgcgtccaggggctgccatactgcacagtgcagatctagcacatttacatcattgtggaaaattctattggccagcactggcacatgaaataacattggctatgcgttaataattgttgaagctgggtgattggagctcttggggttcattatcctttattgtctaccttcatatgtctttaacttttaccatgatagactatttaaaaaagatgcacaggtcccactccagaccagctaaatcagaatccttaggggtggggtccaggcctctgttgtttcagcagctccccaaggtgcctctaacatgtagtcagagttgagcctcactgggctgaataggtgtgctgaagaatgattgtcctgcttgcctctcagacgtgtagcaaaatccagacagaaaaacagtagaaaaggcattggaaagtgtcaagcaccaaatgcacctaagaggtttgttgctttttcttgttctgagccttgctactgaggccttggaatagggtcgccaggattagcaaacaaaaacctgggaggcacaattaaattcgaacttgagacaaactgaataatttttaaacttttaaagtataagtatattccatgcaagatttgggatataagtaaatatactacaaggttatttgtattttacctggcaaccctatgttggagcctccttccctgctgcagccaacaggggtagaggatctgagctgcttatttgtaactgaaagtccatgggactgcttttatttgggggaatttttctgttaactgtcattatgaaagtgatcacgatgagagattcagatttatttttaaaattcggtggaggaatatctcctcattgatttagatctttgatttttttcatcagaggttttgttttcctgctatagattttgcatatcttttgttagatttatacctgagggttttgtctttttggagtgtgtgtgtgtgcacgtgtgtgctaatgtgtttttaagttcaaatttattgctggcatatagcagttgatttttgtatattatccttgtgaaaggagcaaaagacctgatggagctgttgtttgggggcctttcatcctacctcatcacttctgcaggacagccccttgggaagcccccaggtcacttgttttggggctcctgaacgtctcactagttggccacaggaagtccacttgaagtttttaaaaagagggcgtatcattgttttgatgcctcattcccgccaggtttttctatggccccacatggtcacagcttttgaactgctttttgctttttggctgcattgttctccgtgagtggtgggttcagtcctggcttcatactgaaatatctgcaaagttttaaaaacaaacaaacaaacaaaaaacaaacaaacaaaaacacccatgcctggtctggttggggggtgtaacggagcttttttttttttttttttttttgttctccaggtgattctacagcccagcttgggttaagaacatcttccctaaagtctcaaacaccaaaatcccctttcctgtccaaaaaaaaaaaaaaaaaaaaaaactttttagggcagttagtccatcttaggtaaggaaggaaggaaaactgattaaatgaatgtacactaaggtataagtagttgctagcccaactctcctgagcccctttttccctcctgccacaggcacctgccaccacgcctggctaatttttgtatttttagtagagacggagtttccccatgttggccaggctggtcttgaactcctgacctcaggtgatctgcccgcctcagcctcccaaaatactgggattataggcgtgagccaccatgcctggctgatttttgtcttttaaatagctggtagggctgggcacagtggctcatgcctgtaattccagcactttgggaggcaggccgaggtgggcggatcgtctgaggtcaggagttcaagaccagcctggccaacatggggaaaccccatctctactaaaaatacaaaaaataaaataaaataaaataaaaataaccaggcatggtggtgcatgcctgtaatcccagctacttgggaggctgagacagaagaatctcttgaatctgggaggcagaggttgcagtgagccaagatcgtgccactgcactccagcctgagtgacagagcaacatcctgtctcaaaaaaaaaaaaaaaagaaaaaagaaagaaaacgtaaataaataagtagctggtagaatttccagctgtgtggtttaagctgcgtggtcaggcaaagaaaaaaagttcatttggtgcatgggttttcttgactttctaggttctttgtgataggtgatctactttttagctgaatttaggagctgatagaaatatttgagaaacaatctgtaaaatatttggctaaatacttcaaatttaaaaatcagtaacttgatattaatgactgaagattcatgaatagctttagaagaatgcagcttgtactaaatgttagccactattgttattatccttatgaccaagatactgtgcattccggccatatcttcagggaagagaggattacatgagggaatccattctctgtcctggttaaaactgtttgtgacactgctagtaatcgctcataacaatgaaagtcacaaaatattgctaacgatggtaacaaacacaaaatctaccatttatttagcacctattacacgccaggcactgtgctgagcctttcacacatgctacctgttttttcccctcatagcaaccctatgtgaggtagggacaactcttcttcctattgtcctgagcatagagaggttgagctcactaagggagcacacctagtaagctggcttcaaatccccctgggctgtctggccccaaggtctgttacatttttctttttgtttttgtttttgtttctctctctctttttttttttttttttttgagttggtgtctcactctgtcacccaggctggagtgcagtggcatgatctaggctcactgcaacgtccacctcctgggttcaagcaattctcctggctcagcctcccgagtagctgggactacaggtgcacgccaccacgcccagctaattgttgtatttttagtagagacggggtttcaccatattggccaggctggtcttgaactcctgacctcctggtctgtccacctcggcctcccaaagtgctgggattacaggcaagagccactgcgcccggccccattacatttttctatggaggagctcggtgactgaggataaactgctctccttcctggcctgcagtgtccttccctgcaagccaggtcatttggatttgccttcccatcaggcccattgcagctacctctgaagggctcctcacatctgagtcctttcttttaaacagccctcaagtattactctactcactctggggaggaaagtcaggaggactgctggttgactaggttgctagaaatgcagaacccaagacacagagtgcaattcatggagtacttggggtaaggggatcctaggaaaggggtctgaccagccttaaggagaaagatcctgtgtagactcagctattagcagcacgctccagtgtttgtgtgcatgttcgagatgctaacttgttttaaaggtataactggggggagaacctctttatactcagtcattgtattttaacatcagctattgatttgggcacttaagtgatgttctttaatgaaagaattcacattcaggggttttgttgttgttatctctatttctcttgctctctcatcagccatgcagagcagaatttcagcccatttctcttgagcatcatggaatcagtttggaaagtagggagatgtgtgaggtagtcaagggggaagagcctcgtggtcaagggtgtagtttttggagccagacacagtttgttcaaatccagtttctatcggttaccttaagccatgtcatcttgggcagacttctttaatggttctaaatatggatttcctcacttgtgagtgggggtgctaattctctctccttcgcttgtagtggtcaaacgaggtgagtaacgtactgggcacatagtgagcgcttggtgatgacaaagacactagatgtttggagggagtaaaccccagtggaaccaatggcactcggggggaatgggctccccagaagatggtgagtgaatgcccagtcccaacctgtgcccagaagttttggggcaaacagcggggcctggttgtcagggatgtagtggaagagacctctcaaagtagtggttgctccagggaccctgcaaatgcttgtcttctaaagttccagggtgtcctagtcctttcaggactgtggttgcatgtggggactgagagagaaggcacatctgttaaccacagagatggaagcccccttcctcagtgggtggcctggtctgttagtcccaccctgtcaaggggagtctcatttgtgtatggctctggctttgagagcatttcatgctctccctggtgaaaacaaacggaaggtcatgcaggttcacacgtgcaattgcagttggggtccaggatattcatccagaggaagatttaaatgaataaaatgctttacctgttgcggattatgtgctccagggaacctgtggttagataatctggggtcaggggtgaagggggctataaatagttgctccgtggctttgctttctcttgatgaaaatgcaaacttgttttctcagcagcaagagcaataaaaatatcttcagaagagctgtctcttttctttttccctgactcgttgagagcagatgatttagaggtatctctataggagattaaatgggattcaggtaaacagctgaagggtttacatgggattaagttttacaaaccccatcctgagggtatttttctttgcagagatgagggtgcaaagcagcagctttagaagccagaagccaggtcagcggtaaggatttaagggaggaggactgaacttctccacagttccctcctgagactgccccagagaggagagacagccttctttcccccctgccagaaccttccccttacacactgcggagtttgatgtctggggtctgatgacgaagtggagaaaggaggcaacctgaggaacttggagcagctagagcagaactcctgtccccattccacaagtatactgaggacggagttagtgtgacagtaccctatgccaggcaccatgggaggcactggggagataatgtgaacaacagacaaaaagctctgccctcatggaacttacattctggttgaggagatagattgcagatacttgaaaagtcctagttgttaataatttataactgctaaggagggaaaaattaagcaagaaagggtgatatgaactgtagggggtggggatgctgggatgttaggggaacagggagccctttgcgtaactctggaaggaaacaaagtcagccatgcaggaatgaaagaacatcacgttgggcagagaaaacagcaagtgcaaagaccctgcaagcaaagaagtagcctgactggaacagagcatgaggaggcaaagggtggaaacgaggtcagagcggcagcagagagccagctcatgcagggctttgcagatcagttaggactctgaccttggctctgaattaaagctggagtcgtaggagggctctgtgcagaggagtggcctgacctgaggtttaacagcatcattctggctgctgtgtaagaatgggcagcaaggcagaaccagaggtcaattaagagccactgccatgatccaggccagtgatgacagtggcctgaatcagcgtggtggggataagaagtagttaggttttggatatatttgagcgggagagtggaatcttactgacatgccagaagtggattggagatagagaagtcaaggatggctccaaggtatttgttctaagcaactggaaggacagagttggtgttaactgatatgggccagacctcaaggggctggggccatttcaaatttgagatgtctaggagatatccagatgtctggataaatggctgtggtgttggggtgggcatggaggggcagcggcaggctgcagatgtaaattgagtcatgggtatgcaggttgtctctggagctgtgtgctcaaggagagcatgacacctgggagctggaagggtccttagtggctgcctggcacaaatccagcatcttctgaaggggaaagtcaaccacatggaaacaaagggatatacattgagtcagctggaaagtctgaactagagcccaggtctgctaagggcctacccagatatacttctttagagtgttttaaactggagcgatggctctcacatatacacactagactgtcttaatattggacggccacttcctagtcttccagcctaattcctggagtgaagcttaagacagtccatgaactgtctgccactggtcagtagaaaggtaaagcaggaagaccagaaactgagcaaaagcatttagaaattctcatgacaactcctaattgccgcaacatcctaaggcaacatcagtagacttgtcttgttgagcagagaatggaaaagtctgggtgttgttgatgtcacatggtggcttgtttgtggtacaagctgcatacgagtcaggcgtaccaagaccacatagatagtagactgcaaaaaaaaaaaaaaaaaaaaacaaaaaaacctgagtccttcaccacagataggttgagaggtatggccccagcatggtgccttctgagatgaaccttcagcaaacacttgttagacgtaagtgtagaatcctgtattcctttttgtgtttaagatgcaggtactcccctttgccaaatgaagtcagcagtttacctttgctcctttgggcatcccagctgcctcctcactcctcccggagatctttgtctccactctcccatgttccaggagacagcttgtctcttgcctcagtgtcggtgtgttccctgagagcagtcctccctgtgagcctcaacctgtcttaaagtgtgagcccagcagtgtttaccagaggatgcctataaccacccactccgccccaaaaaaaccaactgagtctcttgtcttggcatttcaggccaaggaggagagatattttggtttcacttaggcactgagctattttagaaagaacaggagttctggcaggagacagatcttggacagacgccatttacctttttgaacattttctctgtaaaatggggcagtgttccccacctcatagcaatgtgaggagggttagatgatatagtgctgtaaggtgcccacaagggctggtgctgaagagattgtcaacacaagttctatgaagtcacaccatgtaggtaactttctacttatgaatccagacttaccccaaacttccatctctcacacactcaatcagaggcctatgtgggagtcccttttctcctggttcctcccttcatggccttgtctgcctgcaggaatatttggtcaacatgctggatcccaagttgttgaaccagctgctggtgaagaagggaagtggctgcaggggcttcgtgatgacgctggcctgccctgaacttgtgcctgtcctctggcctcctgtccggccatcctcaggctgagggaggaaagaggctgctgagcctggagtgagctgccagctaccaagaagtccctcccacattttggcagtggctctcccaacttggcaactggcttagaggcaagtgacagccttcccagactccctgcctccttcttgtctcactctctggcttgggtctttagaagagtcacatggggagggtgtggccatggggtgtgtcaaatatccagctcaggtgcaccacctgttttatttcacaacagtgccatcttcatcctagccttcagattcttaattcctggtgattgaaaagcagctggtggcttaggagtccaacaagatgcagcccactgtttccagagaggattcttgcttcctgcttcctgcttgctgctggcacttgatctcagatttcagaatatgccaccaaacagctagcagtggggatatttgggaatgaagtgccttattctacttgcctagttctggcctatttttatttgggggtatagcttacgtctatttggcctacattccaattaggtaagattatcctgtttttctcattacggaaaggggaaatgtagatgtcgacatactaaatatgaagagtgtgtatgtgtagatatacacatacccacattacacacatgcatgcaggaccccaccaggtgcctccagtctccacaggtaccctcagatgctacaggaatagaggttgtgaatggtatgggcatgagtgaccccttttaggcagttccaggtgagactcggagtgaaaatattgcagtgcagtctgggagaagagaaccaaatgaatactttcttgtaaattagtagagaccattatacacttgaacccaaggttcaaccagcaatgttaatggtaaaacttccacagcatatctgatctgtgttagcattttcatctattgccttcaggcatcacaatttaaagcctgctaatgcaatgtccacaaccatactgaagactcttcaagttgggacctgttctggtgtcacatgctaaggaggatgttgaaacatcagagtccagctctggagggaccaggaacaggggtctggaggctttaacagaggagagtctgtggcagagacaccttgcatgtatcaagccctctgggcactgatttacacatatgggaaaggaggcttgtatagaagagggattgagttttttgttgttgttgttgttctgccttgatcaggaagacagtaaagaccagttgggggtaaaatgtaagctcaagatattttgccactactaaactggctgctttgttggggtggtgagctcccatccctggaagtgttcacacaaatgtcaactaatctttcacctaaaaggggctccagcagtgcttgggtggttggactaaatgaatttgtaaactcatcacagacgttttagaaaacaaatgatggatctcctcctacttgaaggttctgagcacttttcctaaagtgctaggcagatgtccagtcctcagaaaatgctaaataactttattaatagtgcagatgacgggttttagaatttcaaagttaagctgatttctgaagaggtttagcagcagtgggaataatcttctatgggggctaaaaatctacatcagcttcccagattttggtctctccatcttgggagtggagaataagaattctcatttctttggacattactgagtacctgtatttaagataataaaatattacagtggctctggtctccctgcttccatctccccttatttcattttctaaacaatcttgcctaagtggttttaaatgaaaatctcgtcaaatcacttcctagtgtaaaatccttcagcatttccccatctgcaaactataaatcacaattcttttatcagaacacaaaccctctgtcatctggcttctctggttctttccaagtcaactccagcttatctttgcctcgcatttcatactccagccacatcacttcccaatgatcccaaatgttctttattatttgtacttaaaagcactagctctttgtatttgtgtttaaatttatagtcttgcaacttgtggtcatacacgttgtctcctgtgcctcctccaatacttttcaaccatttgggggtaaatcccactttttaatttttgcctaaccctgtatagactggtccagcctaccctgcaggcttgatttgggctatatttcccgttaatctttacccctcaccacactgatctcctgtcagttcagcttccccactgctgcgcctttgcagtcactctctcttatgcctggatagctatcttggccagattgacagcttctcattctttatattttacctcatctcttataaacagcatactgttagatttaaaatccagtctgacaatctttgtcttttaactagagtatctagtctatttacatttaatgtaattactgatatatttgggtgtgtagcctaatctggctttttttcttaactttcttgacttcttttgaattgaatttaaattggtttcttcatttactagtttgaaacatgagcattcttgttatccttagtgactactttggaaattaccatttaagtatttatgcctacttataaaattaaagttaaccagaacttttaccttgtttctggataatataaccaccttttattcttgcatggttttatttgtttgtttgtttgttgctagtataggattctaagtagggagttatttcctttgagcaccttaaaggtaacattccactgtctagtatggttgctgttgagaagttagctgtcaatctgttactcttttaaagataaggtcccctcaccccatctctttaagatttttattcttgtctttttgtattttaataataacatatttaggtatggcttcttattttttcttagagttcagtggacttttaaacttacatattatctttcaaaagttcgttatctcttctctctctgggatcctgattaaatatactccatcctcttactctttcttctacgttttctatcttctcctgtattttccatctttttctttccatagtttattctgaataacttctgactgattaagtctctttctgtacctagtgtgatattaaactgttacatcgagtttttaaattatggtacttttagtttttagaagttctatttggttctctataaaatattctaggtcactatgtttcctgcttctaatatatttctaaactttaaaaaaaattctttaatataagtgtggctatttcatagtctgataatgccaacacctgaagtcttttgttgttcttatggttttcagctggttcttgctcatggttccctttgaaactgatccaatagccccacagactgttctttttgattaacataattattcacccttctggtcttaaagcttgaaccttacatttgttttatctgagttccttcctcaggaaaggaccttcacgcctctcaaaatatcaaagaacaggaacttcaccgaatcaccacatccagacaatgagatgctggactcctcattcatcatgattgcatccttgcccttcctcagttcctgtttcttgcacattgttgcttttcttccctgctattataaaccctcagttttagttggtcagggagatggatttgagactgagctcccatctccttggctgcagcacctgattaaagcctatcttccctggcaatgctcatcacctcagtcattggcttgccatgtggcgagcagcagaacctagacgaaacccctggtgtttcggtaacaccttgtttccttgtagacttggttgtctttggactggttcattgtgcttggaaatcttatctggacctgttatgaaggcatcctcctctagtgtttgcatctgcttaggtgcctggtagtccacagccaccttataacaagtttagggcttgaatatctcaagttacaaatctacacaaaggtttatttccagtctactcttatcctgagtctgggcctagtatactcaggggggatgatctttcacttgcgcctcatctttgagcgggctctgatcttttttatctgtcttcctaatcttaaaaaatcttccaaactttagggcaaaagtgactccctgggttctcactgttattcaatttccctagatcttcactactatcttgtctgtattttactgcgttaaagaagatttttaacaattttttctagcattttcaggggttgttatttttagtggtatagttgactcaaataacctactctgccattgccagagctagagttctcacttttttaaaacagcagaataaaaagctttaataccaaagacataataaagaacaatcaatgaaatatgtttagctttaaaagatgcacttatttttctgtctgtttcattagtgtttgctccatttctcctcatgctggcaattgaaaagcaaagtttgctcttgcttttttaaaatcaactttctctctgtggatttgcctattgtagacatctttttaaattgacataaaataattatgatagggacaggacgcagagaaattctagacggaaaagggctgggtccctggtaagggccccaccctcaagcctggaactacggcaaaaagtgagaactttacatcctcgttttcccactcgaatgttgccttttccaaagcaccctggcccaccctgcccctgcatcctacacataaaaaccccaagctccactggcagagagcagagaagggggaaagagaagaagcagctgaatgtcagagagaagcagctcgacttcagagggacggcttgatggcgggacttcgaagaagagtccagccgaggatggccagacttcaggggaagaataccttcctactccatcccctttcccgctccccttcctgctgagagccacttccattggcagtaaaatcccccacatttactatccttcaattcattcatgtgacctgattttttcctggacactggacaagagctcaggatacagaaagctgtcacactgaccgtctccccttgcaaaaaggcagagggtccactgagctattaaacacttaagctgtccccagatggcaaagctaaaagagcactgcctgtaacacatgacctctggggcttcagatgttgcaggtactctccactagatgctgccacagggcccgagtggagttttgctcctgctggcactcaaaagcacttgctctggctcatgaaccctctcacctgcctgctccccctcccacgaggagttgagagctgtgggctgagtaagggaggcactcctgtcacgaggccgtgaaagggtcaagggaaatttcctgtttcaattacgcatattcatagggtactggtgatgttttgatacatctattgtatagtgatcagatcaggataattagcatatccacaatctcaaacacttatttctttgtgttgggaatgttaaatatcctcctcctacctatttgaaattatatattaactatattaattctacagtggtgtagaatactagaatttactcctctaacctagctgtgattttgtatcctttaacaaatctcttccaaaaccctctttcccttacccttcccagtatctagcatcttcttttctactttttacctctaggagatcagcttcttttagcttccacatgagtgagagcatgcagtgtttaacttttctgctcctggcttatttcacttagtgtcctccagttgcatttacgttgctctgcaaatgacaagatttcattcttttttatggctaaagagtgttccgttatgtgtatgcaccacattttctttgtccattaatctgttatcagacaccttggttgattccatatcttggccattgtgtctactgctgcagtaaacctggggagggggatacagatatctctttgatataatggttttctttcctttggataaatgcccattagtagcattgctggattatacggtagctctatttgtagtgtgaggaatggaggactcactttgaatgtcacctcttacaaagagacttggccgagcccaatcttatcttaggtctccttgttttacacttttataaccctatttttttctgcttggcatttacctcaatttgtaattttatgtatatttttgattaagacagtctgtttactccctggacagcagtgtaaaagcagggagtatatgtataccaatgcctcacacagtggctagttcatagtaggtgcacgacaaatatccggcctctaggaaagaatgcagcagagtatttgtatggggattggccagataccaaagactactgtggtttgaatacagtcttattaagaaacactacttgtcactttcgttatcatagatcagtaagtacgaactagatattaaggactcagaacagttcttttaagatttcagggtgtaggccgggcgcggtggctcacgcctgtaatcccagcactttgggaggccgaggcgggcggatcacgaggtcaggagatcgagaccatccgggctaaaacggtgaaaccccgtctctactaaaaatacaaaaaattagctgggcgtagtggcgggcgcctgtagtcccagctacttgggaggctgaggcaggagaatggcgtgaacccgggaggcggagcttgcagtgagccgagatcccgccactgcactccagcctgggcgacagagcgagactccgtctcaaaaaaaaaaaaaaaaaaagatttcagggtgtatttgccttcagagcctgcagctggtatcttaatgagcccaccttctcctgctctgtagtatctgtctggagaagcagagccatgaaattaaggcaatccatatatagaacatgctgtgtctaatttagtcttctacaggctggaaaacaaaggatgagacaagtgttgcaatccaggtggacacatcttaaaacacttagatggacacattttaaatggaatttctaggcctcattaccatttttggatataatggtacttaaatgttatttaagtacccaagtcagaaatttataaatatagtgattgcagttaaaatattttatattcaaagtgcttcataggtccttaatatgcactaaatcatataaaagccaactcttacatagtgcttactattccccaagaaggattttaactatgtgatgtttattctcttaattatctcagcatcattatgtggtaggtgctatagtcatccccatttttacagatgaggaaactaagacccagcacgatggaatgacttgcctaagtcacacaatatgaggtagagccaagttgcaaactcagcccttctggctctgtgtccttaatcttactctttactattgagggaacgagattgaattttaactagctgcccaaggctatccagggctctgtgtagttgtgcaggttagctagaaactagaagctcagtggtagctcgaagacccctggagcatgtggagctctgtgtgttgtcatgacagtagcctaaggagacatttccttgccttccattgggtttatgagctttccaaagcgctgatatgtcaggtctgactggccaggggggaaaggtgtttctgtagaaaggcataaactaagcatgagttaatattttaaaagtttagaaatgaaattaaggtgttataattgttttttctgctttggtgacttgtcttacctacatgttttccttccgatatcatgatgtcatagctaatatgtggcgactgggtttcgagtttcaggttgaggatgccatggtgatatacctccatgtagaagctgtgaagttacagcacctttgttttcatgtcagttgtcttttgatgctgtcctccaagacagctgccgtatctcttgtagccatgtagttctgcatgtgggttgctattaatatttgtacacaagcatcacacgtgggttaatgcaacatccttgctctgatgtccgcagtctcatagtagtctgaagcctcattggatgagttattctgtggtactgggtcctcctccattgctgggattgacaaattcaaagatgtcttggggacatgagttcaactactccaaagaaaaatgatgtttggaaaatcatcactgcagaataaacagttgttgactagctttctactagatgcttttctttatggtgatatttgagtgtttttctttcctgagctattcagaaaattggcttattctcaattactccttgaccctggaggcccatccaccaacggaagagaaagacggagaagacagggaacagaaaggagcctgccttaagagctggaatctgattccacttgcccctttgggcctgcactcaacgtttcttaaatgttcacgtgttacctccgagtctgccgattccagggaagctctggcttctgtcatcacctctggcaggacaagcaagcaggctccctgcaaaaggacttggaagctaataaagctggccgctgcttcggaaatgcaaaggcttgacacgtgttcatctggcaaagctggactgaaaccacactccccgcagcaatgagtggcgacggccagtcgctactcaaatacttggcactctgggcttaaattttagttgggtaaaaaatgggaaaaaagccttctatcttcaaattcacattgtagtacttctttgaggtactgactctcattcctgcagccagccattctgtatattcattctgtgtgttcactgcatatcgatgctgccatttggggacttccctaaacagattgctcttgaatagagccaagtatggatttggattttgtggagattaactggtcactgagcttgcattgtcagaaaacggtagtgttgcagcacaatccagggaggactctgaggcgccctgcagggatgacccttggctggcccatagtgtgggtgaagacccgagggaagcccattatagcccctgctgctggctcagctgtggccagtgtctaatggccttcgggagccaaccacggagtctggaaggctcctagaggtgagttccccgtcgtgctgggggcacaggcagggcagagctacccttctccgcatgtgccagcctaacaggtccctccctcttgctcatctgtgtgggttttgcctttttggggtgggaggcattaaatgtatactatagttcttacacatttacagtttttatcatgcctgtgtggagagtgagtctgcacaactaccatgccatgctacactccctatatgatgtcagtcagttccttaggaagaggttgtcctccccgcctgtcatgctggaaggaaggacaaatggggctggcatatcctttctgcacagccactgtgggaacagggtatgggtcacacacaggcaggagagtgtgtgggaaactcccttttctctgcctggggaggggcttgggctttggggagaagtcctgggaatccttggagcttgcttcccacgttgtcaatgctttgcagagctgaggtttttcccttactgcagagtcgctcagaatctttgagactgcccaaggccttctggggcacagagctgggtttttggcaactgccttgagagtgagtggcgttgtggactgccatccagcccctccctccctgttacagtttttagaatacttgtttttgcaaacaaccaggactgttgtgaacatctgtatcctgaaaccaacactgtttcaggtggaggggaaagtctggagaggcctggcatctcagccaggaggtggggtgagagggttctgagttcaggttctgccactgggcaagttactcaacctctgagttcagtttcctccttgataaaatagaaatgctactgttgactcacttgttgaaaggatgcctatgataaagtctcccttttattgctgggtaaaccaaaaccagaagtgacctgtccagggttcatagtatgacgacagggtggtggtgaggaaggaggcctgggttcaagaccagatctccctgttctgcaatccttgtggtcttaggcaagtcctccaatctctaaagtctccatttctacggaggtaaaatgggagcagtaactgtggcagcaagtgtcttgtctcgacacctacgacaatgttataggaataaagggaggcagcacatgccttgtaaactgcaaggaattttgcagctgcaaaatgtttccacctctacagcttgttggtgactgagccagtcaacaatgagctctttagagttcctggcctgtgggctcttaaagtgatttttaaaacatgttttcatggctagtttttcttatgaaagtaatacttgctcgttgtaaaaacttcaaccagcacagagggatgaagagcgaaagacaccctttctccaaccagttctattccccagaggtgacttctgcttacttctgtctccttctggaaattgtctgcacctgtgcatatacacacggacacagacacatgtctgattgtataagctgcgtgtgatctgttatatgtgatccatatatatatatatatatatatatatatatatatatatatatatatatttgttgttgttgttgttgttttaccaagagctcaagtgaaaatccaggtagttttcagtattttgattactagaaacaatgccacagtgagcagaggtatactttcttatgacttggtctctctggatttaaaacaaatgttgaaagcagctagtggctcagagctttcagaattatcttttgcacttggcagaatgaatctttccccagaaagaattatgttgttaatactgtggttttccactgctccacccagttaaatttaatcacaccatgtgacttccaaataaaatgatgtgtgtgtctggagggaagggacctgacaaagcttccttttttttatcgaccctagggaacagagcaaagctctcttcagaaggcctggctttcagagaccttctgcctgggacatttatattcgcagcccattctccagtgtccttggaggaagctgctgctattaattgggttggagagagagagtggctatgtgtattttgatacatgtcttcctatacaaaacaagcctggaccacttcatttaaaaaagttaatctacatgaattaatatatctgtctgattgcctctggtctggatggccatttgggcagtgcataatcgtagcccagccaaatttctctgactgttgttgacaacagataggatttagttctctagccaaagcaaacacttcatcctaaagtgaattttgggggttagggcaactcctatgatttcatattgcagtgtaaaatggtttctcttacagttaaaaacaaatccacaaatttgtgggttttgggtgctttgatttttgttattttcccaaaatgttgtgtgtaggataatttaaaaagcaaaatcttattttaagtgcacgagggagcctcggagaaatcccatggagttgctttttaacgaaggctcttttgacaatgtaaatccaagaatcaggtgtgtaaagaatgttagacccacacctccccagaacgtgaatctttcccactgaactccctggtcagtgtggcctcctgctcctcctcttcctcctcaagaggcctacctgggctgtcttgccactgaccccacgtttgctggcaggtggaactcttacctgtccgggccatgggctctgggcttgcttcacatgctggaccatttctgttcttggccttagaatgcatggtgaagtgcttgcaggactgtcctcagcccagggagctctggctccaggtgactctcatttcctctctgtcaactgtcccaattcctaacccactcccactctgagctccgtagcctgtgtctggctgctgtctgctttcctgcctgttctgtctcttcctgagaacccctgcccatgaccgtctggctatcttagagcacactatgagattgtgtgaagaggatttgcttagaggggacttggcattttaatgctagcagtaaaacaaacctgccatgctgacttctattgcattaaaaagtgaagcaacaggcttgcttaaacataaacagcaacagtaaaaacccagaactacctaactacatgggcacaggaaatagtccagccatcttggagaatagcacaaaaatacagctgacgtgataacagtaaccctgcaatgagtcttgacaatgctgaagtcaaatgactttttcaaacctttctaatgcttggctataatctaaaggaagcattgcacttcgagtgctgattttttatgaagctcgtaaacctttttctttaaatgccaatgtgctgaaaagttatgagtattaaagacttagaaagtgcctttaaaagtgtgggaaaaggtccctcttttcttgattatgattcttgaatgctagtaatgatagtagtagtaataaatgtcattcttcactagaatagttttttccaaagacctttcgggtctactctcaagttctttcctatctttgtgtgaggtggacgatgtcactagcctcacgtggcagaacggggtcagaagctcagagtttaagtaatatggcctggaattagaacccaggagtattgctccttcttgtaaactctgatgcctgggtttttacatggtgtctatctgtaatggcttataacagagttgctcctccagaagttttagcctcgttcctgcttgataggcagggcctcccattgggcctgacccaggatacatgcttggttgcagaaagtcagctttgcaggttatactctcagcattttggccacagtcaaccgtgcagaaggcttcctacctagatggacaatagatagcgatctgtgtctgaaattccacagccatcaagatgaaactgagaagctagatcatccttgctggaacacagattgagttagggtgtaggtcgaggttcagttgtagaaagcagaatatatcacagcaaacaagaggaagggatttattataaggaattaaatggcttatagaactatgaagagttctgaagacaaaggtctctaggtggcggtttcaggaataagtaccccggaaccacactacagaactagaccaccaagaaagctgttgccactcctacagatgaagccacttctccagaaccacattgcaacagccatgattgagagggtcccacaatcaggaagccatgacttttatggttctagaaccatgccacatcagctatgatcagcatctgcaaatgatgtcctggtcctgcctcctggaacccacaaagttggtacctggatgctgcaacattggctaaaactgtcatagaagaaccaggtgcctcttggactttgcttgctgagcaaatggcagctactgccaaaatgtggtctctgcctcactttggcgttctaaatttcacaaaagcacatctaactggcccaactgaaatcatatctggaactgcagctgcagggactttgagagttggctttagcttcccatcctctgcccacataggagaggtgggcacactagaaggatagaatgtatgctggaagccaatccactgttatctcccatgatctgtgatcattagaaatggacctagatttccagagtcagcagatgaaaacagaactgaggttatagccagaacatggaatcgttgtgaatattttggggaatgtgtgtgtggatgatcccagatataacagatggcaaagaattaaaagtggcaaaaggcgctgggtttgtcctctagctcctgcttagctcctttgaaacttgttaagctgtagttgcaacagcccaaggagttctggagaactctagtctcactgtgtattatttggggaaacaatatgttaagaagctgtcttaattgccaagcctttactatgctaatgtttgttgtgaatctctagatgtggatacagcatacaagggttccccaaacatttggccactggaaagcctcatgcctcatctttaaaaaatgcagaagtagtatttcccaacagtcttttttttttttttttttttttttgagctggagtttcattcttgtcacccaggctggactgcaatggcgcgatctcctgggttcaagcaattctcctgcctcagcctccccagtagctggaattacaggtgcctgccaccatgcctagctaatttttgtaatttcagtagagatgggggtttcaccatgttggccaggctggtttcgaactcctggcctctggtgatccacccgctttggcctcccaaagtgctgggatcataagtgtgagccatcgcacctggccagaaatactcttccaaagagcaagccagggagtactgtggagaaaaggcttgtctgatttccagggagttaaccttttcaatagcctccatcaggaatgtttactgtcaagatgataagatttcctcaagtacagatggtgctctgcccttcaaggagaatcaaaagtggggagaccttgaccagcaaaaccagcccgtgtggggttctctcaggaattcagatggcctgagacttatcctgagatacccccaaagaggtaacctgtgatcataattagaaattacaacaaaatactaattatctgtagaccacatagcatttgggttgctctgttatagaagcagatggtgttacagagaaggaactgcatttagcttaagaaaaataggggcagctggggcaggagctcagcgactaagagtataccgagttgggggagggaaacacgctgtggggtgtgagtgcaggagagctgacagctgcagtggtaccacgtgaaatgtatggagggcgggagaaagccgactccaccttataaggacttgcagccaggacagcaaagccctagagacagtgatgagaactgcaccaggcataaatggtccataagcgccctccaaaaactggatgatgcagaagagggtgagaggacaccttcaacgatgaacttgtgtcttatagcaaatctcccactgattttgattttctacattaatacttaacagagtttgtctgtggcatgtgtgtgtcattctcaggcaaatcctttttgaagtttctgcttaagtatttaaatgcagtactggctgttggtggggtggggtggggtgggggaagccctcaaatctgagtgtacacctctgcttcttaacactaggtgtgttcccataggaagtcaggcatgccttaaatagacttcccaggaatgggaaatggcagctgcagaattacagaagttgtatctgcagaattatgagcgtgcttgtggctccctccatttttatgtgttctgatttagtgagcttgatattctgggactgataccagcttcatatgtacacaaaggtcacgcactcctcctccagttaaccacacagattaacatgtgggctgcaactgcatgagccgtgcagaggatagagtcactaccccttcgctcttctgtgctctttaggctcaaatcctcagtggtcagtcccttattgaagtgccttttttccctgaaagcactctagtaaatggaggtttagcattattactgaatcccagctttttctaatacatggagctcagtgcttactgtctgttccagagcaattacttatcaccattaccggagatttgagtcctctcccttggtgattagactctgaaggatagtcgttttaattttggtagttatgatttaatcttttcaagcttttattatggacaatttcaatatcaaaagcagaaagaataatgtagttcccatggacctattcctagcttagttattacccatggccagtcttgcttcatctgtacttgtacccatttcctctttccctcggattattttgaaactgtcatagaaatacttcagtacatagtactctctgttccttctgtttctcagtatcttttcaaaacttttgtgtgtgtgagacagagtctcactctgtctcccagactggattgcggtggtgtgatctcggctcactgcaacggtcacctcccaggttcaagcaattctcgtgcctcagcctcctgagtagctggtattacaggcgcccaccaccacacctggctaatttttatatttttagtagagatgggattttcaccatggtggccaggctggtctcgaactcctggcctcaagtgatctgcctgcctcagcctcccaaagtgctgggattacaggtgtgagccaccacacctggtcttttcaaaactttctaaacatcatagtaatatgtacttaactcatgaggggcttttcagatttttgcctagaatgaataaattcagatagctctacaagtatatggagtgcctaccctgcacaaggcactatgctggttgagggatgggttaaggtcagattttgttggatagagtggaattatgcaatggaagtggatttagaagatgttaggcccctgtcctgacagcacgcatggtctagttggaccttggaatgttggctaacagaaaggaacataagttaggtgctcaatgaagtcgcttgctttgtctgctcagcagagctggaggctgtgtcgtctgagtatttgaagatgagggcttttaggaagggcgtagatattgggttgggtttgatattgtggttagtcagttgtcagccagcagtggaaagtgaaagtggcatgtgcttgagcaaagctggcctaatgggatatagatttacccgacacacactgatagcaaatagattgtccttacagcctttaccaatatagaactttgatacgtaccattctgtttgcagaaagagcgaccagaaatgtgcagcagtcagtaatgtaccccctagggttgctgttcattctgactcaaggaactttttggaagcccattgcataactaaaaaagaaatgggcagtctggtgtattgttggcaaagcacaccctgccatgccacaggaaagtcggcccaagttgtaccacaaaagctgccaccattgctcccatcctgatgctggctatcactactgaatgccttctctgggactgaatcctaaaccatccctgtgtccttttcaccccgtcaagtttccaagtcccaggtaggactgtgtgatcaaggtgggccacacacctaaacagtgggaggaaaattgtgttggactccttcggcttctgtagaagacctggggctctgccttccatcaacaatcatgcaatggggatcttccgcacgtagagtgggggtttcagtgctaagcctccaaatgtccgctaggcatatcactgttaccttgggctgcttcctctcccttcttctcagtcacaaggccttggccctccttaaaaatgccatgtgcacctgttgttcttgcttttctattcccatagcaaccacgctagcccaggtgctcctcactgtcaggtgcctcagaatctcttgtacagacttgctgctttcagtggctcccgtccccacgtcttcctacacagtgctgccgcagcattcctgttaagcaaaacaacacggtggctcaaatctaatatcttcctgttggaaggcaaaggccacctgcttaccttggccctgctctccacagttgacacctggcttctgtttccagcttctctccatgtaagcaggtccccaaatgccctgtaccttaccatctccacgattgcttttcaatggttctgttttccagaaggcttgcccgtctctctgcccaacaaaatctgttccactcaggttctgctgacctccccagagagaggtgacagcttttttgagctcccatggcccaagtgtgcattgctcagtaagccctttcatgtcccatgcctgtccacttagatggatgaagccactggacagcattcagctgttctttgtatttctcttattgcttaacacagtgctggatgaacggggctcactaggtatttgatactttctttttttttcataagagagcagaagaaaaaaataactaggaacaggaaaagtgaagtgcataaatcatacgttgagtgttgacaagctgaggacttgaggactcaggcaagctggagtgagggaggagggggacaagtgcctttggaaaggcagtgtggttaagtttgtgctctgtttgtgttacagaccaaatggagttgccttggttgtatgcttcccaggtgtactgagtgcccacctggttttaaaggctgccctggcggtggcccagaagcaaatgtagcatcgtttgccagagactcaagaatgtgtctgtataaataaaagtgaaagtggcatatgcttgagcaaaattggcctaatgggatatggatttacccgacacacactgatagcaaatagattgtccttacagcctgcaccagtatagaactttgatatgtacccttctgtttgcagaaagagcgaccagaaatgtgcagcagtcagtaatgtaccccccggggttgctgttgattgatgacttctcaagggcagcatctccacggggctcagggaattcaccgtgaaagtcagcctgggcctcctgcccactttcccattgcctcattccgctgcacagagaagtgttgaaaggggctctccaagatgggctgactgtttgcgaccctcacagaaccctgcaggccatattcacagcaaagttcacatgcagaagaatgagaagggaaagttaggaagggtcagagcacatgcagcgctcagttgagtagtttggtggaaagaagtggcctgttccttcagagaacttggggagatttggtgatagaagggcatgacctgtgaaaatgactgcagtccggcagggtcaatgtgatggactcacagggagaggctgttcctcaggatcatctcccacagcacagcctggctcatgtcttttcttttcttttcttttttttttttttttgagatgaggtctcaccctcttgacctcttgccctctcgcccaagctggagtgcagtggcgcaatctcggctcactgcaacctctgcctcctgggttcaggcaattctcctgcctcagcctcctgagtagctgggattacaggcacccgccaccacacccagctaatttttgtatttttagcagagacagagtttcaccatgttggccaggctggtctcctgacctcaggcaatccgcccgcctcagcctcccaaagtgctgggattacaggcatgagccaccaagcccagcctggctcatgtctttctgcttggggcctcccccagtgccccgctcttcccacctcatgggccactcttatttgcccactcattgatccccctgcaaatactcacttgaactgcagagttttcttaatgaacagccaggcttcccaactatgcggtgagctcctgaggaccggggctggtctgttctttgtatgctggagggctctttgcactgtgccaggcagcatataggaggcctcctggagaggctggggctctatggccacaatcctagcctctctgtttccgggcaagggacttctaacttaggtctcagtttgcccatttgtaaaatggatataaatgtaccccagattaaagaggtaatgtgtaatgcccctgggcataggaggcacccaaacactgtcctgatcccttccataccctgcagcccatacacattgtcgcacagggttggcacacattaggtgttcaatagtgcatgtctgttgactagtggtaatgagagttgttgtggtatcagttttcgaagatctcttagagctgattttagccagcaagcactcagtagcagaatcactgggggcgggttggggatagggagtgattaaggaaacaggttgtttaataaaggaggattgaggaaactgattactttgagcaatgaacacctggttaatgccaggtagcgacatcttaagggaaaggaagttgagtccaataaggaagccaataaaaatcaagaggataaacttaagatagagggcaaactagatggaatgctctggggagtagcgtcatttagttaacactgaagaatctcttaagatgacacatctttgcagggtgtgaaggaaggtgaccttgggcaagttacttagcttacctgaaatgtggttgtcttcactctaggatgagggttggtgatacattttctggagtggacgtgaggatgtgttgacggtgcatgtgaaacattctccatgatgcctggcacacacacacagtagttcccttccacttcctctaaagtagaagaaagttatgtgttttgccttttgtgtttttcatttgtttgtttgcgatggagtctcaccatgtcgcccaggctggagtgcaatgacgcgatcttggctcactgcaacctccgcctcctgggttcaagcaattctcctgccccagcctcccgagtagttgggattacaggtgcccaccactgcgcctggctaatttttgtatttttagtagagacagggttttgccatgttggccaggctggtctcaaactcctgacctcaggcgatctgtctgtctcagcctcccaaagtgctgggattacaggcatcagcccctgtgcccccgttcgtttgttttgagtgaacacataaatgtcatcaatgattccgtctctacctgggtaaacttcagaacttaagcattagttgtgagcatttggccacgtggtagggagaatgaaaaggcgcccaggtgtctcttgagaaaggaaggaagtttttttcaggcggagtgggttggatgaggcacatgtttctagactactctccattttattttctcacttctggccactgtcggttgtagaggtgccccttcagtacacacacagctacggtaacagtacctctccatccacagtgacttatatggacttaagggagtttcagtcggggaagaaagtgggactttttcattaaaacaagactctgctatacaatgaggggaggcctaactgcctctccgcaccctgatgtcatctggctggtccctggatggtggggatacatggtacagccacccaaggcatggcagccatgtggtgatttaaaaaggaattaactgttaggacaccaggaagtgctcaattaattcttcttcaatttggttagaggaaaaaaatgcttttctgagtttatgcaaaatgatcatgttttattcatttggtagaagtcactctaatggcatgcagggtagatgatgtcagcttttccatctcagctgaatcaaattgtacggagcccttaatctctgctaggggctggggcaatccagtggaaaaggatggtctcaatctcagtgcagtaggaaagcaggaatcagctcagtgaggcaggaatctacgcaggtgcgcaggtgtagaggaagtgctgtagggccgcaggggttggggctgtgatagagaagggtggaggatgcaggcaaggggctcccagaggagttggtgtctgggctgtggctgaagttcaccgtgtgacactgtccacgaggaaggcctcagatgaaggagggcacttcaggtagagcgtgggcactgcacaatggttgtcctggatgcgcaggagtggggtggtcatccacaaatgagtgttgctaacctagatgttgcccctttgaggtgtaagcatatctgggtcttggtccttcaacctggctgtgttgccttgtccgagtcagttaacctcgctctttgtaggttgattaaatggtcagttatccctgccatgcctagagtggtctgtgtggggtctaagggaagaaatttgaaaggcatggactctttgctaaattttagaggttgggttcttgctatgttgcctagtctggcctcgaactctggagctcaggtgaccttccacttcctgactagcagaccatacctgcttgtgccattgcacctagatgaaagtcatggactttacgtggctgtggctgggagggagttaaaagagtttttgctccattctgtctccttggaaatactgttcccaaaggatgttgcaaccatccacatgcctgttgcctgtccttcccacttttgctttttttctgaacttctcttttctgacttttatatactaggtttacatattcgaatcaagaaacaggtttttctgggaaatgtgcgtaaatacttacaagacaaaaggcaattttgagtcactatacctcttatcaaagtagcgcagtgcatgtatacttttattggagtagattgcagagaaaacatatgcagttggcaaataatcctgagattgaatatgctctcctgagtaaccaacagtgacttaggtgcgcagtagagcttcatgtgtagcctttgaagcaaggacatatgagaaaatgactgagggtaccgtggctcatgcctgtaatctcaatgctttgggaggctgagatgggaggattgcttgaggccagaagttcaaggccagcctggggaacatagcgagaccccatctcaataaaaatttaagaagttagctgaatatttccgcctgtagtcctagctacttgggaggctgaggtgaaaggatcccttgagcccatgagtttgaggctgcagtgagccgtgagtgtgccaccacactccagcatgggtgacagaacaagatcttatctcttaaaaaaagaaaattactattaataactgcattggtagtattaaatataacataatatgaaatatctaaaactgtattacacacatactcaaattatctagaaaacttcactctttagttcagtaagtataggcatgaatatatttcattcatcagtccatctatcggcccgtccattcatgtaatcttggccagcattcccagactgtatctcctgaaggtgatgtaatatctgtagacctgcggacactgatcttcctcaggacacagcctggtaatcactgtgagagacggcatcattgcgaacttggaaatcagggccccttttttggtcaggttgcccatcttgttttgtgctaatagacatacatcatctttattttttgtttttatttttaaaatttgaagaaagtttatgtaggtcaaatggatgaaagaatagttagtgttacagaacagaatgcaattgagtatctttagtggggtaaaaggcactttgcccatgataattgccagatgtttagaggtgcaagaggagatggcaccccattttttatggctacatttcagtggctttcatgacagagattatttgtttcctgccttggttgcagcccagctgaagtaagaggagtcaaggtcagtgtggggggtactgagatggagaaaacagcaatatggtttatgatttgagaggaaatgttttcttagccactcacatatctttccatggttcttcctgaaactccatcacaagaaattaaattatttgagttaagaagtggcttttaataatcactgctgacaagggcatgatgagacacccggataaactgctggtaggatactgatttgcccaacctctggtgtgatttgggcgatctctatgatagtcatttcagaagtatatacctcttcttgcccagcagtttcatctcagtcaataaggacgcagttgggcaagtgcacaccaggcacaggcgtggttcccttttgcaggcccctcgtgatagagatgactggtaatagtctaattcccaaaaacaaaaagcaaagatgaagccacgtggcttttatgacctagtctctaaaatcacaactcatcgcttcaccttatttattcattagaggcgagttattaagtccagcccacactaggagggaggggagttaagcttcacctctgaagggaggagtaagagagaatttgtgggcatagtttaaaacagccacaaacacatgaaattatgttcagtctgagcatgttagtgtgattaggatctacctgctggaagctgtctgtcttctcagtgggtaacagagagcagcagcaaagggtagggcatttgactttcacactaggagatacttggataacacttaaggaacagaaagctactcagagaggactgggtcgctggagtctggaagcttggtcccaccacacattgcttgaggactctgagtaagtcagatgtcccctgggctttcctatctggttatgctgaggatctaataaaccagtgcaattgaaagcactatataaaacatgaagctggctgttactatcattaccactactgttactgtgggaagagagtaccagtgtgggagatggagaggggtgggacatagaaatagaggagtagagagagggatttgaatactattgtaaccagatcaggatttcctagggtggctctgaggagggagtggagaaggcctgccttggctgaactcgcatgaggccatgccatgatgatcacagggacttctgtgaaggacccctgtcttgggtctgccagaactctaaggcctggtccatgaaaaaggcatcagtcagggtggaatgtcccaaaaagaaagcagcccccaatcttcttagctaggccatacacccaactcattgtttcaggacttacatgttcattcctggctttgtgccaagccctgtgctagaggctggggagactgtccaataggccatagcgccttctctttagaatccaagtcccgcaggacaggaagactgcagccgttttgagtgaaaggagactgagctttggctggtggcctcattccctaagcctggatttgaccttcaggaaatgttttctcagatggccttattctctcagaggtcacataggtctgaaaactttgtctttggaaattaaactttttcccccttttgatatttataggcttcttcagtgttgggcaaagataaagccaggccattgcattcagatgattataattgccactcctccttccttccaagtctttttaaaaaattttttttctttttttttttttgtagatagagtctcactctgttgcccaggctagagtgcagtggcacaatcatggctcactgcagcctcaatctccctaggctcagatgatctccccacctcagcctcccaagtgactgggaccacaggtgagccccaccatgtctggctaatttttgtatttttttgtagagacggggctttgccatgttgcccaggctggtcttgaactcctgggctcatgcaatctgcctgcttcggcctcccaaagtgctgagattacaggcatgagctactgtgcctagccccttccaagttttaatggccaacaccatagttcccgaaggccctgaattctctctcagaagtggctgggcctgtaggtagtgctgtgcagagcattcctgcctgaagttccacttgctgttgaccagggcagtgtggagaaaagcctgacaccacctggggagaaagccatgcggcaattgtgtctcttttcatttcttggttatatttctagcatgaaggggctctaaatatccagaaataaatctttcttctactagcccgggctcaactatgaaagataagttacttttacttagctgcttgtgacctctgactatatattgcacagtaaaccaagtcagttcagtgtcttactagatcagctaatctataacagatttaagtgggaacggttgcttcggataaaatgcagttggaaaaaacccagaaaataacaagcgttgatgaagatgtggggaaatggaaactgttgtttgttgctagtgcacatgtaatgtggtgcagcccctgtggaaaacggcatgacattttctcagaaaattgaattaccatatgatccagcaattccaacactaggtatacatcccaaagaactggaagcaggaactgatcagatggatatttatacaccagtgtttataacagcattattcacaatagccaaaaggtggaaacaactcgaatgtccatcagtagatgaatggataaacaaaatgtggtctatacatgcagtggaatattattcacccccaaaaggaggggaattctgatacatgctacgccatggacaaactttgaaaacattatgctatgtaaaataagccagtcacaaaagcacacatattctatgattccacttacatgaggtcctagaatagtcaagttcatagaggtagaaagtaggatggtggttgccatgggctagagggaggagagaatagaggactattgttcaatggtagagattttcagtttgggaagatgaaaatgttctggagatggatggtggtaatggtttcacaacagtgtgaatgtacttaatactaatgaattatatacttaaaatttaccattttaaccacgtttgtgtaatttaccactgtaaaaatctttttaaatgtaattgattcctaaatttatgctgccaggcatatgattttgggatacaggattgaaccagacagaaggcctgactgcaaggagaactagattgctttctgctgaggagagatgaacaatacacacttaacaaatgagtaaggcaatacaggtactgtaaggactttgggaaagaaactgggtaattaacatggtacagaaccatgcctcacatatgtgggatggagatgctttcgctgggttggctagggaaagattctgatgaattgacatttgggctgagtcctgatgagcagaaatgatttgatatcataaactctactatgtatatagatgtttggaatccattttactggaaatctcattgagatttgagatgcagaaaaattgctacaaaatccagaacttagtacaaattgtgcttacaaaaccgtctgtgttgagtactcctaatcggttgcttgaggattgagatggggacaagcaaggcattagtgtttcagaatgttaaaatggttcttacccaaggccaaacgctccgacctggtcatgttttcatctaggtaaggtattagcctgttcacatatttctcatgtaatatttttaggaactagatccaataaagtttgccctgggccttcttggaaagacttgtgccttttagaaaagaaccgatttacaaaaatcaacgtatggctgatagatttttaacttgtcatttagaagatcagtctatttcaccttggaaactaaggctatttaaagctgtgagtgtaaagtttgaaggatttttttataattcacctgagatggaaagaaatatgctgctgggacgatgaagtgtgtgcacagctgattcgtacaatgtgtttacatttcccattatgtatcttagagactctcctgttgttgctcagatttttctttttaactcagtcttggggtagaagattaaagttccctgaagaatatggaaatgcagttgaattcttggaagtctgtaccgtgctggccttggtttgtgatgaagctcacacacgatgtctgtaaaaccctgaagtccagccaggtgcggtaaaagagtatggtgacttcagagtttaagagcaggtcattttgcaataactttttataagagtacatggccatctttgccttaggatagtgaagtggtattttccaggacagaagaactgaaatcatctgaatttctaggttgtagatcccacagtccttgggaattttgacttacaaactaggaaattatttcaccctcataaaaatctccaaccctctcaggtctttcccactcccacttgggtttgaattggagtgtttgcccagccatggtgatgattaggaggtgtagcaatatgggcccagaaggcgactttgggattcatctctcatctctcgtagtgcatgagagaagccagctcacggctctcttagaaaacatccattgttcctgaaacctgcagtaattggaacatgagtgtaatacatacagtaaacagaattctgcctataagctcttaccaaaagcctgccaatgcccagcctgccaatgcccagcccatcttgaactaaggggctgtgatccaacaggaggatattgcccacaggtagctccaagtctgcctgaggagctaagatagaaatgaagtaatcagaaaatactagcaaaagtcaaatcaggatatttggattaacatcctgaggacatgggatgtgtgaaaagctgtgctggggaaaagtcagaaatgaggaactggctggagtgggcaggagaggccaggagggtcagggaagttcttggagctggaacttgggtaaggtcttcaagaaagactgtgactacactggtctgggagcttggctaggaagacttctgaagaacccagcccccagacctaaagtaggggctagaaagaaacagtaactcaagggttagttatgtttcaaaaatatttacatttctgatatccaaagtgttctctgtagggttaatagctattagaagggaactggagttcagtgggctctgtggccaaataagtttggatagtgcttgagtgagcactgggagtttctggactgcaagactactcaggcctttgtatgctgatgtacagtgactttcccagatgggcatatatagcatacaacttcctgcttatttgattgtggaattatgtattttccccccaggaggatcctacgtgaatatagtttagttccaaataatataattgagttgaggaaatgctagtctaaatgatttcacttcagtatgtgttttagtgtgaatcactatcaatagtcatgttttcagtggtctcagtgcccgagggagttgattggaaggaagtcagagggacttcattaaataagtcagtgaatgaggagtcctccaagggatccctgcctggcaagaaataccctcaggccatcttggttcagaagttattcctccatacattaacaggcacataacacaggctttaaaaaatactaattttgtgaatattatggctactccatagacagagcatccccttttcttcacttgagatacagggaaggattttgtgtcaatggtatggcgtcaccatccccatgggacagggttgcagcagctggggctgtgagggaagatgaggccgaaagacccagcaagattagggttgcaggtaagatacaggacaccgttaaatttgaacttcagatcaactctgtataatattttggtataactatgttccaaatattgcatgtcacatagttataaagaattattttttctggaattgaaacttaaacagtcatcttgtatttttatctcctgtctggtaaccccatgtaagatgttcagggaagcctagacacacagaccagaaagtgatgtagaatgtacaaggcaaggcagtgaggaatgattccaagttttagagagcccaggtcttccttcttggaaatgggttaatacatcctcaaaccctcttcccacctcatcactttcatcatatccccctcagtttgggagcatttgtatatgagagcttgtagcctggcagtttttttttgtttgtttgtttgtttgtttgtttgttttttttggcagggtctcactctgttgcccaggctggagtgcagtggcatgatccctgctcactgcaacctcccattgctgagttcaagcgattctcgtgcctcaccctttggagtagctgggattacaggcacgcactaccacacccaggtaatttttgtatttttagtagagacagggttttgctatgttggccaggctggtctcgaactcttgatctcaagtgatctgccctcctcggcctcccaatatgctgggattaaatcaagtgcaagatccaaaatgttactaaaaaagcttttcagctttttagattctcttaaaaatgcaaacaaacagacaaaacagtttcttagaaagaagccggttgcgtgcgaaccgagaagtcttgaaaccaaaagaactccaagttccctgcctgtgctgaacactatgggggtggcacgtgcccatccagggcaaatcacagggggagaagatgaggtttcttaacagtaccacctctcacttttggtatttgtaatggagaacacagacttatatcacatgtgaaaatgaaacaatggtttaaaaagtcatgtctctgtgctggctctggatgagatgagccttttgagaaggcagaggcgtgctcggtgggttgggctctgggcatttcttcccctgccaagaagcgaaatgtcttagctccatgtgcgttgatgattactaactggccagggcttactgtaagtgggctgtgctcggggatctcaccaggaagaaaaagaatcaaactaatccctttctggaaaccgtctcccccggttgcctgggccacctgtcccagatgcgctcctctttcccaagactcttgctgtctccccgctgccccagaagcctgccttttctccagccctgcatgggacattctcctgatggcagggacccatgagaggggggctgggtgagcctatgtgctgtgaatgtgttggtgagccctgggggaggagtcaggggaacctggggagctgggggtccacgtgtgaggtcccgggcgtggaccatggagagctggtagcctttgttgaccattgtacagacagcgacaggggctccacatcacttcagcaggcacggtgacacacaggactcactggatgctacggtgttaatcacaccactggtgcttgctgtatcctatggcaacagcagctccttgttaattcagagtaatgctggggcaggccgtagtccaggccatctcacactggctagggcaaaccctggctcaagagcatccttgacttatggccaagcctcaggaacctcttggctggctctccaacatagcccacgctaacccagttttggaatctggtagtgggaaaacagggaagctccaaaaaaaaagtaactcagaggtcaaggtgaaccctgaatgagtccattagattccacaatcaatatccagcttctaaacattatacatattgatgagctgattgctaggagactagtgctgagagagctgaaatctattttgctgaggccaaattggctgttgatgggccatagtagactatggctttaataatcaggtaaaaaacaccctgccatctggtaaaacacagcttaagcacattggagccctgtgagctttcctaaaagctgggcaaagcagggctttcaccgggctctgtgtatcctggccctgcaagtcctttctaaggggctgagggctggccggggccctagctggggaacctctgatgctgggagggtggatgccaggtggtggaacactgcaactgtgatctacaaagataggatgtttactgaagggtaaatggagaccggcccatgctctttatagtccctgaacacacgtgttgacctgaactgcttactcaactctgtactcagttacaaattgggtgagatgtggctcccacagtgggaataatttccttgaaggtctttactccaagaggttccctgggaggaaggatgtgcttgtgcggggtatggtgtctgcccacatgaagggccggggtgggcaggctatcttcagcggtgatgcgctttcaaccctcctcccctacccacatgacccgggtatggagcgtgggttggtatcatgatagcatgctggaatctaacatgaattatcctaacttggtagacccagatgcagcggctttcctgctccccgcaactctgcctgacacattgctggagctagggagggaaagccgctagctgattgctaagacctaggtgaagaatctcaaccacctggcctactgggcatcttctggtcatttggatcaccgctggtgtgctggtgctgagtccaggaggctgcactgctcacagggcataggcagctctgcttggggcaagacattgccaaggtgcagagaacaggtttctggaggcaggaagtcaaaggcaattgggttaattaaacccctgtggatcttcagctgcagaattgctgtgaggtactctgaagacttaaagttgtacatttactaaagcaaaaacggaacacccacagttaaaccaagacaagtcctttctacctgtggtgctatgcatggctctaattcaagggcagggaagagggggacgggtttccagtgtctccccaaacacctttcctctggttttgagcatgggcctgtctgatgggattccagggccgtcctttgatcttacctctgctgggttaggttgggggaagctatctctgccttgacagggtgatgctcccctctactcatgtgctctgtgtgggaggcagcaggaaccaaggtcttgatctgttgctgctggcccaccctccatcaggcggcagctctgggcatcaatgtgccggcagcttctgaggtgcctgctgtatgtgcctaccctgcagaggcctggggccagcactgatgggaacttctgtttgatactcagaacatcttcagagatgggtcacaccctgcgcttggctgggacagtgtttcatgggcttctcctgccgcccttctttaaggagctgcattgtgagtgtgggcccagagaacacagtaggagagaaatgcagtgtctccccataatcccctgcagggaccaggctggatggggccccagttgctccaaaattaggcgtcggaggtctaagtggtatagacggaaggaaggcggtcagagggtacacgctccatgttaaatttctgaggagcaaaggtaaaatgccaggattgctgacatgatcaggccagtgatggaaagaaagcccgagagaagagaaaaatgaagctttaactatcacagagcatctgactgagaataaaaagattttaagtggactggcagttggcaaaggaaaaaataaatcagccccctattgagtgactttcaggaatgagaggcaggcaaattggatattgaggaaatatctgaatgcactggattgtgtctgggttcaaaagccaagaacatctgcgagtcctgcattgcatttgctgaatagctgttggggtaacactcctgtgaacaaaaccaagacgagttttgtccctgccacagaggtaacaatggacgaagcacacttctgagggcgtcatcgcaggccctgttcatctctccgggcagtggcatagcaggcagtgagcgtgtgcccaagcctgcttcccatgtcacgtgtgtcattttcccagtgccaatcatcgtggtccgcattctatggactgttctgtccagggagaaggagcatgagcccacatctgccgtggccacctctccaaggccaagtggagcacagcaccactgcgcagctgtagtacctgagggcgtgactgagccaatggccacctctgggtctctgctgcctccttctgaagtgggtgtcatagcagtccctacttcacagcctcaccgtgcccatcctctgagctaataatacttgccgagtgctgagaacagtgcctggtatctatgttaaacaaaacgccttgtccagaatgatctcccatgcccctcccagttttcaccttctaggattctgtccgacttcatccttttcaaatctctgaagtggggagggcgattatcaccccatttttgagacgggggaagcagaagacctttgaggcattttccagagtgtgagtggctggttaatggatgggcaggaatggaagtcaagactccaggcccttgatcataccgctggccaaggggaaggaattatatctcagtcatgtggcccctcactgtgcctctgtttaccctttacctccctcagtttcccagtctcatcattggccctatggatctgcttctcaggcacaggttgaagggaaagaaacatgataaaataactcctaggcactgggaagaagcaagtgctgaagaggcagctgcaggcattgcaggccaggcaatacacagccagaaacggaccaggagcaaggaccctagggtttagagacttgaagacccagtctgctcccaaacgctaagtaagtgtgactggaagcgactgctccactctctctcgcccattggacaaaggattagccaatgggaaagatgcattgtgttaggatgcagattctgactcagtgggtgaccatgtggctgtggcttctgcatttcaaaccagctcctggtcttgccgatgctgctgtttgtggacctcatctgaggggcaagggtcctgaggatgcactggtatagcctggatatctttcccatcaaaagccatgactcattgtgaatgagtcctgtgttcttctcacactcaggtttctcaacactagctggataggaaagactggaagaggccgataaggtcccactggggcaatgtggaggatctctccgggagaatgttgcctcagtttccctgtgtgagaaggattatcctccagggtgggcaaaaccacagagatgggggcagacaggctgtacagtgggcagattcatacccctctccttcctctgagccccgcagtcctctattctggcagctttctacttagcactctgatttctatgtctaatcgattggccactctttgcgccacataaaaatgcgtgactgagccttgaccttgaagtcagccagtcatggagacttctttcaccatctgtttttgaacttagaaaaagattggcagagaaaaacaccaaacagttttgctaaaataacgtcattagtcatgcaacttatttgcattaaatcctgcatttattagtaatagtaccacttccttcaattcgcagattatattgtctcacaaagcactttcatggtcattattttatttgatattcaaaatgccattataagatgaacgaagattattgtccccaagaaaggaaggctccaattggtttatgagtttgccaagtattacgaggtggtaggcaccagaagggggatgtggatgttcattttctcattagagctgatattaacaattcaacagacttgccagtactgtgcatcataatctcccccatcccaaacattatgattccattccaagggaagttgttaaggggtggccagcctatagctaagctaagactattcctgaaatgatattggttgtattgttcctaaagggcatagttgagaatgctctgaaatttagaaagttgttaaaatagcaaataaacaaagctaacaaaaatcagcgaaaataaaaccttagggaacaagctagcaagtgtgttctaaattattcttcctcatcccctacccccattctgtgcttagttttcctggtgaggctaccgtttcacagtgaggcatttagaaaagccttccaggcaggagtcagtgagtcagtgcttcctggacttgttcctagaacatcccttccaggtcaccatacctgtctctttccttcaggcaggtattccaagccactgcccatgacaaggtggggcagacacgtggccaacaacttaattttccccaaaccttatttaggctctagttccacatgctgcttggggttgccatggagacagtctactgccttctccctcaaatagaaccggaatcacacttctgcttatgtgcaaggtagaagtgacagagtggcatttctgtaaatggccctttccagtaaactcaccgcccccccccagccaagtgcccaggaatgtgtgaccaggatacctcaactcatgctacaaggtacttaatgcaaaataagacacctaataacaatgacgtgtagttccatttgtagttaatgattctaaaaatgccactgctaaattgctgttaagaaaaacatcccatgtaactggagcctcaccttaagtgtctctgaaggccattgtcactgtgaactggttgttcttgagtcccagtggctgtgtgcagagttccagactaggagtaactgggaaatggaaggaggaggtggtgaggaatctaaagggtgctaagacaggaagcccaccctgaaaacacttgccatccagtggggagacatccgtgtccacaatcatgttttctctagcctagtactactttgggggtgtgagttgcacgatagaaaggataacctgggagcaccttacatgggagtaggctagggttcaaaccctaacttctctggttattagctcagggcctttgggtgaggttcttggtatctccaagccttggttacttcacacttcctaaacaagtttgttatgatcattaaatgaagtgttatctgttggatagcccagctcagtgtctcacagcaggggctcagtaaacactagattctttccttaactatttcctacctattggaggtaggcgggtccatggtgaacagggaggaaagatggttccaagggtgggagagaacctagccaaggttagggggctagagctgcaggcctggcagggggcggtgagcagtccaggatgtgctggacagagtcccacgctggtcctgctgtgcagcaaaccgtacaacttgaaggcctggcaagcagagcgtgccgtggcaagtttgctgagtgtcttgggtgtgtaggaggagaatgggagactggggaatggaaaacagggcaagaagggatgctgatcacaaagtgaaaaatgggaaccactactcacgggctttttcaatggagaggtggactgattgcattgagcagctgccatgtgcaggcctttgtttcaaaccctagcaaaggcttgagcattctgcatttacccaggagatactgaccactggcattttcagcctaaagggtttttctttacaaatttccaggggaaatgcttatcaatcaacattaggaagagctgggtttatttttaagttgttttttcccactgacacctgtctagccccactgttgcacaaccttccctacctttcttctcaggaaagggaatcactgagaatacaaaccagggctagacagcatgtgcactgcactggacgggagtgtttcacctgctcagaaatgctgcattatgcatgcagagcattgcagagtctcttgagggtccaaaaatcccagatgtggcttgaagcagctgtgactatttccaggaggccatacctctgggctaaacatggtccctttcccctgaaccctagagaccagatgagaaattgctttgaaagaatattctttgttagtcctggatgtaggcagagggatgggctgattgtatgactcctcagtctctgtcagtccattttctatgactttaggaatgccccagacctgaagataactgagttggtcatgttacctggcttcaaggaagctggagggattgccccacaacggtcacaggtgacaaaggtgagctgggcctgcatttagttctatactgccacttgctagccttgttattttaccttctctaggctttcattttttgataagggcagataacttatgatttccatacctacctggtaggattgttatgagaattaatggcgatagtgtgtgtcctggtctctggtaaatcttaacaggtgctggtatgtcagccgctgctgcttgttgtggtggtggtattttattgtgttgttgttgtctttatttagaatgaaaagctagaaaaaagttttcatttttttctagcttgggagaatgtttcccacgcattctggtagtggagtttcagggtctttctctttccccagttcttctagtgtagcagtcatagctacgcccctctcatagaactggggagagaagaacaataccaggaacgatggcaaccatttgtttttcaaagtactttgataatccctggagtctctacaacactctgaagataggcagggaaggtgttatcccgtgacagagttgagataaggggtcaatgtccagcctggagctaaatggctaatcagtaatagatagagggccccaggatccacatctctgcagctgcagggcctgggcactgccctggtggtgagctccaggtacaaggagggtgagagaggaagaaaagcacacgttgccatcatcccgggcctgcttagccttcacttggtggagaaggagtgctttgccttgggagtgggtgggggctggggttctgccacacactgcagggccttgattggggaaggctgaggctcacagctggagccttcatcagaggagaaggcttctgacagctcctggcagttgaaataattcaggaggctggaaggagccaacctggggaccatgagagacaggttctgcaggtggcatggagtggacttaggaacgcaccttagaagcgcatctcaccgaaaatctgcactggagcagccaggtagaacttggaggcttctaacacagtagattacaaaggaaaagcttttgagagaagggtctgtcatttggaaatgacaaaatagacttagttccagggtctggggccacatgtacatttgcagtcagctgcctaggagcctcctggggaccaccatccaacccacgccagagcccagaatgaagtcctgatggagttcaagcccataccttatggggccattctgaggacacagtggttccatagtgacattatcaaaaatatctggaactggtggtcaggagtcactcagtgagggagctaaacaagtaccaccatcaagtgtatcttctctaagctccagacttatggaaaagtaaggtggtgtcttgactactttgtgtgagaaggtgctgtcagagagcaggagattctcctcagagtgttttgactagacaagctcttttcttttgagacagggtctcgctttgttacccaggctggagtgcagtggtgcaatcacatttaactgcagcctcaaactccctgggctcagatgatcctcccacctcagccttctgagtagctgggaccacaggcgagcaccatcatgccagactaatttttgtatcttttttgtagagacaaggttttgccatgttgtccaggctggtcttgaactcctgggctcaagcgatccacccatcttggcctcccagagtgcttggattataggcgtgagccaccatgcccagccagcaagagcgcttggctcctggtacagactccctgctcagtggagctctgggttctggtgttccttggattaaatgactcttagttccggtatctggaaaaggggcctcatgtacctttgagagctgcttcaagtcttgtcgcctggcctgatctctccaaccctagtttttggggcttctggctgaaagaccttcttcagcattagtaaaccagtttttctgtctatccatgcatatgttcactcactcacttgaacaaataataaattgagtgcattccaaggctgctgggaatataacctgcagacattgtccctgccatccaggtgtctagtgtgtagtcagggagaggagccagtgtataaacagacacattacagcccaacacaatgtgacctctcatccacgatgattctaggacttcccttgtaaggaatcctgcccaaactggagtgtctgttcctcaagtcttagaaaaacaagaatttgtaccctcctttctttttatcctcgatgcagaatttactgagattttatttgtggcctacaaacttaatggagcctagtacttttcttcctggattgaaaccgttaacaatgtcaagagctcttagcagatacagctctacatgtgtagcaaagtgtgattcacattctagtcttcacataacttactgatgacttaaattacgtggaagcatacaatatcatgctaggtgctatgaaggcattaaggagtttataattaggaagataaattcatatgtgaattcaaaaaaataacaatgcaagccaggtggagggtaaatgctggagtgtctagaatagctaataagatgggtggacgatatgtccagtgactgaatatggaacaccagaggcagggatgagcaagctctgtttggacatgtggacttggatgtgtctcaacgatgtgtggtccagagggctggtggctccctgggtctggagctcaggagtgttctgtgctgtagatctagatttaggaattgtggcatgtaggtagccatggtggtccaggaagtgtgcgagactgataactatttctttgctctttggtttgggaaccagtccctacctccatgttttctctcactccaccaggctgatcgtcccccatctgcttcctaggttcctcttcctctccctggaccatgcatttagagcttcctcagcaggttctttctacacatgttaaagtcaatgaaccataatctgattagaaattttaaagagtccataaagtctttcattgatggcaagttaatcaagtgttgcttttattggtttggcatacataggaagtaatgaatgccatgtatagctatgtaggagcactcagctgttggggagtgatccatgcatacgtaatagggaactctttcttggttttcccacaaaaccccactttctcttactatcaactgctgaaaaaaagtatccttttgctagaactttccatattgttttgcttgtttgtttgtttgagacaagagtctctgtcacctaggctagagtgcagtggcatgacctcagctcactgccacctccaccttctgggttcaagcgagcacctccagctaatctttgtatttttagtatagttggggtttcaccatgttggccaggctggtctcgaactccttacctcaggtgatctgcccaccttggcctcccaaagtgctgggattacaggcgtgagccactgtacccagactccatattgtattttagactgacatttttgttctttccacctgatgattttttgcaaaataatataatgaaggagtaaggcatgctgttctttcagcccaatgagtctctatttttttgtttcattttttagtaattaatagatttaagtatttaatgcatctgttcttagcttctaagcacatctttaagatcgatggcatgaacttccaagaacaaagggtttaaatattaataggattgggaatcagctgttttgtatgagtattttagaatttcccaaagctccagtgaaccctaaagaattcagcctccttatctttagagatttaggttattttgggtctttccaggagcaagttgtttctacctgaggagtagacaaaggacaaatgaaaggtcctgaggcctcctagaggcagatgtagattttcaagtatctcaaagttctatcaaattcgtatgatctttttctcatttgcctttagctcagcagagcgtggtgctggtggagctcagtcgcggccttgttttggtgctggttgattcacatgtgcccttggtctcatgtacagacatgacctgactagaagtcactcagtaactggctggaccaggatgagagaagccagttcttagttcccaagcatcctcctctcccactgtcccacaagtgatacacacctgcagtcacaggtggatttaaggaacctgagagagaaatcggggtatctcttccactgagatgaattatgcagcatctacatcccctcaacacagacttgtaatcagggagaaaaatttgtctgggtagggagccttgaaaattggtggtagaacttggagagtttaggatggctctagggctcaagagagagatggtggtatgaggaaggaactctaaggacattgagaagggtgtggtgtctgatggatttcatgttagtcttttctatctctacttacttttcctttaaaattttctaaaatgtagtatctttatgacaggagagagaactagttcttctatattcttctatatgcactgagaaattttttttttttttttttagacagggtctagatctatcatgcaggctggagtgtagtggtgtgaacacggctcactgcagtcctgacctccttatctcaagcaatcatcccatctcagcttctcaagtagctgggactagaggtgtgcaccaccacacctggctaattaaaaaaaaaatttcatgtgtggagatgggggtctcactgttgcccaggatggtcttttaattcctgagctcaagtgatcctcctgctttgatctttcaaagtgctgtgattgtaggtgtgagccattgcacccaatgaaataagccatttcttatttggcaaagtctgcagatcatcttttatttgagcaattttgacatcctctcaaattgagtatttctttagccaatcgggaatcttgggtgttctgatctcttagattacagtacatttaaaagagcatacagtctaaacacaataaagcccgattacagagtgtcttgttcatacatttacatcctactgtgtccggaattggtgggttcttgatctcactgacttcaagaatgaagccgtggaccctcacgctgagtgttacagctcttaaggtgacgcgtctggagtttgttccttctgatgtttggatgtgttcggagtttcttctttctggtgggttcgtggtctcaccggctcaggagtgaaactgcagaccttcccagtgttacagctcataaaggcagtgtggacccaaagagtgagcagcagcaggatttattgcaaagagtgaaagaacaaaccttccacagtgtggaaggggactccagcaggttaccactgctggctcaggcagcctgcttttattctcttatctggccccacccacatcctgctgattggtagagcccagtggtctgttttgacagggcgctgattggtgcgtttacaatccctgagctagacacaaaagttttccacgtccccaccagattagctagatacagagtgtccacacaaaggttctccaagtcgccgccagagtagctagatacagagtgtcaattggtgcgttcacaaaccctgagctagacatagggtgctgattggtgtgtttacaaaccttgagctagatacagagtgccaattggtgtatttacaatccctgagctagacattaaggttctgcaaggccccaccagagtagctagatacagagtgtcaattggtgcattcacaaaccctgagctagacacagggtgctgattggtgtgtttacaaaccttgagctagatacagagtgccgattggtgtatttacaattcctgagctagacataaaggttctccacgtccccaccagattcaggagcccagctggcttcacccagtggatcccgcactggggctgcaggtggagctgcctgccagtcccgtgccatgcgcccgcactcctcagcccttgggtggtcgatgggactgggcgccgtggagcagggggcggcgctcgtcggggaggctccggccgcacgggagctcacggtcgggggtgggaggctcaggcatggtgggctgcaggtcccgagccctgccccgcgggaaggcagctaaggcccggcgagaaatcgagcgcagcgcccgtgggccggcactgctgggggacccagtacaccctccgcagccgctggcccggtgctaagcccctcattgcccagggctggcagggccggcggccggctgctccgagtgcggggcccgccaagcccacgcccacccggaactctagctggcccgctagcgccgcgcgcagccccggttcccgctggcgcctctccctccacacctccctgcaacctgagggagccggctccggccttggccagcccagaaaggggctcccagagtgcagtggtgggctgaagggctcctcaaatgccgccagagtgggagcccaggcagaggaggcaccgagagcgagcgagggctgtgaggactgccagcacgctgtcacctctcgctactgcaggtaaaatctcatgtgctggctgtggaaggggcaggtggagcctttcgttccccagcaagggtggggactgtgtaatgtaggctttagctttctcttgtctagtctgtggcacagctttaactttttttcccaaaattgtaactcatttatttttagttaaactctggtcattgtaccaaacaattttatcaacaatacatatttaagattcagcctctattcaactagcattttgcaaggactgtggaggagaacagggccagaacagaaaagggttcggacaataaatgcaattggaggaggaaaaaataataaccacataaaccatttttcggtttctatagttactttaaaacccgatgattcaaattcaacccaaatctctgaagctttatggttgtatatagtaaaccaatctgtccaccagctggaaactaaaggcacatgtaggaatgacttttcatgggccagagtcctctgcagtgggcctggggctgaggcaccgcagggctgaggttggcgagggggggaatgggaagggaggggagaagtgcaggtcttcagagcatatcctactagtttgtattttgcagaagcccaaaggacaggccgtattattgaatgttgcagaggttggagggtctcacagctcctttcaccatctaagctgtgttcattcccctttgctgtcacacacccctcctcttcagggagagctggcatgatatggcagtggccagggtatgccagctgggatggacagccacctggagagggtgtcagaacagttaggctggaggccagcccacgtgggctggataagctgcatgtaaatcaaggttgttatatggaaacagctggttccacttgaatttaattgaaaacaagacatcaggggtagggagatgagtaggggttgtggggtagacagaggggaaaagagctgatgaattgggctcttgggctgatgccgtacggacaacctgtcaagggaaagaacacagccagtgagtgaggatcactgtggagcttggaaaccaggtgtgggaaggctgggctgggccgtggactctgcaggcttggagacggacacctgcttcctttccaaaacatgtgatctctaaattacttggctagagaaaccacaggaaagccagcgtaggcagtggtatttgccttctgccctctggcctctcttatttgctgcctttccactgaagtgtgtttatgccttgtcttggggttgaatttggggaacttcctcctgcacccctcttccagtgtgaactggcctccaagggagggccacggcacattctgtgctgtttggctcacatttagagaacaccaataggatcaggggcggggaaggccaccaggagacaaaggcctctgaagaggacatcccaacagatcgtggatcattgtcatgaattccccccaaccttttcttggaaaatctaggccttctttggctctagggctggggctagagaaaaacacaggaaataacctacaggcatgtaccatggcatgtgtggagtcccttctgctgagtgaaagcagaaggaaataaacatcagaacctccccaaaggggaaaatacatgtgcaggacattctcatggctcaggcgaacactagtgccagtgttcactaggtgtggaaaagggtgcgtgagtgggtgaaggcagacactgggacagtgggagaggaggaggcttgagacctgagaactggcttctttcatcctggccctgccagttactgagtaactgctactcaggccatgtctgtacatgtatttgtggccccagccggttcagacacacccatcaccctagatctccagaactagtagccccactgataggaacaactcttcaatgtttaggcagtctgaataatctctcaatcaaactcctgtttgataagagaaaaatgtatcttaaggtctaatggaggaaaacaaagtgacatcagcttgaggataaactttggaggatgatggagtgcacactgaggcctcagcttggggctttctaactgcccactcagtaacccaatacaggactataaaatggtgcagacgctttggaagactctctgacagttcttcaaacgattaaacgtggttgccatataacccagcagttccactcctaggtatgatcccaataggaatgaaaacacagagacctgtgcatgcatattcatagcagtgttattcataatagccaaaaagcagaagcaacccaaatgccgtcaactgctgaatggataaataaaatgtgaaatatccatggttgagccataaaaaggaatgaagcactgacatggatgacccttgatgatattaagctaagtcaccaatgtcagattcaaaagaccacatattgtatgattgcactcatatgaaatgtccagaacagggaaatccatggagacagaaagtagacttgtggttgcacagggctgggggtggggaattggagaacagggggtggtcgctaaagaataaggagttactttttgaggtgatgaaaatgttctaaaactgatggtttagtacatatctctgaatatactaaaacaattgagttgtacactttacatgggtgaatttatggtgtgggatttatctcaaagctgtttttaaagaaagtcaaccaaataattgttgtcctacccccatacacatgcctgttgctcccccattttcataaagcaagcaggctctcagctcatccctacatcggtgagctgaagccatcagaagagagagtagctccctctgaggactcaaggaagtctggaaatgtcccctgccctaaaatgtttatgaaatattttcacaaaatcgaaataaactgcttaggcactggtcttcaatgaactgaaggagactgaagaataagggccacataaaggtatcagggaggtagtcttttacacagccaagcccctcgtagaattcctaaagttcttgggaagaggagacttgtccagagaaaaaggcgtgtggagttggaactgccagaattcctatagcctttgagggagatggtggccaaagatgataggaaatataaattgttgtaaaaaaaacacatacgtagatatagttagcagagccctcttaaaagatgggagaaaataacaatagtttacctttcatgagcacttgcgtgccagctactctttcttaagttttgcatgtattagcttatttgttcctcacaatgacccaacaagttatgtactattattggccccattttctagcttagaaagctcagttacagagtcactgggtcacatgctcaaggtcctagctggtaagtggtagagctgggtaaactgacagggtgaccagagctccaagtcactcctttctggctgtgagtggctgcttctggttgctccagtgttctgatctaccatgagttttccatgtgccattatacaacaaaggcaagggaggctgggttgtggcccttctgcgagacctttgaggggaggagtgtcattttgctatttcttcctggtgtgatgcctgctgtcatacagaaaggactcaatacatgtttactgctttagaatgaattaagttggatggataataaatggaggcagtcaactgatttctatattgtttttgatatttggtttagtagtggagataggattatattatcaatatatatcacatgttccctcatatagggaaaatgaactaaggctcaaatgagattacaggtgggcaggcactctgagatcacaaaaacaagccctttctgcataggggaattcttcctctatgggactattttcttaagggcatcacttggtgtgaatgtggttcctaatgagctgatactcctctaggaggtcaagttgaaagatcaagttgaaagatagtatgagagtgtctctgttgacattggtttgaggttatctctgacactgggggattgctgtagcctgagctttgtaaaattccattaaatggtagttttacaaattgccattagctttcctatcatatgcagtgcttaatggaaaagagctggactagaggccccaaaactctttatactggctgagctgctaacccaccaagtgttgtctccaaagtcaagcccccttataccctcagggggcaaaacatctagagttgggggacacaggagtcagaagcaactgcttcagagtttccatggagggggtcaactgccctccctggaattgtaacctgtgcctcattttgaattcttcctttaacttttggatgacccgccacctgctctcttcctactatcttcattaaacccttccccccaggctgtctccaccccaagcccatgtgggcccaatctctgcccagcagcaactgcctggggtgccgtcagctcaagctgcacttaccatgaggcaagagcagctctttaatagagacgtgtgagctgatcctctggctcgtgttgctaagcagctggcttttggttgcctggagattatcatggagttgagaccacacagtgcaaacgggtgtatcttccagtgctgggatgtgcttaaacgcctaagaaccatcacacctttctcttgcagctctgattttatgttaaatccctgtaacttgagggtacatccttcacatattagtcattggaaataataaatgcacaaaagatcatgtttcgatatccctggctttacagggcttgacgattatttcctcaagatataagaggagagaaaataccacacaccttctgtagagccaaataaaggaaagaaacagatactgaacccttgtgcttataacagaggacaggaagacagcacttctgaattttccttggcgtgactgtgtatctgcatggggagaaatagaggagtaggccttgctgagtggagagcatttcagaaagttctgataggaaggactatggcactaaaagtcttctagaaaatacagaaattgtaagtccctgggtccctggtattgtgacacatatacctcttcttgagttttgacagctttcagataggagatgggagtgtggagtatgtaaccaggcattctgctaacaagcgtttgtgtgcccagagcagtggccatgtggagaagccatcagccaactgcctgaggctcacagggtagggtctgaatttcttcctacaaggaagaaatgccaagtgcggtcaatagtatgtatgactttggcctgaaattgccatttggagaccagctttggaggtagagcagagtccagggacatctctagtttctgtcaaccagccaggtgtgtttatcacctcagctgtgccctcagccctgtcttaggtgctgcggtggatatagaagtctaagacacaaagacacccgtgaagcaatgtgtgcaggtttgtgattaagtgctgacttgtgcagcacagactttgtggtataggagggcagagcagggaaccatccctcaagttcagggggttgggaaggctccctggggagggggctgggatcaccttggagggtggctttctaggagcagagggaaggagggaggaaactcgagccagggagagcatggaaagcaaaggtgaggtggttggagtgatcttgccttgtaataggaatgtggagaaaccacactggccagagtggaatgttcttgggcgcagcaggaagaaaggttgttattggaagttttgaggagagaggtgtacattaatcgacatttaacatgagtttgttgtgtccctgggctccttggagatattgagaggtggagaggagaaaagagcactccctccacaggccttgatttgcagtcaacaaatggacccaaccccttttcccatcttctcctgtgccttaaaccgtcagggactttcatgggaacctttccttatgggtggggaatgagcaatggaattggctgttcgttcctgtcctggccatttagttgctgagtaatttgttttttgatctttataagaatgggaaagagacgtatttttgtttggggagaggtataacaaatatgtccactgccagggaaataaatccttgcgccaattttgaggctttctttactgggtagaccagttgtttttgaataggaaaatgaaggatggaggcagaggagatgttaaggaaacaatgattgttgggatgggtggaaaggaagcattcttcactgtatgtttgtgttctatggaggcaggataacagagaggctgggagtgcgggctcccatgccagactgaatccagactctgccacttcctagcagtggacctttaggctggttgtttaactcaccaggaaaaatgacaggactcacttccctaccccatcaggttttgtgatggttgaaagggggttaccacacataaacatatgaaaaagcacttggcaaataatcttctttcagtaagtgttagagatgctgctgttacattactggcctacacagtgctgagaaaaaatatgtcttttcgtctatacttagtggcagcaaagagttgcatggaaattaattcatgggagaagtgaggctgaatgcaggacttggattgagggcagaaacaatggaaggcataggtcagttaccaaagccaggcctgggcttgcaggaaacagcagagctctgagttccttggtgctcatcagtgagcagggacatggacagctctgagtgcaggggaccagcctgcagacatcaagggctgcacagccagagttcttaataggttcagtgaggggaaactgaggtaccctgggctgggcagggtgttttaaaggtatccactgtggacatgggtaggcttgctaaggtcttaaagtagaaacagaactatctgaagcttgatactgggcagccaggacatgagaactgttcttgaggatgtccagtttctcatttccaagactcgtactaagggagagggtgttcccctttcctttcctaaaggccctgtggacaagcatattatcctgataactcatttccccttttctctctaagcatgctgtattttttatttatttatttatttttgagacagtttgctcttgtcacccaggatggattgcgatggcatgatcttggctccctgcaaactccacctcccagattcaagcgattctcctgcctcagcctcccgagtagctgggattacaggcaccaccaccacgcccagctaacttttgtatctttagtggagatggggtttcaccatgttggccagggtggtctcgaactcctgacctcaggtgatccacccgcctcggcctcccaaagtgctaggattacaggcgtgaaccaccgcgcccggccaagcatgctgcattttaatcatcaattagcatcagtaaacatttactgtgtacctaggatacatccatccgagtagtgaacccaagggagaattctagagcataagctcggggagctcacaagctggccaaggatcacctagactgagctgacttctattaggactcttctaagacctgtgatgttgatgacagaaggctgctttcaatcatcgtgggctgggcaaactctggcaggcttccagcaacagtgggacttgagctaggactcaaaggttttgcataagcagataaaatattggggtagtcattcctggcccaggccagggataacctgagggtgcgattcggtgggggaggcaaggctaacttcagtgggtagaatcaggttgggagaattcagtggggctgaatattcgaagcctcagtgccacccactttggcttgggaatttctagaatattgtgccagtttttttctacatcccaggaaatgggggacttgcatctcacagacttgtgaagtataaataactcaaatgttgagaaatgacaaagttggcaagcatgaattttcggcctgctgctcagcggctgactgctgaggcctgcaatgatatgcaagggaacttggctggctaattttgaattttcctttctccagggccatggcaagaggaatatgggcagaggggggaatcagtgctttgtttcagggcaactgccatacataaccactgtcttcaaataaaagcctttcacaagtaggtttccattacacagcaagtcgaggaggagctggtgaaatcagtgagttaggtgagtcccccccatcctcaggatcttttgttatggtggtggtggtaatggcggtgatagtggtgataaagaggaggggatgttgcccttaacgtagtactggcatattacatagctcttccatacaggtcatcttatttgatcctaaagcaaaactgtgaggtaggcagagtattctctccagttgaaagtcggaggctgagaaggatttgtaagccagtgctttctttttttgttttggtcattactaaattactgtgtttcttattaacgaacattttgtgacatggacagccgtggctagaagcattcagacagaggggctcctgtgggccagaggcaccaaaaacgatttctggaaatagaatttgagcttagaggtttgggctgaaaagtaggacacaggatagtagaagtatagaatgtgtggtgtgtgcatgtgtgagtgtgcacaagacacaggatggtgagaagtatagaatgtgtatatgaacatgtgtgagtgtggataggacacagaatggtgagaagtatagaacctgtatatgtgcatgtgtgagcgtgcatgggacacaggatggtgagcactatagaatgtgtatacatgaacgtgtgagtgtgcatgggacacaggatggtgagaattatagaatgtgcatatgtgcacatgtgagcgtgcatgggacaaggatggtgagaagtatagaatgtgtatatgtgcatgcatgagtgtgcacgggacacaggatggtaagaagtatagaatgtgtatagtccatgtgtgagtgtgcatggggggggtgttgtcagagaagagggaggtgaaattgtaaagatataatttgtgaattaacaaatgtagttggatttttgtggtattggaacctagagaagggaaggagacgagtattcattgacatgcctcaatgtgccaggctctgtgctaagcacttttatgtatatcatctaatttaatcattgcaatcttcctatgaagcaggtattatctccatttttgcagctgataactgatgtataaacagaagaggtacctccctccaggtctcatagtaaagccacaggcatccaggtctgcctgagtccaagggccataactgcctaccgtgccccaggaccaaacctctgggccagtctgtactgctgatccagagattatgcagcctggcatattatttgattctgcagcccaggctaaggagcattagagaaagggaggatttcatctccagaactgtaaatcagcaggaagtaaaatctctcgcatagaggctgatactctctcctgcagtggatttgaatatttgttttcccattaaatagataaacacataattgctagcagctgatgtgtgctgagaaaaaaaaatacatctttatttttccttagctctagaagaacttttccacagtgatttcaaatagtctttgagatacccaaggcttcgtgtagatgtatgccttcctaagtgactgtagccttcactcacggaggcaggagagggtgggggggcctgggtggtactggaggaccccaatgtacatagacttatctttgatgagcccagggccgaggaagagtatctggctattgtttgttcttttgggctctaagatagtacccctagcactaaactccttgacttcaaggattccctttcacctccctccaagctttcctaggctgtagttctgtaagaaactgcttctagttgttctgtgttgtgatctatgggaagaggtggctgagtcccagtgacctctacaaattttgcttgtggtgtgtgaccatgggtatagttcagactcaaagctataatgctttacatttgaatataactttatacttctttttgagatagaatctccctctgttccccaggctggagtgcagtggtgccatctcaactcactgcaacctccgcctcgcgggttgaagcaattctcatgcctcagcttcccgagtagctgggattacaggcacacaccaccatgcccagctaattttttgtatttttagtagagatggggtttcgtcatgttgcccagactggtctccaacttctgagctcaggcaattctgcccgcctcggcttcccaaagtgctaggattacaggcgtgagccactgtgcccggcccataactttacacttctctggacgtactgtttcattttagtccttccacaacaatgtgtatagaagtaatggtagatatttttaacagaaggatgccgaagcgtctttgctagaatggcaagaatcgagacagagatgaggctgggacaagccttcctcagtccttcttcatgctttttcctgccccccactaatagtgtggatggactttttttttcctagaaaggtccgcagctcatgcatataatgcatgcacataatccatgcacaaccagaattagactattctgcagctgatggagcacctggagccttttgtaccccgaggctgggagtctgggggcccctctgtcagcgctgaggtccacctgtctgagttgtgcttattgtaggcgggagcagccttttcctattagctgtgccacagttcaatttggaattgtgcgttctttcttctttccccttttagaagggatggatttagccttggcatgccaaatacaaaccctcacttcatctcgagagctctcttcccatccacccctcctctggcaggctatttacagacttgtcatgatctgctcgtcatcctaccacgcgggtcaatctaccagtgaaatgaaaggaaagaaaggccccaagccaatggatttgggcagatgagccttatataacacgtgctaaaaatatgcagctaattggaatggaaaagggaaaaatgagttgtgctttagtcttaatctgagacaccaaagagcgatagcggagccgttcctcccggcggaagatgcccatatataaataattttactcttgtgcgtactctccattttgtggctttttaaccgtgtttaattcccatttatccccccacgggactgagttcaggcagcagaaaccgagactaagggagcatgaaagaaaagatgcaggaaactgttgccccttcagggtagaaggaggcagtgtctaggtgggtggctgggtgttaagatgctaattaagctcccactcttgatttcttccaaagctaaaaacttagagaactcatattatcaaaggttcttattgccctggaaattggttaccattgggaatttttgtaagcattgcagggatactgtcttcttcctgttccatccccatcttccccccacccccaggacctcatataattatctctaatccttctcttgcatctttcatgtgtttctcgtgtcttcttcctgtacctatgatatgctcaatcctcccttttagtgccatattgtgggtgattcatgtttagtgcctgcatttcctgtagaacatgagcacctcgagggcagggccttgccctaacccactgtcaaatttctctaatgcccagcatagtgcctgggccaagatggcaccaaatatatgcttattgagtaaatgaatcattcaatgaatcaatgaatggacaaaccaaaggtcgtatatcatggtttttgaaaaatatagtgtgagaaatgaaccctgctcttattattcaagtctgatgttggtttcctttggcagtcagatgacgcctccatccagctcagtcacctgattactgttctgtgcgacaccccacaaatgaggacatgagaattctaaagatagcagaagaagatgtcacagactgaattagaaatagaggaaggctaactttggtgtttggaaagcgcatggattagagtatcacaggttgataagtgattaagagatggcctggtactacctaccagtttaaaaatgaagaaggcctagggagttcagaaaacttgaccaaaattatatgattagctagtggcagatccaagaaagtgcctggtggctcatgttggatgcttaataaatcttacaaacataaggcatgtctccagaatctggccctctccagtcaccactgtgcctcccactggtgggggaggaagcattgcacatacacaggcaactccaaggagggctgtgggtgtccaccttccaattggaatgcctgtcctttgtctgtggagggcatggcagctgcagttactcatcatgaactctgctgcctcatgactgggaacagagcaccatcgcttgcatgatttattgcacctagaatccacttaatgcctctgttgtttgtttgacattgcagccatacatttgagtcagactaaagggattccaggtgtcagatcaggaaggcttgatgtgcagtccccctaagagttggctttaggaagtttcgaggagataagaagcttgatgtgcagtccccctaagagttggctttaggaaggttcgaggagataaaagcagtcagattcttccttgctcagggtcagattgtatgccgggtttaggagaaggcaacttaccctaatggcgtgctgctgttgggcacataattgtgtccctgatccttcatttcctcctgtaatttatttcatccttataccaactctgtaaggtcactactgtccccattttcaggttgcaaagcagaggccaacaacattacatgacttgcccaggatccatcatgcttcaaagtctaagctctttgtttaagattgcctctggattgatattttagtatttctgttaagtccttgcactctgataacacatttaatttattgttatgtaattctagtattatggtgtattgctattaagcaaatggttttgtgatttatgacatgcctggctttgtgctcaatgctgtgatttatgctagagaaaccatcccagagttcctgctttcagggagcttatagttaaggtgaacattcctcagacatttaaataacaaaacaaggctccatgtgattagatgccagaatgaatgacataggtggtaaatgctctaacaacactttctggtgtcatcagttcattgacctaaattttccccactccctaaacaacctcctgatggtaaattactctagttggagccacatgcattcttttgcttcaccgttccattggggcttaacttcccaccactgctggtgttccaaatgttctataattgaatactttgtatgcaatgctgcgtatgactgattctgccaactttttcattaaagtaacatagacacacagaaaaatgcatggctagtgagtatacaggtgactgaatttttttttttgagagagagtcttgctctgccacccaggctggagtgcagtggcgcgatttcggctcactgcagccttcgcctcccgggttgcagcgattctcgtgcctcagcctcctcaatagctgggactacaggcacctgctgccacactcagctaatttttgtatttttaatagagacagggtcttaccatgagactggccaggccagtctcaaactcctgacctctgacctcaggtgacccacccgcctcagcctccccaagtgctgggattacaggcgtgagccaccacacccggccacatactgaatttttaagatgctgggtgaccagcatccagatggagaaagagaacatggccagccccctccatcctctcttctgctcactacccctcacccaacttcttgactctcaagaacgtggaatagttttacttggttttgaactctacatggatttatacagtgtatactgttgtgtctggtttttcattcaacattaggtttctgagattcatccatgtttttgcatgtagtttattcattttcattgctgtagactagtccattgtgggaatatatccgttctataactgatggacatgcacttgtttccagtttaggggtagtatgaatagtgcagctatgaacattttagttcatgtcttctggtgaacaaatgtacacgctggcattgagtgcatacctaggagtagcattgctgagtcatgggttgcagctgctcagcctcagtagatactgtcggtgttccagaatgactgtacaaatttacacacccaccaacagtctgagagttccagttgcttcacaaccctgccaaaacttgggattattcatctcttttccatatttagctgttctggtgggtatgttttattgtatctttttttgtggtaaaatatacaaaacattaaatttaccattttaagtgtattgttcagtgggatttagtgtgtttatgttactggacaaccatgaccactatccatctccaaaacctttttcgtctttccaagttgaaattccgtacccacgaaacactaactctctactccccccagccccgggcaatcgtcatgctactttgtctccatgaattttgactactctgcatacttcatataagtggaattgggcagtatttctttttatgactggcttatttcacctagctcaatgtcttcaaggctcatcccatgttgtagcaagtgttagaatttcttcttaagtctgaatagtattccattatatctataatatataccacattctgtttatccaccattctttgattttattctgattttaatttgcatttccctgatgtctttgcattgctcttgagtgcctttttatatgtgcatcatctatttgggtatcctctcttagaagtgcctacacaagtcttttgcccatttttctattgggttgtctgctttaaaaaagatgatttttagaaggtcttcatagatattggatatgagtctctgttgagtatatgaattgcaagtaccttcttgtctgtggcttaccttgtagttccttaagaggatcttttgatgaacagaagtccctgaggaatgtatcaatttatcagttattttctttatggtttgaccttttcgtattccattcaagaacaggctgcctacctgaatgtcttaaggatgttcacctatgacttcttccaaaagttttgttttacctttcacctcatatgcctgctttttttttttttttttttttttttttgagactgagtctcgctctgccgcccaggctggagtgcagtggcgcgatctcggctcactgcaagctccacctcccgggttcacgccattctcctgcctcagcctcccgagtagctgggactacaggtgcccaccaccaggcacagttaatttttttttgtgtttttagtggagacggggtttcaccatattagccaggatggtctcgatctcctgacctcgtgatccgcccgcctcggcctcccaaggtgctgggattacaggcgtgagccaccgcacccagcatgcctgcctttttaactgggagtggttattttgaccctaggggaactaggctgcttatagcacaatcataagatttgggcagcactgtagtaaaatcatgttaacttggtaacagggtcgggggactagtggaagcaaacataagtgcaggtactcctggcttcaggcatcatgtttttctaaagagttgcatgtgaattttatccagtgaatttgtccatattataaacactgagtctgtgacttttcagagatttccaccaaagttccagaggtagtctcctaactgacctctgctgtcaccgacttgccaaattaactctgtctcccattctctctgacacacgctcagggcacacttgaaagctcacagccatagtggagcagcttatgccgtactcccactgtacacttctgtccccaccagtagttgtgtgtttatcaaaagccacttgtatttgttcttattgtaataaataattgtaatgaaatcttatttaaactgagatgagtgtgaaaaaaagtttctattaagactaagttgaatgtgacggaaaaagccaaagataaatttcctataaaattactgttggccaggcatggtcactcatgcctgtaatcccagcactttgggaggctgaggcgagcaggtcacttgaggtcaggagtttgagaccagcctggtcaacatagtaaaaccccatctctactaaaaatacaaaaattagccagacgtggtggcacatgcctgtaattccagctacttgggaggctgaggcgggaaaatcacttgaagccacaaggcggaggctgcagtgagccgagatcacaccactgcaatccagcctgggtgataaagcgagactctgcctcaaaaaaaaaaaaaattactgctaaattgtgtgagaaaaataataaagctctaaaaagattccaaattcacattacttcacaagtatctttaatttttgctccactagaaagaaaccacaattgggctgggcatggtggctcacacttataatctgaatactttgggaggttgaggcagtaggattgcttgagcccaggagtcaagaccagcgtgggcaacatggagagaccatgtctctacaaaaaaaaaaaaaaaatttaaattagccaggcatggtggcatgtgcctgtagtcccagctacttgtgaggctgaggcaggagcattgcttgatcgtgggaggttgaggctgcagtgagccatgatcatactactgcactccagcctgggcagcaaagcgagacactcactctctctctcacacacacacacacacacacacacatagaaaatggaaatggaaatcatagataatgtttgtctgtaagagatgatgagggggaccataccttaaagaaattggccttctgttattggcaagtgagtacatatatttgtttttcaatattttcagtttgaatattgttagttaaaatacttaaagtacatacatcttttctttgcatgattctctgctttactgactttttattaaacaaacattctgccattcaccaaagataagtggggcagaagaaaataaaccccctcctctcagagccggcctcaagctaagaacttttgaagtactgttttagctaaaaaatattaatactttaaaatttgcatactataccatgtttataaacaaaagtgtttttcttttccaaggtcttcatataaaattgcagcttagggttgggcacggtggctcacgcctataatcccagcactttgggaggccaaggcaggtggatcacttgaggccaggagttccagactagcctgtccatcatggtgaaaccccatctctactaaaaatacaaaaatcagctgggcattgtgacgtgccggtaatcccagctattcaggatgctgaggcagaagaattgcttgaacccaggaggcagaggttgcagtgagccaagatcatgccaccgcactccagcccacacgacaaagtgagactgtctcaaaaaaaaaaaaaaaaatcgcagcttagctgaattcttgatagaaggtggtgacttagatgccttctcttctggtttgtctgctgtgtctgtgtgcacctggacccattgtgctctggaaagcaggcacactggagtcctggagtgcaggctggctggcgccttgcagtgcctggtgatggctggggtttggtccctggtctgtcccctggggttcccatgtctattggtgaggcagcagtgtgtgctcgtaggagaccctctgtcaagaggctctgttaggagccagcctgctgccctgcctttgaggctgatccttcaccctaggagggcaggcactgagggccagcactctggtcacgccaaggatgctatggcgacccactgaagaatgagctattaccctgcccacccctgcctgctgtgcccccaagcaccccttgggggttactcacttgccttcctggtatcaggttaagaggttattagaccttccatttattcactcaattcttttccctgctctcctgagtaatagctcaggaacccgtgccccagccatgctgggaacatgcttagaaagtaaggggaaacctttgggccagcacccacgtggttttgaatcactcaaggacaatctgcctaagtcactggcttggtggccgtgggccaagcaaggagtcatccagtagcgcctctgccctcactgtcctcctcctccaggtttctttaccgagaggaagccagcgggaggcccgacatccaaaacattgactagtgtgcccccgtgtggctctggtggaagggtttggaaaatgcagccaggttttcctaaccttacccaccaaggccggaggatgccctaaggacagcctgcagcccctgcagccctctttttgcgtaatctttgatttttcttgttattatttcttaacagttaagcgccttaaggcctcatttaacttgagttaaagaagtgtgattttggaggacccaaagattttccactggtgtagggaatgtctcctcccggctctgagagacttcctccaatccacaacctaccgcaggtatgtgttcttattaaaaggggcagggacaaaagctctgcctgtccctcttgtactttcaggctataatcaatcagcaggcacacctgttcagactgtgacattgaatttccaggatcagaaccagagcctggtacagacacaagccttccagtacttgtattttaagttccatagatgcttggaccttttgtgggctcctgggacagtgatcatgaaagaagagtgctcccaggggatgagcaagatgatcccctttggctgggaagaaaagattccatgtccatctggtttttattactcctctaaaaatgttccctttatagttttataattgtacttaaataaaaataattgcacttaaataaaaaaaaattggggagattatagcagaagctgttggtgtcccggccatagctgtgtcccttggtctgccacagaggtcactcccagaatacacttaggactccctgtgtctccttctgagggtgacctgagccacgatgttatgggatggaggctaacacctggtaggccccacatttttgacaatttggttttaagaaaactcataggtatggccacacgtggtggctcacgcctgtaatcccagcactttgggaggctcaggcgcgcggatcacgaggtcaggagatgaagaccatcctggctaatacggtgaaaccccatctccactaaaaatacaaaaaaaaattagccaggcctggtggcgggcacctgtagtcccagctactcgggaggctgaggcaggaaaatggtgtgaacccaggaggtggagcttgtagtgagccgagatcataccactgcactccagcctgggtgacaaagtgagactccgtctcaaagaaaaaaaaaaagaaagaaaacttgtaggtatatatcatcgttccaacaaaagctgccattatcgaacgcctactgtgtacctggtacttgataatgattacattctgtcactccaactctggaaggtagatattatcctcccccaccccacttttctttaaagaggtgaggaaactgaggctcagcaatgactgtggggatctgggagcagactgcaggtcttgctggacccaaggcccattcgccctccttgctgccatgctggcttctctacagtgagagtagcctttacgttacgcaccactaatgtcactcagagggtcccgacccttccccttcggcctcttcttgttctcctccctctgttcctcttggattctcaggagccagtgttagcccagaaatgaagaattaaagactgttcacacccacatagaaccatctgctctcttagcctcagggcagggctgatgggggtggtatttagtctcttggaggtggtatttagccccttggagaggtggtgcaaatatagaagctggtgtagatggcttggctggaggggggctatctggcaattcaatgcatcttgtgagttttggagaactagggtgactatatcatttatcctccaagaaaggacacagttgagaatgataagtgacactatacataattactctaagaaaacaggcaaaatctaggactatccttagtgacttggaacctacatcctccctacccactctatagatatccctgcattttccaccttgtgtctgtgattgacctgttgtgtccctttcaacatttcagcgcccacccctcaaacccccatcaagccttgcagcagctatttattcagttagcaaacttttcctggcctccaatttgcattctttcctaacttatgggtcccttctcttttgcctagatgctgcctttccctggctgtttgaccataaactcatggtatcatgccttattcagcaactcttagaacaaagtaaacaaatgtgcaagtttgcttaaattgagaaagcttatatttacaaagtcgtgccagttttctttctcactcatctacagttctctcaaacattggccctattcctgatgtattagattgcaaacccctgagggcagaggctgggtgttctcacccagttacacatggtgggcacctcattcgtaactctttctagcacattcagcgctctgccctctggagtcttgcggctgagtcaacactcaggaatccagcgcagtaggctaattccacgctggctctgacctcatccaaccctgctgtcccagtgaaatccagcccacagcaccctgccagggtggaggaggtgccgggctataaatctccccgttgtttcttctcccggaaaatataaaaccaaaaccaaacattatacattatgccctcactcacagagtcacttggaggcttcaataagacaagggatatgggtgtgtttcgggaaagaaatttgatacaagtgccaagtgctgttattgaagaccttaggcatttattttggtagcaccccaatagtgacaagagatgggcttgtctaaagccagcactgccaccttcccctgtgttcaccacttcattccctgatgtcttactgtcaggcagttgggccttggagctgcccttccttccgcatgttgctctttcatcatttcataccgtattctcctgtagagtagcatctgggcaccttcctttgtcgaggttactaagactttcaaagagacatttcaaccccaagtcactaagagaaaatgtaatgcagcaagtgattccaatggcagttagttaatgcacttttttttttttgagaaggcgtctcactctatcgctaggctggagtgcagtggcgcaatctcagctcactgcaacctccgcctcctgggttcaagtgattctcctgcctcagcctcctaagtagctgggactacaggtgcgtgccaccaggcccagctaattttcgtatttttagtagagacgaggttttatcatgttgaccaggatggtcttgatctcttgacctcatgatctgcctgccttggcctcccaaagtgctgggattacaggcgtgagccaccatgcctggcccgctaatgcacttttaaggcatgcttgctgtaaattgttttgggagtctgccgtcatttctgagatgtgggtgtaacccagcccctcaccatactgggctggcagtgaattgccagcaagtgcattcagaaatatgaacattctcccctgcttccagtacagcctcagagagtctccttgcttagttgacctgatgttttagaacttgtctctgcgtcttcctgccttcttcttttttgcgctcacttactggttcctgaaattggcatcagcaatgcaaattggaagcttccctcagacctcttttccagttcatcacctgacatttgcttcaggtaatctggcaccagtcctcagcaagatgtgtgtctaggagtctggtgagaggccagattaggggtagctgtggcttcaaggagtggcctgcaaagtggaatttggacacagtgcccagagtaggcaagatgagctactgggatttgggaaacagaccttccatctgtattcattttcttacctatgaagcaagaacatgatttagctttaatatttgatgtatggatggccagagtatgtgtttataatttatatgaaaacatttcaaaatgttgttgctggtatatgcagtcaaaaatatttggagacgtctggcttagtaggcccaagtcagtcaaagaaatggaagaagcagagaacacgttaattggagcaagaagaagatgatgacttgtatccagggccaggtacattcactggtccacacatacactctgttcacacagcgcacactcttgcgctcacaagtgttcactctcacgtaccgcatgcatgtcacacatgctttcactcccacacatgctttcaaacacatacatataccttttgcttaataacttacaagaattaaaaagttgataggcacctggccgggcgtggtggctcatgcctgtaatcctagcactttgggaagccaaagcaggcagatcacttgaggtcaggagttcaaaaccagcctggccaacatggtgaaaccccatctctattaaaaatacaaaaaaaaaaaattagccaggcatggtgacaggtgcctgtaatcccagctacttgggaggctgaggcaggagactcgcttgagcctgggaggtggagattgcagtgagccaagatcatgccactgcactccagcctgggtgacagagtgagacttcatcctaaaaaaaaaaaaaaaaaaaaaagatgataggcacctattccctactgaacaaatgacttatatactaaccgaaagagggccacatgctcctgggaactgaaagcaatacagtagcctagttaatcccttgaagaagcactcatgtggccacttgctcatggatttaacccattctagtggctgagatcagacccagacctcaagaagccagcatgtggtgcatgtgcagtgaccagagcttagtgatctgggcattttctgcatgttcaacaaatattggatggacatcattggtatattcatctatagattaggtgatctgagggcaggtgagaggaaaagacgtggcctccagccttaagaaacttattactctttggaatgggagatcatacagacctacatcaaaccaggcacggacggatgtttataaagcgttagactctgcagctcagagaaagcagggccgtgaaggggtgggctttgaggaagacacagaacttcaacggaaccttgaagaatgggcagttgaattaacaaaggggaggggagattcagtcagcacaattccatctgttgagggactgaggacctgctgagctaaagatgctttttgtaaattgagtggtgcctgggtcactgagcaattcaagcatgcactggaagagcctgggagggacttgaagttagggcctagataacctctacggtccactggagtcccagagtggtctgattacatgacagccttccctggctagttctgtctaggaggtcatagattcattaattatgggggagggggaggttctttattgggataaaatacactagctggaggagagttttacctcttctaccctgattaaaacaggagaatcaagcaagaggctgctgcaggtagctgaagtttttttctgagttggctccatctttcaaagagctgtcaaagcacatgcttagaaaccaaacctaattgctgttatgaatttgttagtttgaagtacggcacctctggcatggtccatggaatgtgagcactcttgcttagagatgtatgggagccaggctttgaaacatttacgtctcatgttgatctgaggcagttgctataagacattgattctaattctacctgttacatgttgacaggctgaatcgttgtgctagttaaggtccaaaaacaccaattagagaagcgtttctggccaaagacaatgcttatctgggtgcaccctgaaatgcctcaaagtttacatgtgggttaggagaatgacatcatgtggctgatgacttccaaattgtgcaagtgagaaaaaaatcatataggcagtatgttcctccctgaaatccattgagaggatataaaagagcaagtctcttgtaaatgttattataattaatgttgtcatattatgtgtgacatgtcatatatgaggaacgtgcagccgttgtgatgtgaaaggtccctgtggctctcatgaggggaacagcaggggatggcgtagggtgtgcactcagtaaattactgttggtctaatgacgaggtccccgcaggaaggattagaacacgaatggaatacaaattcctctctttcctgtgctttgttgtgtaagcacgctttgttttatgattctgcgattaactcttggaaaaagtcacttaatcttcttgagattcagtttttttcaacaataaaatgaattataatgcattatgtttattatagtacacatgtaactaaatgagtatatatatcaaaattttctgtaaacttcatttttaattaaacatcagtggaaatatgcttacagtaaaacatttaacagtaacagtgctttaaaagtataaaagaaaagttgtccccccaacctcttattctccactccccagaagttagctgctgctgttcttaatatactttagaagtgttgcacaaatacatgtgatcataattcccatttatttcacataatatttctacttttatggcattttgtaaattgatgaatcattttagccaaagaggatgattgtatctcggcgctaggattcagctgtgaagattcaggaggctttaagagctcattttaggtaattttctgcttttgaatattgtagaaaagaaattcctttgttaaaggacacaattaaatatactccaaagcagactaacattcatttattcctttatttaaaaaatgatttcgcagtcatcatgtgcaaagcagttacccagtctatgaaagtttagaaccatagcgtctaagccagcacataggagttgcacgtgggtcctatagctcagagtacatctgccaaaagagggatagggcagagggccacggaactcactgtgagcccctctagccggggcttaggaaggtctgccagggggcgctaacatttggacttgatcttgcaggttagttgtaatttagttttacaagattaactatttttctcccacaaagactcaaaatggttgaggttacacatgccagaaacatgccagaattccttctttccagagcctttttttttctgtcttaaatgttttccagttccactgtctcagaggcctttgaggaggacacagaatataaagttctcaccagacgccaggatataacaaatgtcagctaagttacacgtcttagcagaaaccaagcctcctctcctgctttctgggtcccctttgtcaggagagttcccagtttgcagaatgcaccagacagcagcaggggaggctgtgtctgtgttaagtaaacaaaggtgaatttggagtgaccgcgcagtgaaactgcccagtctagatcatcaacgcaggattgtttaagttgttcaagctagaaaaggcacagagtgtttggtccactcacgtggttttacagttttggaaactgaggcattgagctgtgatgtgattcgttcaaaggcagatagatggtgggggcgatggctgagtcagatgtggaaagaatataggtattatgaatctattccaggactcaaccatgttggcaaccctgcagggccattctatgcatattcttgactagattcattgatcccaaagccttttaggcccgaatcacttcgttggtgactcatttcttccctccattctgctttgactgctgtccatttgctccattcggactttttgatgctccttttgttccccatattgtggggtgcctcagggttccagggctgtaggaaaagcctcagcgtctctccagcagcaggcattccttatgcatgagctctacaggaaatgctgttgagccagtatagtatctaaggcacagctcagactggagtgatggctatgctggtatacagttttcaaaacttattgactcgtaaacttaagatctgtacgttttactttatgtaaattcgtcctcaatttatttttatgtatttagttttttgagacagggtcttgctctgtcgcccaggctggagtacagtgatgtgatctcagctcactgcaaccgcagcctcccaggctcgaatgatactcccgcctcagtctcccaagtagccgggactacaggtgcgtgccaccatacccggctaatttttttttttttttttttttttttttgtagagacaggattttgccatgttgcctaggctagtctcgaagtcctgggctcaagcgatccatccaccttggcctcccaaagtgctgggattacaggcatgagccactgtgctgggcaatcctcaatttaaaaacaaaaacacaaaaacctcaagtgacttcacttataaatctttggacatttaggttggcggattccctttgaaaccattttgcaaatggatacagaggtggccctaggtagagtggggacacctgtttttgtgccctcagccttccctatccctgcccttttcctttccagtaatgcttcttccacttcttgttcctctttcaacttccccccttcctgagccttccattgccaaaactttctcgcattaggcagggaaacgatggccacaccaatgcattaagagtaagatgtgttctgtgaggatttcagtttcagaggaacacctggggaaggctgctgtgtgagtccattcttgccttgctataaaggaattattgaggccgggtaatttataaagaaaagaggtttaattggctcacagttctgcaggctgtacaagcatggcaccaacatctgcttggcttctggtgagggcctcaggaagcttacgatcatggcagacggtgaaggggaagccagcatgtcacatggcgagagctgaagcaagagcggggaggtgtcatactctgtcaaacaactggatctcatgtgaactcagagtaagaactcttgttatcaggacagccccaagccattcatgagggatccgccctgtgactcaaacacctcccaccaggtcccacctccaacattggggattacacttcaacatcagatttggagaggacaaacgtcgaaactatatcagccaggctacaccacaaccacagccgtcactggttgagcacatgctatgtaccaggcaccatactaagtgctttccatgagctatcacgttcaaccctcacagtcccctgcaaggcaggtactcttattaccccttcctcagagaagttttaaagagatgctgcataactgtgctccactggtggggggccagattagaacacaggcatctggcaaagccagggctgtctgtctttatacaaccccttgacagaaaagaatgacttgttaatggtggaatgtcctgtactgatgggggaagaccatttgaaggacttctctatctccttaaaagacaccacatgaatggccacttatccctatgtgtgaagccatggttgaatggtagtgatgataaaccaaaaaatggggtggattcagtgcagtgctctgcatgtacaagttgttttgtgttcattaatgactagggctactgttaatagctctggacaggattggttatgaatgtggcacatgccctcccagggcgtaggatgttggccagataccaaccaaggtggccagagtttgcagaaccactttgtaaaggaatgaggaggagccctgcatcccttaaatccctgcccacaactgggttctgagaccacaggactcttgataagattgtggtggtttgtgagttatgcccggtcatctatgactaacagtgcagtgaggccatttggcctatttgcttttccattttttttctggctctcttcacttgaatctactttccatttaaaatttatgatacggtttataaatgacccaagtcagaaccttgggatgtgctggctcagctcttcccagggcttacaggggaagcaggtacaatggaaacatctgtctatttgatgggagagaatgcaaaggcctagaaaacagaactgtctaatcccaaagacatcagccttccagctcttgttcaaacaaggtcaacgatggtgagaatccccctgccagctcattgcctctaatcttggtgaaatccatgctggtgctctgggaaatagccagttataggaagtttttggtggagttccatggaggaggaggtgaattaaaagccagaggaaccaggttgtgataaaggtaccaatatgacatgctgggttaatagctcccctgcctgccccatgggattttggtggaaagaaagtatcaataaacatgggtgtgaccatgttctggaacagttcaggatgctgcaccagtgcaagccttagctatcactccgccttagaggggtcaactcctattaactgtgcatatgtaaagtctccttgggtgggcttgccacagccaggagctccaagaactgctgactgatgtcagcaaacccagtagacctagactctatgagatattcagcttctcatctttcagcaccctctaaaggaattcacatcagaataggctagacagaaaactctctcaacctctctccatcacctggtgtgtttattgttattgcaaaacagtaccacctaaagtgtggtatatctgtgcaatcgaatgttattcagaaataaaaaagaaatgaagtctgagacatgctacaatatggatgaaccttaatcactatgctgagtgaaagatgccagttgcaaaagaccacatattgtatgattctatttgtgatatgtccaaaataggaacatccatagagataaagtaaattagtgattgccaggagccagggggtgggggagagaggcaggcgtgaatgagggatgcctggtaaagggtgtggaacttctgtttgcgggggatgaaaatgttctaaaattgactgtagggatgattacatgacagaatatatacaaaaccagtgatggtatactttcaacaggtgaattgtatagtatgtgaattatatctcaaactgttacttaagacaaattatgcaaactaaaataacaatattaaaataaaataatactaaaataacctaataacaatactaacacagctatttgaacttttgcatatcatcatctgatctttggcagcttggagacatctttttgtgtggttacagtcacagtgtgctgttttcagttgtctatagtccttataattctgtcagtttgatattttgcttaattattttccaattgataggcacttaggcttccagacttcttgtggtgatggttgttactacaaacagcatttctgtagaattaaaacgtttctttaggattttctttgaagtgggactatcgagtcaaaatttcttgctctaaagtgtatatttcttttataacctattgtacttaataaagtttggagttgtaaaaatgacgagaaacaggaggaagttagagaactacgtatatgtgaagtccgcagtgttgtttttgtacagtaataagactgacctgccaccccatcctagaccatgttcaggcattgctcacctacgtgaatgtcttatatctaagtggtaggcactggctgataactggagaacaatttgtgaattgcatctgtttcaaagttgtactgtgcagaacaatcacttattagtgttcatgttacatcttcaaattcaatgcactggggttaagtctccttgctatacccataacgtggcacatgcaaaataaaacaaatgctcattggcacatagacatacagagcctttaaaaacattggaaatatttccaatatagatgaaaaagcaagaatgatttagtgacaacctaataaaccatagttagcaaatataaaaattttgtattcgggctgcgtgcagtggctcatgcctgtaatcctagtacttggggaggccaaggtgggatgatcgcttgagggcaggagttcaagagcagcctgggcaacacactgagaccctgtctctaaaaaatatttaaaaattagctggcatggtggtgtatgcctgtagtcccagctactcaagaggctgaggtgggaggattgcttgagcccaggagctcgaggctgcaatgagctatgccagcagcactgcactctagcctgggtgacagagtgagaccttgtctcttaaaaaaatttttttttcacttgctttcttgacgaaataaaacatcagagtcagttcaagtctccttgttgggggattcctgctctttctgtctgcccagagataacccctgggctgaagttggtgtttagctcattcatatgtgaacacttaaaaaaatatatacaagactgccaatatatgtttgttttgtgaattttactttatataaatggtatactgtacacattgttttgtaacttgctttttaaatggaacataattttatagatttatctgtgatatagatctggttcattcattttaattctctatgctattcctcgaatgacaatacagtatcacagtttttacccattcatttgttagcagacatttaagttgttttcagttttttatgaccacaaacagtgttctagtgaacatcgttgcatgtgtctccttgggtataagtgtgcaaatctctctaagatatatacatgtatactgaggaaggacctgctgggttgtagaatatgcacatcctcagcttagctgactattgtgtgattgcttatcaacatggttacattagctcacatccccaccggcagtatgcaagagttgctttacatccttactaaccctttaatgtcagattttaatttttgtcaactaataaatacgatgtggcatcccactgttttaatttgtattgccctgattacctttaaaatattcttttaggactattggccgatgaattgttcatttattttgcttgttttttttttttttttgattgttgttttttttttttccttgagggtaggagtttttaatatacattgaactaaatctgagtctgctacatgttgcaaatgtcttttctcggtatctttttcttgtcattatttatggtgtcttctgtgcagaagtcttacattttaatgatcatagttggtgtttgctttttgctttctgtttaataaatcttcccctatctaaatgacacaaatgctttcctgtttattttttaaataaaagtttttatgttttgctttttgcactgggtctaacagttttttctcccccagtttgacaaccatggacctaggatcatatttatcggtccatgttttccctcttgaacctcctgtttctcatctctgttctatccctttggtctgtcccgctgatacaccatgttttaattgctttgactgtgaaattttgatatttgatagcgaagccttcattctttgttgtttttttttttaaagaaaactcagtccaaatattctttattcttatcaaattttttgttgcttttttggccatttttcttctgtgaattttaggattagcttttcaatttctgtgagaaacctagtaggatttaagttgaaaatgcattaatttttgaattactgatgagaatggttattacatctattcaagtttttaatttctttttaagtattatgaagcagaacacttgcctaaaatgaatgcttagaaaatatgtctctaattggcatcctgggaacataacaaaatagttttctgcaaaaatgaaattttgaccaaaggctgaagccgtcttcagtgaagttgtttttacctttactgaaaatcaatatatttaccaaaaatgaatgcttagttttaacactaggagtaaaaacagatcactgctttatacaccagaccatttattaccccatcatgggacatcagccaatctctggtctttaggagaatgcattttattcccacttcttcttatgaaaagctttaaatgaaattttctggcagaatttcagttacactgagttaatttatttctgcttctcacattctaattttgaggatggcagataaagatgtcacagcacatttgcatgaggaactctggctggatgaggagaaaataacttcaaggtcattaccagggtttatgctcgactgtgccccagtttcccctgggattacaagatgcctggtttgatgatgcccaggccaagtgtctaataagccatggagtgaaaaaggttacttcaagcacgcagagggcaaagcgagagatggatatcaaggggcggggtgcagatccacccttgtgtctgccaagtgtctgttgttcacacttccgttggctcaaggtgagaagtgcttggggacagcaacagcagctggtggacaagagggagtactggtgttcctagaggaccaactttcctagaggacctctcagaactggctcctctaattaagtcctggaactatcagcctcatttctttgacttatctctgcccacttggtggctcccgatctgagatcatgttcacttggccaccaagacaaaagctccaaatagtgtccttgtacatccccagtcatgactgtgaattgcactacaatcctgcccacagcttaatgctcggtgcccaaaccatcactgtaaagccagtgttcaaacactatcgtgttatccggtgctgctctggctgcaaaagatttcctggggagttgattaaagttacagattttcaagcctcacccagtggaattggggagtggctctggagtttatggcttcactagcttcccaggtgattctggtaagtagcccagattgggaaccactgctttagacaactttaacctaaggctctaaggaggaacccagtcctctgggaaacagcttcatacagactgtcgaggaagtcgtgtttccagtcagtcatgccaggtaggtccctctgtcttgcaagtctttgggctttcataattcctccctaactctgacttcctcactgagactaggcagtatgtatgtgtccatggcccccactcctgagtcaaggcttctctgggcccagaaagacagcccttttggcttggggccacacttagatgttaaccacaagatacgtgctctgcttcctctaggtttaaaggtgccgctctccctaggaccaatgcagcatctcacaaaatgagggccccagctgagccaatgcaactctgtgctggaggcaaatgtagcaaaggctgagcacttttgtacacaaccacatacaatgagtctggttcttccacacctcatcctctgagtttgtgccaagctggatcaaagcacgagtgagtggtttaagactgtaaaatgtgacaaactcagttgatccagactctcagactcttttgttttgttttgttttgttttttgagacggagtcttgctctgtcgcccaggctggagcacaggggcgccatcttggctcactgcaaactctgcctcctgggttcaagctattctcatgcctcagcctcctgagtagctgggattacaggcatgtgccaccacatccagctaacttttgcatttttaatagagacggagtttcatcatgttggccaggctggtcttcaactcctggcgtcaagtgatctacccgcctcggcctcccaaagtgctgggatcacaggcatgagccactgtgcccagttgattcagactcttaaaagagcctgactcctagaatgttagacctatcacctagtctgatttttccatcacatagataaacaactgaagcccagagaaggaaagggactcacccaactaggtggtggtcggcaaaagagcccaggccccaaagttataatgatatacacatttcattacaccatgctgcccctgggcctcgcaagcgtacataagtcatcactatgctgggctgttcttgttctctctctctcatgggcttaacacacagaagcaccctgaattttaaaccaataaaacacccctccttttgctggaagtatacattctaaaggaacatggactacacgcagaatttattataaaatacttcaggctcccttgttaactaatggttcaaattaaaggaacataaagcaacccctattttacgttgaaattgctatgttaaaagtttagatttaccaaacagttgaattaagatgtaattattagcatttccaaaaaatgtagtcgctcttcaaaagcactcaccacaggattcccttatatagcacttaatgtacttaatgtactgtacatttaaaattggttttgattgatgggagggccattgacatgcagctttccaggaacacaactttttatagaaaaagtaggaacactgaatgtgctttgtttaggctattatgtgccatgtcacattaaaagtctattagacaaccagtgtctcttttcaacgagcttataaattaacagcacgaaacacagcagccaaataaaactatagatcacagtatgaggatttgtcttaagcggtaggctgagttcaccctgacatctcattttatggacagggaggtcaagcccgttgcctttcttgacattactgagtagtgtttgagataatgaaatgcttaaataatagtaattctgaaataactctagatctgttttcaagttttagcatttgccccggattacctgggaggtgaacacagttctgaacccccttccccatggccaggtggtccaggcaaatgcatctgtaatgccccagtacttttgatggaacatacctagaggatctcagaaccagaaggaacttgaaaaacatgaaccatcccatgtaattttgtcttggggaagatgaggccaaggcaagagaaatgacctacccacgggtcacatatttggttgtgacatatgtcagagccaagacgattctccattactggactccctgcccagggcacttttcatacgcttttcaatttggatagaacatcctccttgctctctctcttcctcccttccctctccctgaacagccagctaccgctccctttcccctcctctggaacacctctcctggaatacccaaccgtgggctgtgccctaaactaaaaaatgacattgaacccaaaacactcattcagtgtcactgctgagtcagaaagtcaccggcttgatcagtgcggttgtccctcgatgcctctcctactttttaattgcgcccccatccactcttgctgtcactgctttaaacactggctgcacattagaatccccttgtgagctttaagaaaagtaccagtgcctgggctccccccgaagagattgtgattcagttgtctgtggtgggccacaggcgctggctttctcagcactctccaggtgagtttaacctgcaggcagagttgagagcccgtgttgtgcaatattagtcctaattattttcgtgtacctcctggacctaaattaccagttgatgtaggcaaagcacagaggaagtcaaattttcacagaagtgaatggattcacaaaagctgtctattttcctaagacaacataagctgcccttccctactgcaatcttatctagtgccagtgcctttgcctattacaaaatttaaaaagactttcaaatgtcattttctataaatctactggccagttcttggaataaaacaaatctccttggtcctgctcccactttgaaggtggccttaggtgcgcagggactttgtgtggccctagtgaatcttggcaaggaaaacagttctcaaaattgttcacaaacgtgtgcctgtgtattactgaaataagtctgtatacccaagccaaatgacagctaatggcttccttatcactaaatattggagtcaaaagaatttagaggccaggtagaaaatttctgaagagcagacaattttcttgtgatcaaattgtaagttccttatcaatattgcatcatccattaaccctttattgtaaaataagcaaagaacatgtaaggaaatgtgatatgagactctgaataggatgacatcagcccagcatgagggtcttgcatcactgttctgcaggattaaaagactaattaaattggcctatctaatttaaacataagcatgcatgaaaataggaaacattcatagagggtacatattaactcaagatgcttggccagacttctacaagagaaaagtaatgtatagaatttgtttgattagtgtttaaacaaagggggagaacctcatttcaatgtgctatcatgaaaggaatcttatacaaggaaacaattactgtcaagaaatgcaagtacttattgcatgctcttgtaggccctttagggattgttaaactgtttagaaccgaggatagcttttattttgtgaaaagacattttaatcatgtatgcaagaaaaaacacagtgattgtgagctgttaagtggatgaattacagtgtgtttggtaccccattgcttctcctacctactattgtcaatactttagtatttcatttaattaataatgattagaactaggcaatgggggtatggggtgaggttgggaagaagcatgcaaaataaatcttaagggctacttttcctaaagtaactagcaatctagctgaggaaacaatatgaacactccatcacgcactccatcaagtactccatcaagtatataattaaatgtttaatggatgaatatccaattcaatagtaaagactccaagtactatggtagttcaaagaagaaaaagatccctgtggactgccctgatatcgaaaggtttcatggaggaattagatctcaaaggataggaaggatttagatgacgagagggcagaaagtcctgggaaggagaactggtataatgagaagtttggagggaggaatgagcttggcctctgagagggtttgccaggagactgacctggttggtgtgataaaaacatgggaggaagaatgaaaggcccgtagcataaaagtagaaccagacagtgcaggggaccttgttaatacctgatgccccagctttctctgaactcttatgtttatagtctcttctgctcagctgaattcctagttataggctatttacatgctccaggcatgctgggctggtggtactaacctgtagtcccagctacttcagagtttgaggcagaaggatcgcttgagccctggagtttgaggccagcctgggcaacatagtgagatgctcatctcaaaaacaaacccccacatggataaataaatgctttaggcagatgttcattctaaattgcgctcagggttattttttgtatctttagtagctcctgacacagggttgcaggtatagtaggtgtgccctagtttttccctctatttaaaaaaaaaacaaagtgtcatttacatacagtaaacttcaccttttagcatatagttatttgagttttgacaattacatacagtcgtataaccattatcgcaataaaaatatagaatagttccatcacctcccaaattctcccgttatctttcccctttcatagtcaagccctttgctcaccctcagccccgggtaaccgctgcggtcttttcagtgcctataactgctttttccagaatgttgtttaaatggaatcgtacagtatatgtgtagccttttgagtttggcttttttcatttagcatggtgcatttgagatttatttatgtcattgcttgtgtctgtaattcattcatttttgttgcagaatagaactccgcactttatagctacacaccaatttgtttggttgtccttttctcaattgagagatgtttggattgcgtctagtttttggtgcttataaataaagctgctatagatattttcatacaggtttttatgtaaacataactttttatttcatttgaataaatatctggaagtaagattgcttgattatgtatggtaagtgtgtgttttattttataagaacctgcaggctggatgcagtgggtcacgcctataatcccagcagtttgggaggtcaaggtgggtggatcacctgaggtcaggagttcaagaccagcctgaccaataatggtgaaaccctgtctctactaagaaaaaaaaaaaaaattagccaggtgtggtggcatgcacctgtagtcccagctactcaggaagctaagacaggagaattgcttgaacccgggaggcggaggttgcagtgagccaaggtcgcaccactacactccagcctgggcaacagagcgagactcggtctcacacaaagaaaaaaaagaacctgcaaactcttttccaaagtgacaggaccattttgtattctgaccagcaatgcatgaaagacacaatgctgaaattgcatgttcaccagcacttcatattttcaggttttattttattattttttaacattagcattctaatagatatatagtggtatttcactgtcgttttaatttgcctttttctaaaactaatgttgagcatcttttcatgtgtttaattagcatatatcttttttgataaggtgttgttcacatttttagctcattttttatttgactgtttgcttaataattattgagttctgagagttctttacatattctacatgtgttttaccagatgtgtgatttgcaaatattttttcccattttgatacttgtcttttcattctcttaacatcttgcaaacagcagaggttattaattttgacaaagtcaaatttgtcaatcttttatgaattatgcttttaatgtcatagctaatcttcacccaaacccaacgtcacaaagattttttgtgttttcctccactgttttatagtttaggttttacgtttttgtccatgatctatgttgagttcatttttgtagaagatatgggtctatgcttattttttatgcatggacattcaattgtccaagcaccacttgttgaaagactgccatttctccattcacttgcctttgcaccttttttgaaaatcaattgtatgcacatatgtggattaatttctggactctattctgttgatctatttgcctatgtgtttgttttttgttgtaatgataggaatgatggtctttccagctttctacatcttaatcagtgttctaattacttgtgaataagtaagttgatcactcttaggcaattcagataggatagataatgaggtctagatagttcttaaatgtggcagccaggcatggtggctcatgcctggaatttggaagcactttcggaggccaaggtggaaagattgcttgaggccaggagtttgagaccagcctgggcaatatagcaagaccccacctctgtaaataaagacccagacaggcagggcatggtggcacactcctgtagccccgcatacttgggaggttgaggtggaatgatagtctgagtccagaggttcaaggctgcagtgagctgtgattatgccactgcactagatccagcctaggcaacagagcgagactgtgtctctatttttttttttttttttaatgtagtcctggtcacatcatccctaaacttgttagaagtggttctcaaccccttcccagagctggcctgctgaatgagcagttctagaagtgaagtccagcagtgtatgtttgagcatgccttctggctaattctgatgcatgctgaagtttcagattcactgttattttaagcagagagaacctcagaatttagttcatttagaagaaaatggtgatggagttatattaataaacctaatctattaggcccgcaaaaaaaaaaaaaaaaaaaaaaagaaaaagaaaattgggccaggcatggtggctcacgcctgtaatcccagcactttgggaggccaaggtgggcagatcacgaggtcaggggttcgagaccagcctggctaacatggtgaaactctgtctctactaaaaatacaaaaaattagccaggcgtggtggcgggcgcctgtagtcccagctatttgggaggttgaggcaggagaatggcatgaaaccgggaggcagagcttgcagtgagctgagatcgcaccactgcactccagcctggctgacagagggagactctgtctcaaaaaaaaaaaaaaaagaaagaaaatcaaaactcatagaaacaactccctttcacactacaatccacctgccagggagcacccccttgagatgtcctggcctctcacacaccccctatgctccctgccatatatattgtggtgagagagggagttgtctctatgagttttaattttctatgagttttagcttcttctgtgtgttaattcaggtttgtcaagggattgtggttattgtctgaaagacagaaacaccatttttcccttcctctggcctttaaaacatatatatatatatatatatatatatttttttttttttttttttttttttttttttttttttttaatagaatcctttagccatcacattccaacaggaaatgtgttttgcccctaaggagcaggaggcaatttctgatctctagaaaggtcttcaggctagctattaacatcagaaagagccacgtcaggggtctaacaggtgcacatttcaggctgacaggttaagagtcaacctgaagttctggttaatgactaattaagttgcgggtagttcttagctagaaatcaactggagttctcatgagctgaaaatagggagaataatatctttttagcttttaaaatgcaccgtgcttcctcagggcaagaggaaggtggttgtcgtggtcttgcctgtttgacagtagatgcaggaagacctctacttccaaggaattatttgtgccagactgctagccagagaggccagggcatctctagaatgaaggagtaacgcctttttgaacactgcaatgtttttctcaggcaggtggtttggaagaacaaaatatataatgtcatgtcttcattttagttctcctgccttaaacacatacatgcacacagatgcatgagagttgaaccttttacttcagattttccataataagtttgatctgggcctttgctgactgctgtgtttggagaaagaagatcatgtttatttaaaaaacagaagcattaatttcaatctttgtggcctcagtattgaggaggggactgacctggagagagaatagactttttcttcatggctaggtgttcctgctgggcacaggatggctcagatcagatttagggaacactttgatctgaaactttcttccttgcttttctcaagcagatacaaactttttgttcccagaggttaatgcctgtgtgatgattatatttgctccggaatcatctaacttaccctcttacctttcaaaattctgcatgaaacagccagggtccacacaaatgagctaaagtggggcctctggtcttctctctgtcacctccttatgttccctggcatgtgtgttgtggtgtgagagggagttgtctctatgagttttaattttccgggttttatttgtttgtttgtttgtttactagcagtctggtttcaaaaaaactttcagaacttcttgtcagaccccatatacatttaaaagaaattggcctctcctcttcctatctgctaatcatttttcacatcgttttttcatttacagcatttgggaaggaaagttcacttaaaaaatctttagaccacctgttagagaaatacaaacagaatgcttgttttctgggataaaggggggaaaacctccatttcatattttttaatgtgtgtggtatggtggaaaagacatgaactttggaaccggtctggccttgggaccaaatcgaactccaccacttaataactatgtacacctagatgagtcacttggattttcttagtgccggtttcctcattgtgtggtggaggtagtgatactaatcgtgtagaatcctttcgagaaatagagaaaatatgttttaatcacctgctataccataaatcagtgttccccaaccttttggtaccagggactggtttcatggaagacagtttttccactgatgggcagggagtggtgtggggggcagaaggggaagggcattagattctcataagaagcccccaacctagatccctcacgtgtgcagtttacaatagggttcccgctcctatgagaatctaatgctgctgctggtctgacaggaggtggagctcaggcaataatgcttgcccacccaccaatcacctcctgctgtgcagccaggttcctaacaggccacagaccagtactgtggtcccctggggattgggggcccctgctgtaaatggtgcctattatttctaacatcccgttttcagtggattttatcttttgctttagagatgccaagcacccatcagcctttgactgaaaaattccccaaatttagctcctgcctcactctccttgcagttcctacaatcctttctgccccccagttttcctacctgcccagcacaacctctccaaaaaggatctgagattcacctatgttgaacttataatggccctcgcagaggctttctgtttcaacagggttgaaagcctggcactaaggagtaaagcaaacacagaggggctggaagcaagagggatcactttattttttagaataccaggactttagcgtctctgaattcccagctctcaggagctaagtcagccttactcacttatacacaggccctggtttccatgtgatagtgattctaatataagctgacctatcatagcattgatccttcctctgcttctctccataggcaggagtgtgtaacaccaagtacagtagtcacaatacctacctcctttccccccccgatttggttgagcagtgaacaagtctcagagttaaaaacatttttccttgcaatgtttaccctgactttctcctgctttacctattacctcttgaatgaagtatctactgctatataacaagttatctcaaattcagcagctgaagatagtaatcaagatttattgtgtcattcattttccgtgagtcggtttctgtaaccccatagcctttagggctgcaatgcctatggcactaaaagtcttgttatttgtttgaggggggaatgtcccatttcacttggcacatttcacaccctttccatgttcaccaagtagcacctggggacaggcagagaccccatttagactttcagttcaggagcagctttagctgaggagccaggcttgttagcatttcagaggtgtagcagcctgccttggccagggcagtgctactccattgccaggattcttttttttttttctttgagacggagtttcacttttgttgtccgggctggagtgcaatggtgtgatcttggctcactgcaacctctgcctcccgggttcaagcgattctcctgcctgagcttcctgagtagctgggattacaggcatgtgccgcgaagcccagctaattttgtatttttagtagagacggggtttctccatgttggtcaggctggtctcgaaatcccgacctcaggtgatccacctgcctcggcctggcaaagtgctgggattacaggcgtgaaccaccgcgcccggctgccagggattcttaagactgtggtagacctcaaccccagcctcgcctttgctacctgttcccaggtactgcttaaaccaaaacctactgaaaaggcaagtgggtgactagcgtatgcagggcttagatttttggattaggaaagtgacactttctttaagtaaagacacaactcttgggctttcctgaggtcagcaaggtgtaggatggaaggtgaattttaggaaagaagttgggtaatgtagaaccattcctactttccccccagggccctaaagaatgtatacctataagaaatctggctgagatttaaggcagggcctgtggccagtaatatttaccttctagacaaagataactcactcatttgaggaatttggtcgctacttttacttcattagcaccaaggactgagctaactggatctcccttaagcatctgtggcctcagaattttttctcaggttcattaaactgaaaacgcccaccaccccccttccttttttgttcccctcttggcagttttcattttctccaaatggaagtttatagatatgcagctcagcatttagctgatgtttctcttggttgcagagctattagaaatagacttttttcctcacacagtgactattcttttcccaacattctcatatcactatagaagacagctccgggggagagaggagttgccaagccttaaggcccgaataactgggaatctggcaaatttcctggactatgatgtcccctggcctgggagaagtgccagcagcgggggtgtcagggagaggcactgtgctgtgtgcatgtgcgtgtcagagctcctgagccctgaaggagcatgagttcgattctgggatgctttcagttattaaaagcattattgcttttgaccttctcatccctctctccatgtgcagagttttggtcagtctcagtggaacataaaaactggtaagaaaaagtttaattgaagcaggtttttgaagccaaaggaaaagatataagttccacaagagctgtggccattatagctgtttctgtggaaagacttggggcttgttcacctatatgaagcttcctaagggacgtctatctcccagtgccctgccgtggggactagatgggcctgggtcgatagaagggaggatggaaggaaggcaagctcgtttcctgatcagtaggaaccaaaaaaccagggagagtagattgtgttatgtaaaatgagtccctctgctttctgggaacatgtggggttcatttaggtaattaccagctcagactgggtggcataataatcatctttacttgtttttatttatttatttttttagaccgagtcttgctctattgcccaacatggagtgtggtggcgtgatctcggctcactgcaacctctgcctccctggttcaagcaactctcctgcctcagcctcccgagtagctgggattacaggtgtgcgccaccacgcccggctaatttttgtgtttttactagagacagggtttcgccatgttggccaggctggtctagaactcctgacctcaggtgatccgcccaccttggccttccgaagtactgagattacaggcatgagctaccgcgcccggccatctttacctcttttatcctctgtctttctccatttcctttgccttaccattctttcattgccttttatctccattttatcttcagattccctgaaattcttccttcccaggtcatctaatcagaatacccacctggtcagcattctgggcgccctgccgggactccagatctcttgggaaagaccattatttttctttttaattctgactttaaaattagcaagtgctcaaaactgccttagtaaagaaggagtttgaggaactaaaaagttggctcactgcggtagtctgggaaattgtgcaggcacgtacctttgagaagctctgtggagcccaaggtgaggtagctgggagccttgtgacgtcgaagggtgtgatcttgagttcactttgctttagtctcatgaatgtggcctgccactgactgggtgatgtggaatggctgctacgaacagcactggaagggtgtgggtttttcaataaataaccccatagcctttagggttgcagtgcctatggcattaaaaggcttgttatttgttcgagggaggaatgtcccactctactcggcacattcacaccctttccatgttcaccaaccagcacctggggacaggcagagaccctactaagacttttaatcctgctgtccacaggcccgttttaatacagcattttagaagcatgagcagtggccagaacctggcctcatggaacgtgagctccattgtgctcaggtgcccgagaatgcagcaattgctcagtttcctgtgattcatctcagatcatcactggcaccaacagggattctggtcccacccttggctggtgccccacttggcagatttcccaggctgggagcactctttgagctttcagcaggtctgcctggaggctttttgctctgtggtttcctcctggaagtagtaatttttactgggtaccagaagcatgcagtaaagttccaccatgactgtaatatgtaactgtgaatggatggaggagggaatgaacgaatgggcgaatgaatgaatgaatgaatatagactagaggctagcaggcttcctgcttaagtgaaatcactgctcctcggtgcttctttgtgttcaacacagtgtgcttggcatcagaaaccatggggcagtgagattggggtttggcatcttcttttctcacattatctgtcaatcaccatgttttgactcagtttactctaatgctgctgtgcctaccgtatcaaagtctgagattttcactttttttttcctatgtagtgaacactagctgcagttttgttttcatacctggacagagcataaatcctgccatgaacacagcaaagatcattcagaaagtgaagaggaaggagaaacaacggttcatgttaaacttgagatgctaatcttgaaatgccacccgttctcttctgattagattacatgcagaataaaacatgcaggcaatctcaaacctctcctctcagacgtttctgattcttattgtgtgcctctctgggaagatacagatagcatcgaataatctctctgagggaattagttgctgtttcctctttcctgttttgaacaaattttctttaatgcattgtgtgagtacacatgtagaacatattctttgacatcacataaatatttacacaatatttaaaactcactgtcatgaagtatttatttcacttgcaaacattatcatctattgttctatggaaaattacaaaataaaaggcacggctgctttgatttttagtacctggttttgtttgttttgttttctttccattgaccttgcatatttaccagtgaatttataaagtcaaaacagagcattattgaaagggaaaattaagtagactccccagagattgagaggtaaagtttgcaccctagcttctgtgaggagcacctcccagtcataatcactgtactctggactatcatggcaatttcttgctttgttagcagagacctgtctattaaggaccaaatccagaatatctgagaacaaaattgagggagtagccatgggttatccctttgtgcctagaacattgcctggaatccagtgtccacatgataaacatttttaggatgaatagcttattatatacccttgcagaaattttccatccacagtcttgcttatatgcgtttgagtgtattctttttttctcattttatacaaataaatacacactatcgacatgtttcttagttttctttttctgcttagtttcttggtgggcttagcatagctgctttgttaaaccgctgcattacgttccattatgtgggtgtgccatgacttaatcagtccccctcagctttcttttctaagtatctaggtgagagcaagggcagatgtgtggggaggtgggtgatcagcagctgacaggaaacttctacacacacagttgggtacaagtgggactaggctattttgccatccttgggaggcgtggatggctgggccagggtgggaaatcccaaactgacatttactgttggctgcatggcctttcacaagacagttatttaacctctttgtgccaaaagtaatgccttgtgatattagaggaagtatgtaagatgcttacatattgcatgaatatgtaatgttgatacttcatagatgtgtaacatgaccgcaggtgcctgtgatgctcccacaaacgtgtgcgtgagatactatctcgcacgtgtgtgatgctctgtcacacatgtgaggtactaccttgcacgcatgcgggatactgtcgtgtgtgtcagatagtagtacctcatacacttaaggtgcttggaatcatgctcagcatctggcaggggtcccataaatgctagctgacatctttcagcttttgaataggcagggtttgacagttatttagaccaaaataccaggatagttgaattgttttctttgtgttgtaaaattaccttgaagactataatcactctttacctggattccaagataagcctcctgatgagctgacccccaccccaaccccagggttttcctcaatctagtcccatttctgcttttttctagagttaagtcagtgttccttgcccagcccagtctttctgacagttttcccggtcctaaagccttgtgggatggggtgtggggaagataaggcaggcgctccctcttacagtggcaagtaggtaacatctgggggtagctgaaccccagcaggttgggggccacaagggagcatcggagcaggttctgcagggtcagggatgaggctgtcgctcttcctcagtgaggcattgttggctccagggagatagagagatgcagggtttctggaagtcagtattggattactaaagccacagctttggtggatacagcctgtttttggaaagataaaagagaaagaacctgaaccatggctgtatatgtctgatctcctcagggccaggggtgtgctggtggtaaatgtttaacaacaacctccccaagaaagtcctgatttgtagcatttgttgattttcctgtaaatacccccatggtggccatttcacgctactatgtgtagtcctcagatgtggagcggtatgtactacaggatccagagctggcttcaaaccccactgccatggtcataggaggagaaaaccctcccttcagcatgtgctagatggcaggtgaaattcaacaatcaccatctgaacccatcacatttttggcagtattttttctgtcacttctggtccttacactatcaattttgggggccatcctggagtgtcccctggggtgaaggaggtcctggaggcctacctaccaccccacagtagaccagcagagggagagaagggcaaacaggggccaggcttccaccacccttgcgaagcctggtatgcttaggaagaagaacttcacttgggcctttatcaaccattatagtcaaggtcaggactatggtgcaagcagaatttaggactgccccaagtctcaggaatcaaataatattgtaatgtagtagtttagaaaatcagattaatgaaggaaataacaaaatttgaagtaaagatacagtcaggatgactcattttttttctttttttctttttgcctcagaatccaacatgggtctgtgctgctcctctcagcttgaggtttgggttgagccatggaattgcccctctcctgatagataagataggaaaacagtggctcagagatattaaatgacttgttcaaggatatgaggcaggttttgggaaaggacaaaatttgtccagtctgctaatacctcattcaaccatactggcagaaaggggaggtcaaaagagagagctcagagaaaagaaagaagaccccacagcacacctgcctggggaaagatccctgtgtgccctgaacacaaagggtaggggactgtcctgcagtgaggaatgacagtggtgccccaagatcatgcatgttggcaagtctggcccaggcaaggttgacccttgttcttggctccatatactctggaaggcattgctggcatccaggcatacgtctgtgtgtgttagaaattcactgttagcgattcacaactgcaaagatatggaatcaatctaagtgctcatcagtcaatgagtggataaagaaaatattacacacacacacacacacaccatggaatactactccgccataataaagtatgaaataatgtcttatgtagcaacttggatggacttggaggacattattccattattctaagtgaagtaactcaggaattgaaaaccaaagactgcatgttctcacttaaaagcaggagctaagctaagggtatgcaaaggcatacaaagtggtataatggacattggagactcagaaggagaaggatgggagggaggtgatgatgaaaaactacctattggggtacaatgtacacaactcaggtgacaggtacactaaaatcttagacttcgctaccatgtcattcatctgtgcaaccaaaaaccatttgtatcgcaaagctattgaaataaaaaagtttttttagaaaaagaaattatctgctgaatattcctaaactgaaaggcaatctaagaacactgaggttgtgggtgcccctgaccccacatgaggagggcgttcagtttttccagcttgctttttgtgtgggaggagacgtggtgggtaagagaaaggacagtggagcagtgaaaacttcaatgaccagactggccagaaaatgtggtctagggtttggtgccaggggccatctctccctgagtccctgagtgttcctgtggtgcagactgagaagtctcacccccaaagaaaacgggccaggtgaagttaggtaaacagaagaagaactgcacggtacagaccccatttttgctcctcttgtcacctgcctacagcctgtgagagattatcccgtgcattggggctgtaaaatattcattgatataaaaccttctggagtttgaagttcatagcctaattgaatcaaggagaaaccatccctggaatgttgttggaggttggggttactgtgaatcttgaagctgcttcagaggacgtctctgcttcgccttatttatgcctttgtgaattcttgttacatccccacagccaagttctccatttccatagagagtttcccaaaagttatccagctttgtcttggcctttccttgactcaagttcaccccttctgcagtgaggcagatgcaggcataaaacaacggacctccaaagagccaaatgggtcctctgggaggtcagccaaccttgatgttgcctcagaggtcacggcaaatgaactgtcatgctggctgagcacggctgagtgcatccagtgccagcagcgagcatcttttggagcggttcagaggtgaacgggcatggatccggcaactctggtgtgcagcgggcccagcgtttactcagtccagaagcacaggcagctgggaagccggtggtttccctcttctctccccttctccacggcaagctgcagttccctcacctcctgtttgtgccaagcaaccccccactcctgcagcatgagggagcacctcattacctaatactttttaggcaagtgaaagctttaaaaagtcactaaagagcattagagaacactttttcaaatgtcagcctatataatcccatcatcctagtggagcgccgttcttacgttatcttcagcctgcaaatttgcttgacattggggtgtattattgttcattcttttttcacaatattacaacacatttctccaggtttctgtggtctttcttcaccctcttaaagttgctgtcgttgtaatgtgattcatcagaccattggcctaatagtagacagtcaagtcatttctgtttgttggctaatatagatatgcaaagggaaacatctataaggatatagcttttagtttgtttaattattgacttagagttaattcctaaggagttgccgaatcaaaggatgtgaatctctttgtggccttccctgtgcagtctctgtgtcttgtgatactgctttctgaaaacatgtcaactggcattgcctgtagcagtgaatgaatgtcagtttcatagtagacttgccaataatggataataattttaaaacaaattggttacttttttaggtattaaatggtatgtcagtgtatgccaaaactgttttgctttgcatttcaaaattcctgattatagtcagtatcttatgaaaattttatgtttgtgtcctttaagctattatctatggggatcttgatatatatatttcaatttgttgatacatagccctttgtgctggtcttgccatttaatcagaaactaattgggaggaaacaatcagagaaattcagattgtgaagcattcaatgtgacaacatcctggatgctacataaatgtatcattaaaaaagatacatttatgtatctagaacagtaaaggagactgttctagactaagattaagaagatatggcaaccccatgagctctgggtagctcctgggtgaaaatcagaaactacaaaggaaacttgggaaacaattggggaaattcaaatatgaactctatattagataatgtcatatcagtgttaaatttcttgactctgttattgtgattatgtagctgaatgtctttgttcttaggagataaagactgaagtatttaagagtgaagtgtcactacgtctataaccttcaaatagttcagcaaaactatatatgtatatatcatacatattatatatactatactatattatggatcaatatataatatataaattatacatactatatatacatacacatatacatacatttatgtatctgttattttatacatcagacacacgcatattacctctactatgagagttgcattttatttattttttttgtgataatgcttaacataagatgtacgctttcagcaaattaagtatacaatgcagtgtgttaactataggcacaaaattgcatgatagatctctaggacttactcatcttgcataactggaacttggtgcccttttactagtatctccctgattcctcctttctcccagcccctggccaccaccattctgctctcttgcttctatgagttcaaccacgttagattcctcatataagtggtatcatgtagtatttgtcctgccattggcttgtttcacttagccaatatcctcccatgcatgttaccccaaatggcaggatttccttcttttctgtgtctgagtaacattcgattgcatgaatacaccatattttcttctttttttcgttttttagaaattgtaacaaagcattttatttacgtcaaggtagaaagctatgctaaggacatagaaatctgcttcagctttcctttagcctcacacttcataaaagtatcaagtggttctctctggcttttacttagtcatctgtgtaaccagggttgaagacagtagaacactgagtcttagtgtaagtgtaagagattgagaagacaatctcttttgaattatggtttttcaatgtttgttgtatcatctttttaaaaagagcaatagagattctttttagaaaatacaaagaagcacaaggagaaaagtaaaaatcacctgtaattccaccagtgtcaacgaatgaccaatgttaatgttttctaagtagttggaacatacctttccgccttgtgttttcttttgtgtgtatgtgatgaatacaccatatatttttttaaccattcatccatagatggacatttaggttgcttccatgtcttggctattgtgaatgacgctgcagtgaatgtgggagtgcagatgcatgaggactcttcagggtccttactttcattcctttggatgtgtagaagtgaaattgctgaatcaaatggtagttctatttttcgtttcttaagaaacctcgatactgtttcctatagtggctgtacaattttacattcccatgaacagtgaacaagcgttcgctcttctccacatcctcgctaaaacttatcattctttttttttatcatagccatcttaacaggtatgaagtgccatctcattgtagcttcaatttgtatttccctgatgattagtgatgtagaacatcttattaaatacctgtatacctgttggccatttgtatgtctttagagaaaagtctactcggttcttttgcctgtttttaaattggattatttggttttgccattgaattgtgggagtttcttatgtattttggatattaaccctttctcaaatatacagtttgcaaatgatttttttccattcttcaggttgcctttttattctgtcgattgtttcctttgctgtgcagaagctttttagtttgatgtagtccaacttgtttatttttgcttttgttgcctttttggtgtcatatctaagaaatcattgccaagaccaatgtcaagaaagttttcccctatgttttcttctaggagctttatggtttcagtgtttacatttaagtattcaatccacgtttagttgatttttgtgtatggtaaaaggtaaggatccagtttcattcttttgcattggatgtacagttttcccaacatcatttattgaagagaatatcctttttccattgtatattcttggcactcttgttgaagatcagttgactcttcttggcttggaagaattaatgtttgttaaaatgcccataaaagaattaatgttttgttaaaaggaactgcaactttaatatggttcctatcaaattctcaaaggcatttttcaataaagacagaaaaaacaatcctaaaagtcatatggaaccatgaaagactgaacagccaaagcaattctgagttaaaagaacaaagatggaagcatcacatttcctgatttcaaaatatattacaaaaattcagcaattaaaacagtgtggtactggcataaaaacagacatatagacgagtggaacaaaatagagagcccagaattaagttaatacatatgtgggatctacattttggaagagacctttcatagcggagggaaatgctgaagggatccgtttctggtggtggactccaggccccagtagggaggttcttggggactgagggacctagtagctccccttttcacattgtataggccactttcttctccacctgtgggtgacagtgctgaggatactctggcctgacccgtggctttcctgcccagaggaatgtggaattggggtgttttcagcagccacaggctccaacccctttctcctgtcacctgctttgtagctttgcacacaagcctcacttgaagcatgaagtttacccatgttctttccctcctgtgaccttctgtttttccatatctgacatcaaatctgacttaaaaggcagtgcagatgctcctttggggcaatagtaatagaaaccttggaggaagttgaacttagaactctgacttacaggagttatccttggctgtctgcctagcctgtgcctgagactccccctccacacccctgccaactttaaacagcttccctccaggtatcagggcaccccgctgagacagctttgaaatgaatagagtcaaattaattggttgccatattgccctattggattgatgtcaacacagtttagaacgattggtttcattgctcgtcatttctgtaaaaagttgggaaataagactcttaggaaggactgtaaccaccgtcataacagtgttcctttgagaaaattagattggacccatcaccattttaactgaaaatagtttcccaggatgaaaacaactagtcaatttgagagatttgtaaatcaaattgcatcttaaatgcattaggagacgggcttactgttcaaatgtattccgtggtgaatcctgtgaaaggagttaagggtgctcttttacgaaaataacctgcatcctgtgtcctatgatgcccaggatgatgtttctggattggatttttgtaggtaagtttgtagcaagtaagggctactgaatagatttggtttttggttgtcatatttttgttcttgcttatgaaaatagtagaacattctacacattgtgaaagtatgaagcgaaacaaaaacttgcctatgatggcagcaccgaatggtgattgccatacttctgcagctgtgtgtgttgctgtctctatactagaacagacctgggtcctcccgtgagaatttggtcagcaggtcaagacccctaggttggagcagggtaggaggtggtgagctttctgtacccagaaggtcggtgatgccagagactttttgaaacaataagcaccaattgaaacccaggtgggctaggggtcaagaagcaaggggatccacaagcagacctccacccgggtcatctgagcctgtgttgaagatgcagtctgggaacgctgagggcagatttccaataaacagctgcctgtttgctcagaggctgctgcgtccttggaagcacacgctgcgcatttggtcctgttctcaccttttacctccttcaattttaccttccctctaccctaccctccaataacaagatgcccttggattaatctgttgttcaggtcatacatatgacctccacttcagggaaccttacattcagagaggtccaggagggatcaatgcttcttcccctgaagactggccctgttatggtgagatgtcaggcactcgctgatgcctggagatatttgggggcacagagccttccagtgcattttaagctgacctgtgcaggggaccttctaggagaccttctagaaggtgtcagaaacctaggaagaagcccaaagcctgcccactgtgttcttggggaagccacaggcagctggactctttggtgatgaaagccactcagatgagagcttggggactttctgtaaggagtgcaggccgtccttcagagcagcgtgtgggtggaggaacaatggcctctttctcactctctgggttagaatctgggcttccccactgagtagctgtgttaacaggagtaggttacttaaactctattcttcgctttgcatacctgtaaaatggggctaatagcagtacccttcaagtggagttgtttcgagggttcattgagatgtattgtatcactaagatataacacacttagcatagcacttgccagagcgtaagcccacgataaacatttatcatggtcatccttgtcttaatcagctcagactgcaataacaaaataccaaagactgggtgtcttaaccaacagacattcacttctcacagttttggaaggtggacatccaagatcagggagccagtatgggtgggatctgctgagggccctcttccttgctcacatgacagagagctcactcactcaggtctcttcctcctcttataaggacactaatcccatcatggaggctcaaccctcacgacctcatctaaacctaattacctcccaaaggtcccatctccaaatagcatcactttgggggttaagactttaatgtattaattttgagggggcaaaaatatgtagcccataacaattatctttattatttttgtgatcatctgtgagtccccttgcaaggcattctcagttggtggggcagtctcagaactggagggaaggaaggtattgggaagatctttttgactccagtgggatctttacagcccatggtggtggtcttgagccttcgagaaactactttcactgtgtcatatttccctctccttttgacctctgggaaaatgctcttggttggcttagtctaggtaagaggaagaaggaagaagtcagatttattaggcagctacttcttgagccaggaagcttagggtgtggagattcatctcattgcgtcctctaagccaccccctgtggctggcactgccattgccatttacaaagggagatgcgctcagatgctcagggggaggaaacaccacctatccaaggtcacactgctcaggagttgcagtaagatgcgaaccttgagccttttgacccccaagcccttgaaaccagctgtagcctgtgtggggaggaaagggcagccagccctggagcagaatttggattggatggaatctgaggatatagcaggaataggcacactctgggcctttccaccctacatgtgctcgctcactccagctgctcagtgggactcctcagacccccgagtccctccacacacaaaggctacctctcacccaccccagctccactcccccagggatggagtagctctccagagggagctcattttgaaggtgcactaacccagactccgttttcttccctgctcttgtccttccccagcccctaaagacaatgaagagcgtgtgttcagggaacgcatgcggccgaggaagcggcagggggccgtcaggcgcagggtccatcaggtcaacggccacaagttcatggccacctatcttcggcagcccacctactgctcccattgcagagacttcatctggtaagcctttctcttgggaacctctaattacaacatctctgttacaagatgtcggggatggggtaggggagactatgcacctcatttaaagaatgctggtgtgcctcgtttcttccttatctgaatgcaggggactattatggaaggctaagtgtgtgtttggtacatagggggaaatacatggaaagaagcgatggtttctggcaactttatacctagaattttatgaaaagagttaagattttagtaaccaacaaggatattgtgactgtgtgtgtgtgtgtgtgtgtgtgtgtgtgtgtgtgtgtgtgtgtgtgtcttgttttgagacagagtctagctctgttgcccaggctggagtgcagtggcatgatctccactcaatgcaacctctgtctcccaggttcaagtgattctcatgcctcagcctcccacatagctgggattacaggagcacacgaccacgcctggctaatttttgtatttttagtagaggtagggtttcgccatgttggccaggctgatctagaactcctggcctcaagtgatccacccacctctgccccccaaagtgctgggattatagatgtgagccattgtacccagctgattgtgtgtttttaaaaagaatacttatcttttacagacacacctcagggtgaggattccactgaataataatccactgaaaaataattcactgaattatttacaagtgaaattatctgatgcctaggatttgttagaaaatcaggaaggaggccaggcacaagtgcggtggctgatgtctataatcccagcactttgggaggccgaggcacgcagattgcttgaggtcaggagtttgaaaccagcctggtcaacatggtgaaaccctgtgtctactaaaaatacaaaaattagctggccatggtggtgtgcgcctgtaatcccagctacttgggaggctgaaacatgagaatcactttaaccctggaggtggaggctgcagtgagccgagatcgctatactatactccaacctgggtgtgacagagtgagactctgtcttaaaaaaaaaaaaaaatctggaaggaggagaggggctgagataaagatgatcgaaggccagccccattccactaacaatacccaggctcagaaatgaaaatgagactggcctgatgtcctctagctaggaagtgtcagaagtatgattctacccctagtagtctgacttttaatgctgatacttttcctgacatcccaccagcctttctagcaagctgtctgagctctttgaagctgatgtagaggttgccttcatgaacccttggatccaactggggagagcgagtgaggccaggatgcagtatgaacccagccagggacatctgcactgggctctgaggaccccttggattccaggtgtccagtagtcacttgtcttatcctcatgatgtcacaaagccagtcatccaggttggcgtagacatctgagatgatatagctcagagcaagcccagcccaactgaggcagaaataatgccccattccagccacagatacttccaattaccagggcagacccagctgtctgaccttcacttgctacatttggtcatgaactgagtggtcggtcttacagatccaggtctcctctaagtccatgggcaaaggccactgagctctaggttccctggggtggagcctgaatagcttctggttcccactgggctgggaacttcagggagctccctgaccatctgtagttagtacactaaggacaggggtaaggccgggtttgtgtgatagttctgtgtccatgctgactttctgtcttgccctgggaacaccactctggccatggaaggaacctctaatgttggccttcacctagacaacctcttgaacctctagttcggggcacagactggcttagaaccattggtggtctttggactgcccagggaaatatacctgccagctgcagccctcttccacagttagagggcccacagagcgtgtcctggtgctgggagaagaggaatgtccattctatccacaaggaaaggtatgcttcactgctcaatgcctaccaggagcaagcagggtcgtttgtggctttccagaacattgctgaccacacaggaatggctctctgtataggaaatcaagctctgatgctgaccaaaccttgcacctccccaagcactgggactgccctctgtgggcttctggaaggagacatttaaggcaccttgcaagtgagagagaaattacaatattctgcatacttcatgtacttggtgctatgtgggtggtggcccaaattgggtggtttttctgtttgttttttgacctggtaagatttcactttttttaaaaaaatgttattcttcttttcaggggtgtcataggaaagcagggataccagtgtcaaggtaagaggcatttatgaattaaatcttcagaggcccgtggttagatccagatcactggcacccataggaggcaggtgctcagtctgatgacatttggaggctctccacagcttgcatgctttctttgttcccacttgaccattacttctgcatatatgggaatatatatgggaggcatttgcaggtgccacctgtctccaggcgtccttgtgatctcagcaggtccccaatccacccggcctttgtgtctcaactggagcaggtggcactttcatctttctgaatgagacattctgcttcagttggaggctctttgaaagtcccactttgtcctgaactgggtctgtgtattctgccagatccctccctgtctccctccctgaagaagcttcctcgcctgctcgttgtacttggtatcactgaaaggtccttgtctaatccctttttttggtcttggctgtgtgatcattagctcttaaaaatgtaaagctcacttgaaggtattgaagattattcctttccagttaattgactacaaatgcaagtttaagttgtacaaaattggagggtggaaatgtggcatggtcatgcggtggttttgctgaggttagagcagggaggttttcctgtctcctcgccaagcactgttgggtctcacccatggggtagtgtctggtggaagttgctgttccttggggtaacacgcacacagttacttaccttttcagccacctactgcccacattgctccatgacactaacaacacagatataggccacttgtggaagtattaaagtcgatgggaattttgaagtttggtatgtcaggacacaaccagataaaaaagcctcagaacctctgcaccgcctgctgcagttccccctatcacgtcagccaccctgcatggtcccgagtggggtgcgaggccactacaacacctttaataggcagtgctccatgggagggctggaaggaagtttttccttgaccttggcgtattgaagtgagaaaattgatcagtactccctcaactggagaaaactgctaatgtcctttgaatataaatgttaccttgctctctggagcatttaggaaactgatggctctgataggacagtgttttgaaatagctgtataaaagactttagggagggtattaaattaaggctcagtggcagaaggggcctggctccccttgtcactccaccaagccctgaatagatcctgggagggacactccctttcctgagtgtcattcagccttcctgtctttgctatttgcagtctgcacctgcgtggtccacaagcggtgccacgagctcataatcacaaagtgtgctgggttaaagaagcaggagacccccgaccaggtaagtgttggtgacacggaaattctgggcttcttcaccgccagcccctcccttcactgcctcttctgtggttcccaagaaaaccttctctgcctgagaccctgtcatttcattgtgttgataaaaaaacaaagggagctgtccacggtcttctggcatgagacaccatccgcaggatgagcacaggtccaagtcagttctatccccttggatgttatgccaagtgcagtgtgatcccagcactgaagcccacaagaaaaatatgaattcttttattgcatcatctcatcagaactaaaatggctaaccaatgtgtcactagctcctcacaggtaataaacagtaatagaaacacaagcaggaaccttgtctaatgagctagctgatgggggagtggtgtggaatgagcaagcccaaggaatacttaggaggcggcaacaaccacgggaataaaaagagtcaacattcactgggcacttaccgtgccctgattgaagcactttaacatatattatttaatcacataaaaaccttcatgaggtagatgttattatcttcattttacaacagaatagaagcacagagagtgaaattaacctgcccaaaatcacacagctaagagccactttcaaacccaggcagtttgttctaaagcctgagcccttgaccactgcactacgttgtctcttaatcttagaaactagcatcagattgcctagtttggtagaggtaaggaagcaggaaaatgcaacaatgaagctaggttcacctaactgagcaattacgagaatgatagtcccactgatagattaaaaaacctttttgaggaagatgacagttgtgaatatggatgtaggtattatcagaacacttgatttcaagagcatgctcttaattctgggggaaataaattctgtgtagtcataggctattagaatcgcgggttagagagaaaggccttgggtaggtttataatcagctggtctacaatttgacttccaagaggactgacttatagagacttctacctgcttcttaataattgagtcaaatagcatcctggcatctaaggcatttcccatcttctctctccttctgctttcatactgtctctggaaagcaacaaaggacaaggcttagactgagccttctgtgtctgtgaaggttagtctgagcccagagcaccaacattgtttgcaggggctctcttgtggttaagactgcaagccagcacctgcacctcccgactcctggtctaggatcatgaccccagtacatcactgttgctttcacgaggaaatgaaagaaagagatggcttgcttgctgtctgccttatttccttcctatggacattccattgaacatttactgggtatgtcctgtatgacaggcgttatgctgtgtcccatggaaacaaagaggagtacactagtccctccctcaaggatctcagtctcatcacctgcaggtctctgcctctgcaggactctaaagctcttctgcacttttttggagggaaaggtccgataagagtccatgccatgcaggttaaagggttgagatttgaaatgttcagaacccagcttgatctgtgacccagttcttctgactgtctttcctggcatattgagcagtgagaagaagtctccagtgaagtgtgttcccaaacttgacatgtatcaccaagggacaaattgccagggactgagagagggaggctctgggtttcttagcttggtggagttgactcccagtcctggctctccccgccaccaccttgtgcttccagaggccagtctcccttagtgtcagtgtatctgcccctcagggtgatgggcttgccctctgccgggttactgaactgctggggaccaaactttgagttcgttcttttgtgcaaccacctttaatgtgatgcctgtgcatacacacatcatacacacatacacaccagaaacacatgtagccctaaacaccatgctttcaatgccctccttcctattaaaaggtgctctggtgatggacttcttgggtgtcctgcaccgtgaacactcggccggtcccccccatctcatgtctgtgtgtcttagcatgcggtggactcacaccctgcctgcacttccaggtgtggtaaccaaacaatgttccatctccactggtgtcacatttttttttctttaatctcacaattctttctgccattgtcttcctctccatgttctctctgtgactctcactcaccccattgtatctgtgtcctcctcagcaagcgcacatgtgacatgtccccctgcacacatgccgtctttgtgttggtctcttggtcagtctgatgctgtggcatgctcttgtgtggactccttcatcctcctccctctgttctctgataccttagagtttttagtggtcccaactgagggtcacgtagctctttccacccccacactggatttcttggtcacctgggacaacgtccccactttttcgccttagtctgtcattcatacccctatgaggtgattcctgagagaccaagactctattctcagtataggtccaccatgccttcagggtatgtgtaggaatagagtgggcacagtgatctcgtacttccttagcagtgagggagaccatggcagagtcaacatgtctacattcacaaacaggcacacctaagctaggcatctaagaatgggtgagtatagttgttttcagtagagctgacattcttgttcccaggcaagacctcaagtggtagaccatccatttcagtagggatcagtgaaatcttggtccaatggaaggatcagccattccttggaactgggtgctagggaacttgtcttcatgcttgcgttcaagtcgagctccctttccagctctcatttcacccctcattagtcccccacgggggcctgttacttatcagtcagccagggagctgaggcccagctttgccgcatgccagccacttcctaatccccggggtagcaagagtgatctccccagcccatggatgtcctgggtgatggtctcctgccgatactgagaggggctgggggtgcagctgctccactaaagacatagatggagggtagcgctgtggaggggcagagatgactcagaaaggtagcccagcagacccttgcttccatgaaatgtgttatgcttctagcctcttccacccctgaggtctcattgaccctgccatcctgtgacactgggtgggacagggtatgatagtgctgtgccttcatttcctcatctgtgaagttgcggtaaccatggactgccctgtagggtggtggtgaggtttaactgagataatggtgcctggtgtgtggtcagggctgagaccttagcattcttagtgctcaccattctgtattagccatcttcctcctaattgttgtccgttctgactgatccacagtttccacaacattgtgcagagtttacacgctgctgcacagaatcccgtgtccaccattgagcttcctagagactttttgcctaggtggggcttccaggcacacagcagtattgaaggtacaattttttttttttttttttgagacagagtcttgctctgtcacccaggctagggtgcagtgggatgatcttggctcactgcaacctctgcctcccggattcaagcaattctcctgcctcagccttccgagtagctgggattacaggctcgcaccaccatgcccggctaatttttgtgtttttagtagagacagggtttcaccatgttggccaggctggtctcgaactcctgacctcaggtggtccgcctacctcagcctcccaaaatgctgggattacagatatgatccactgcacccggcctgaggtacacattgaggacactgtactatgattgcttaaagtcctgaagtcctggagaggaccatgttggggagtaggcctggccttgcacagtcaaatggagtagccaacagtgagttaagagcatcaggagccaaggccagggcaggatggaagctcttttcacctcagggcagcttttagagccaagctagggcctgccacctacaatgacacaagctctcttggaaaaagttctttgagagttccgttgacaagtcttctggggaactgaggagctcggtggtgaacctgtatcttgccatccctgcaggtgggctcccagcggttcagcgtcaacatgccccacaagttcggtatccacaactacaaggtccctaccttctgcgatcactgtgggtccctgctctggggactcttgcggcagggtttgcagtgtaaaggtaagttgctccctgccctgccctcagcccctgcatgtccccttccttgctgcctgcccccatccctgctttataaaaaacccttgtctgattccagatttggccaagaactgagtgcaagcctttgttaatcctgcattagtaactctgtgcatttggtaggcagactctgggcagagaccatccaggactgggtggagggaaacaccgaggaaggaggagggcggactccacgccttaagatcactcacaatctggggagacaaaatgagtctacaaaagcataataatttcaggaaagatacattagagcagaagaaaagtaatatttttggagttaggccatgaaggaagtgagaggtgtgaattgaggcttttcttgcatggtccatggctcagtgcttactctttgaaagagccatgccagaaccttgtcacataaggtagcttgctgactcgtcaccagcttgggacataggggatattattcccatggccctggtgaggaaacggaggctcagagactaagcaacttgctcacatcacacaatttattagcagaagtaggatttgaaccttgactctcgcgtcctcagttccttcctgtttcctgccgtgccacccgcaaacagcgcactcagatgatgatgctaagtggcacggggagtagcatataacacagggaggtggaaatgtattctggtggcctgagaagtgtgtccagttttataagccggtccagcctgcttgcacggttgggcaaccgtgaactactaggcagggatattgcatggacaatattttaaaatagtgttttactgtttgtgtggaatgtattattcataaattcccattgtagaaaaattagaagaatataagtaaagtataagaaaataaacctaggacataacaaattggtcattgaagggatcccaatgagaaactatgagaattggaaataagatcagggctgcagtgggaatgaagaggagaatgactttaatatatcaaggaggaatgatttattggatgtagtgaccagaagcagctgggagggcagtgatagcattcactgagatggggatacaagagggaggataaggttggaggtagaaatggagcctgagctggggacaccttaactcgaggtgcccgtggcaaattgacacgaagctgtccacctgttggacattctcactgacagttggggaataggtctagactgagcatttagatgtgggttttgtcaggatctaagcaattaaagctataaagtcaatgtcattctccagggtaagtacattgagtatgaagagaaaaaagtcaaagataacaccatgagggtgggtaccaacatccaagggtgggcctgccaaggcaatgagagggaagcactcacaggtaggaggaaaagtagcaaagaatggcaccatggaagccaaaagagtagataatttttaacagttttataaagaagtggtgccaaatgctttccaacaggttatttaagataagacacgaaacatggggttggatttaacaacaaggaggtcactaggaacctcagcaggagctgtcttagtgggacagtgggatggagcccaagtgctgtaggctaaagtgctaatagagggagatgttttttcagaatgttttagtcaggaaaaagacagtggcaaaggagagatggatgaggcagaagggagaggggactgactgttgatacagcagggaaggggaggcgagcggggatgggccttggggagaatgatggacaccgccttccccagatggagggcaagcctggctaccaggcctgggtgcagatgcatctcgggtgtcagggatagaaatccaggaggaggtgagtggacaaagtcatcatttaagttttgaatctgttgagggcattgcaaggagattccccttattttctgaaagaggaagtcttttttgaagtaggagggagaagtgggggtgtgagaggcacgaggagggtggtgagggctggaaatagcaattgtggggacagaacacaatccagccactggacatgaggaggtgctgactgtggacatgcccagcatcctgtgagcttcccggcacccctggaggtgggggcggagccattccacttccccgttggagtattctttctagtgtgtgaccctgaacaaaatggggcctgcctggaatcctgtaggtgaggtgaagagagcagaagaggaagaagggaggggagcaggagtctcgagtgtctagcagaggagtgatgtgcttttggaaagattagtgtggttgccgggaagcagggcctgctttggagggaaccctgatgagctgatgtctgtttttttttttgtaaatatattaattattgatctatctagtgaacctaaatgaagatactatcatcataaatattgatattttaagaaagcagcccagacacccagacatcactgtgagggctgtgggtccccaatgaccctggaagaaggaggggcagggacagtgtattcagctcttgttgggcaggaaatgctcttgcccctgctcaaggaaagaaggggcagaattaggatgcctggagcaagggtatctgtccatgggagcccaggaacccggagggaatcaggccgcatgagggctagaagacgaaggctgagacctgaagctccccagccaaagtgtgcagacttttactcttctgtggctctgatgttattacttggcctttttttccccttgctgctgttctgtgaccctctccttctccctctccctctctctttgtcttcctctctctttaattaagaaaccttatttttttaagagcatttttaggttcacagcaaaattgagcagaaagtacagagagtccctgtattatgtgccccccaacacacatggcctccccccaccagcatccccaccacagcagcacacgtgcacagccacggaacctgcacagcacatcattatcactcacagtctgtggtttaccttgggatccactcatggtgttgagcattctgtggatttggacaaatggacagtgctcgttatctaccatgatagtatcatacagattagctggatggccctggaaaattgcctgcttccacttatctctttagatcctttctcctccttaaggcttcttggccctgtagactccttaccctgtggagaggggtcatggccagaagaggccagcatgggcccaaggcaggggctgcttgtgcccaggtctaagcctggttctgctactatgattactaagaaaaagaaatcaagacttagtgacctgcaagcatccccgagcaagtccctatgaagctggctcttgcacccatgcagcctggccctgttcctggctttggcaggtgccctatgccaccctttgctgcttaggaagactcagccaggctttctgtcttgctggaccatgctagcagggcctgctaggctggagctctggtcccctggtcctggctggagatcatctatttggcctgctgccctatggcttcagcttttttgccattcccgttcccattcctggaaatagattacagtattttcagcaaaacaggtttcttcagagcttgggtctacgaggagggatccatgagactgtcctggtcactctttctccagtctaaaactgtctgagccacacaggttcaagcattgtgtgtgtacccttctggggactgtccctttgtcagccaggtagagggagcataattatgtctgcttttatgacaaggaaatggaaatctggaaagagtgggtgcatgcagggcatacaaccaggaactgtggggcaaccagcccttgtcctttgcagcccacagccacagaggggccagacccttgcaggatgctcacacgatcattgggtaactgagatccttaaccgagggcagaaaaatgctggcacaaagtgagcaggcaaaatagttcatttctttctttcattttgtgactcaagtgcctgctgcgtctgagtctctccagactcattcgtgggtctgtccgagcccctcaaccactattaaacagtccagaaatcagcttcccaggttccaggagcagcatcgctagtctcgggcatttgtagccttttcattctgcactttgttggaacagtgctgccttctccaatctcaggttcactggcaccatgggcctctctggggcccttttccacctgttttattttcccattgacacatggagtcagtggcccctggaggcagagacacccaataccctttgattgcagtttccttctctagagaagatccagttctcacctgcccccgtcccatcccccacactcatgtctcagcacagctgctctgaagtcatcgggcaccaaggggcaacttcacaggaaagccagacctcctgacggagcctgcagttgggcctgcgggggcctgtggaagcggaagccctgctttttctcatccccatctggggtgaatgctctgcacctgctgtcctccaggacaggggacgaggcacagggaggaaggtgtactccacgaagacctggcctggagattcctaaagaatcttcttcctcgctcctgcctctctctgacacacatcttaataactgctctgatctgcggctgttttcaggggccaaggggacagggtgtcccctcctctccagtaagtagtaaacaggagtggtggcctgaagagatcacaggctaggatttggaggagctgtcctggtttgggtactgcctagctgggaggttgcaagcaggtcaccctggcttagtgcccttggcttttaaccccaactgccctcttcccttctgaggacagtaataaaaaataaaaatggagtgatcttagccacataccttggggtggctgtgcagagccataaagatgaaagaaaggcctgcctgtctccctccttccttcctttccttgtttaaaaaaaaaaaaaagtattttggatacttaaaaacactaaaaacatgcagaataatttttaattttcaacatttctgaaaatgtcagtcctttactatttttaacagctaggtcccttgtcgtaacttcaacttttatttttagaattataaagagcacaatacataaatacattctcactgttcttactgtcaaagatccaagcaagactgaagttagatatatattaaaaatattaaaggctttctttatattctctttccactttcatcctcagacttctaaaaatgtgctatgggtcctcttacttctaaaaatgtcctctttttgtgtgcctttgctgcacggatactcacacacactgcgttagagtctattgctacataacaaatgaccccaggacatagtggtgtaaaacaaccaatacttattttctcagagtttccgctggtcagaaatctggatggagcttagctgggtgcatctgactctcatgaggtttcagtcaagctgagagctggggctgttgtctcatctgaaaactcaactggaagaggatccacttccaagctcgcccacatggccactgaccagaaacatcagttctctgccgtatgggcctctccacacagtgactggcttccttcaatgcaaacaagaaagtgagaaaagatgccccagacacgaggcaatgggacatcttatcgcttttgatgttttctgttcattagaagagaatcactacgtccagtcctctccaagggagggagttacataaaagcatgaacactatgaggcaggggcaatcaggaggcagcttaggggctgcctggcacacctgcacctccccatccacatccccttcgcctcctcacaaatgcaatcgtcttgtctatggggtctaccctgaccactgggtagctctcaagctcttgtctctcgtctcttacttcctctgcttttttttctaacatagcacttatcatcttctaatattctaaattactttcttttttttttttttgagatggagtctcgctctgttgcccaggctggagtgcagtgacatgatctcggctctcagctcactgcaactttcacctcccaggttcaagcaattctcctgcctcagcctctggagtagctgggactataggtgcatgccaccacactaggctaatttttgtatttttaatagagacagggtttcaccatgttggccaggctggtctcaaactcctgacctcaagtgatccgtcctcctcagcctcccaaagtgctgggattacaggtgtgagccactgcacccagtctaaattacttgtataatgttagtttctttctttcttcctttctttctttcttcttttttttttttgacagagtctcactttgtcacccaggctggagtgcagcggtgcaatctcagctcactgcaacctctgcctcctgggttcaagtgatcttcctgcctcagcctcccaagtagctgggattacaggcacctgccaccacgcccggcaaatttttacatttttagtagagatggggtttcatcatgttggccagggtggtctttagctcccaacctcaagtgatccacctacctcagcctcccaacgtgctgggattacaggcatgagccaccacgccagaccttataatgttaatttctgtctctcccaatccaaatacaaggtccatgaggacagagatttttttttgtctgttttattctctgtttacccagcatctagaacagtgcctgcacactgacatccaataaatatttgttaattcaatcctccgtgcatagttatataatttgcttttctacagtatgtcttggagtatttccaaggcagtgtacagacatctactttacttactagaaagagtccacattgtggatgttccgtagattgtttaaaatgttgccctcttgatggatgtttactggtttgtgtgttgtcgccattttaatttatgctgtcacagacatcctcatacataccttttcatgcatatgtgtgaataattatgaaagaaaggcccacagaaatcaaacaatcactttaaacccttgtctttttgtggttgaattatacaaggagggaattacataagggcacttttacttgtttgctttaaagtcaagccatgttaatggactgctttaccttccttttcattgacgtttaatttgtgtggcttgcatggtgagcttgggattctagttccctgttatctattgggtctggtctgagaggtgtcatttatgccactgtagtactactactttccgtagagttagaataactgaaaagcatgttgtcctgatttgtgcaaggcgtcgtggtgaacctggagataaaacattactttagttctctagaaacttgcactgtgcttggtcattgaacataataagtgaaatcataggcgataattcaggcattgagtcagaaataagtgtgagcaatttacaggcaagagagggcctggaaaggggtgtagggagaaagaatgccacaggagtgctttggttgactcagaatcctttgcagtaacatccacaatgcctggggaccatgagaatgtcccctgtacacgtggcagattggctgaaaattcagtctgagctttgatctgaggaatgctgggtagcagacaagcggccgatcgtggtccccggaaagctctgagtcacggttctggtgtgatcaggactccaaaatctctttctggtgatgacatttggcccagcatgaccccaggggggcatccctcttacctcctttctcctcattctgcgtgaacgactttgcggtcgttcactctcacacccctgccaacttccattgcacaagcacacaatttcccatttgcaaatatttgctctctgtctctgagcttggcatgactggaacctgttatgaaatcaaaccattgccctggctcaccctcaagggccaaattaccccaacataaagaaattcctgcagcatacatgggcctgggcccctccttaggagtggctctgtcaccattcccagaaggttgtctgcttgctttggaggaattcccaggagcctggcctgccttttgcttcaatctcagctataaaaagggtggaaacatggaaaccaagtctctccaaatgacggtaggatgtgtgatagaaggtgaaagtcagagtgcctgaaccccagtgtgtccccagacaacactgctgctgctgcaccacccagcacatagtaggtcctcaacaaatgtgtggtgaatagctgggtagtagtagaagagcgcttctctttttgtaagagcccctggcaaagcagatctatttcttcccggtacaactttatccaaatgaaaccagtgaaagtgagcactgagaggcattctggaaagagaagccttaaagggcagcctagggctgggagtggattggcagcaggggctcacggcctttggccttggtgctccccagtagtgttgtgaggggtgggggtgggtggttcatttggccacattaatgcaaatgcatctcaggtttcttttggttccaacagggacgcccactgtcctttgctggtctgtggcctcccagtgacacctgcagcctccaggagcccatcttgctcccgttatggctgcccagagtaactggagctccccttcctcaccactttgccctggcatttccagacttttcaaagcactttcaaagtcactatctcacatcgtgcatgctaactgatgtgtgattgagattttttttacatattaagatgagtacataactcaggggaaatagcagactttttaaaaataaaaggcaaagtcctcaaaaccaaaaccaaaaaaagataccccctttgccgacctgccagcccaagttgttttgtcaggacagacaggtctggcatttcaacaccagagggagctagtggtcaagttatgtagacaagttagttgcccttctcaagaaattctcaacttggctcttttattctcttttccgtcacttcacagagaggcagaagacagctttcatgggtttggtgggtggagcaggtgtggtgaatgagcatcaaagggcagctgatgcaatgaggcagggtagtggggacagaattctgggcacagtgctgttgcctggtctctgatcagcccgcggatcagagttattagtgataactccattagtcaagtcggtgccatggcctggctgcgctggagttttcttgtttgtttttgtcctgagaaagccaccctgccaccacctcaccccacccccacctttagcccaatgggcatcttgggttcagtagctcagttgaactgtccaggctggtctgggggggctctctccagacaggtgaccaggttatgtagagcattacggagatctggctgcttatcctgcctggcttcactccaggaacagttttggtttttaaacatttttagtagactttactttttagagtagttttaggttcacaacaaaataggtcaaaggtataaagattttccacaaaccttctgcctccacacatgcacggcctccctcaccatcagcattctgcaacggagtggtatatttgttaacggtcagtgaaccttcattgacacatcatcatcaaagtccatagtttacattagggctcactcttggtggtgtacatttccatgattttggacaaatgtataatgacatgaatctaccattatagtatcttacagaatagttttactgcactaaaaatcctctgtgttctgcttcttcatccctccctctctcctaacccctggtaaccactaaactttttaccattttcatagttttaccttttccagaatgtcctatagttggaatgatacaggggatagccttttgagattggcacctttcacttagcaatatgcatttaatgttctgctatgtcttttcacagttgctaactcacttctttttaaggctggataatatttcagtgtctggatataccatagtttatccgttcacctactaaaggacattttgcttgctttcaagttttggcaattatgaatacaactgctataaacatccatgtgcgggtttttatatgaacataactcttcacctcatttgggtaaatatcagtagtgtaattgctggatcttatggtaatggtatatttagttttgtaagaaactgccaaactgtctctcaaagtggctggaccactatgcattcctaccagcaatgaataaaaagttcctgttgcttcatatcctgaatggcattgggtgttatcagttacctccttgtattttggccattttaataggtgtgtagtggtatctcattgttttaatttgtaatttcctaatgacacatgaagtggagcatcttctcctatgcttatttaccatctgaatatcttctttggcgaggtgtatgctcaagtcttttgcccattgggttattcattttgttattgttaagtttaagagtttgttgcctatattggataatataggcatatattatcatatatgtcttttgtaaatactttctcccagtctgttacttgtctttttattctattggcagtgtgtggtttggttttgtttgttttttgtttgtttgtttgtttgttttagtttggggaggtgggggacagagcaaaagttttttattttaatgaagttcagcttatcagctctttttttcatggatcatgtccatgcatcatggtgttgcatcaagaaagttatctgtgtagccaaggttacctatattttcttctatattatcttcaaggagtttcatagttttgccttttacatttaggtctacagtccattttggattcatttttgtgaagatcgtaaggtttgtgtctagattcactgttttgcatgtctagtttttctagcaccatttgttgaaaactgtctttgctccattttattgcctttgcttctttgtcaaagatcagttggctgtatttgtgcgggtctgctctgggctgtctgttctgttccattgatctatttgtctgttccattgatgttttgccaattccacattgtcttgattacttcagctttatagtaagtcttgaaattgggtagtgtcagtcttctgacttcgttctttttcttcaatattgtgttagccttttgcttgggtcttttgcctgggtcttttgcctctccatataaactttagaatgagtttgtcgatatccataaataacttgctgggattttgattaaggttgcgttgaatatatagatcgagtttggaaagacatcttgacaaatactgagtctttctatccatgaatacggtatatctctatatgtatttagttcttgatttttttcacaacggttttgtagttctacttatatagatcttgtacatattttgtgagatttatatgtaaatatttcatttgggggaatgataacatagatggtattgtttttatttttaaattccatttgttcattgctggtgtataggaaaacaactgacttttgtatattaactttgtattcttcaatctggctataatcattattggttccaggagttttttgttgattcttttggattttctacatggacaatcatatcatctacaaacaaagatagttttatagttttatttcttcctttccaatcagtatactttttatttctttttcttgtcttactgcattagttagaacttccagtatagtgttgaaaaggagtggtgagagggagcatcctttttgtgttcctgatcttagtatgaaattggctgtagggtttttgttgatgttctttattaagttgaggaaattctcttcagttccttgtttactgagatattttatcataaataggtttggattttgtcaaatgctttgtctacatctattgttagaattatttgattttttttctctctttagtctattgataacaattgattacattagttgatttttcaaatgttgaaccagccttgcttgcctgggataaatcctacttggtcatggtgtgtaattctctttataaattgttggattcaatttgctgattgttgttgaagattttttgcattcatattcataaaagttattgatctgtagattttataatatctttgctttgatattatggtaatggtggcctcctaaaatgagttaggatatattctgtctgtttctttcttctagaagatattatagagaattgatataatttcttccttaagtgtttggcagaattcaccatttgggcctagtgctttctgttttggaaggttattaatgattgattctattgctttacaagataagcctgtttgtactgtgtatgtcttcttatgtaagttgtggcagattgtgtattttaaggaattagtctcattttgtgtgggttatcaaatgataggcataatattctttataatactcttttattcttttaatgcccataggatccataatgatgtcctctcatttctgatattaataatttgtgtcttctctttctctctctctctctcactagccttactagaggcttattgagtctattgctctttacaaagaaccagctttttgttgttggtttttctctactgattttctgtttttaattcaaatgatttttgctctaattcttattatttcttttctcctgcttactttggatttaagtaagctactttggtctcctttttctagtttcctaagatagaggcttagattattgatttttagaatgtttttcctaatatatgcattcaatgctataaacttcctttgaagcactgcttttgctatatcccactaattttgatgttgtattttattttatttcattttttatttttattttatttatttatttttttgagacagagtctcactctgtcacccaggctggagtgcagtggtatgatctcggctcactacaacctctgcctcccgagttcaagcgattctcctgcctcagcctcccaaatagctgggattgcaggcatacgccaccacacctggctaatttttgtatttttagtagagatggggttttgccatgttggccaggctggtctcaaactcctgacctcaagtgatccacctgccttggcctcccaaagtgctgggattacaggcatgagcttccatacccggccggtaagttgtattttaattaattcaaaatattttaaaacttatcttgagatttcttttctcactcatatgctatttagcaatgtgtttaatctccaagtattttggaatttttgagctatctttctcttattgatttccaggttaattccattgtggtctaaagccaacattgtatgatttccattcttttaaatttgttaaggtgtattttatggcccagaatgtggtctttcttggtgattgcttcatatcttgagaagaatgtgtattcttctgtcaccgaatgaagttgttgatagatgtcagttatattcagttgattaatgttgctgttgattcagttgattaatgttgctgttgattaatgttgctgttgatttgattaatgtttctgcctgctagatctgtttatttttgaataaaggggtgctgaagtctccaattataatagcagcatcatctgtttctccttgtagtaccatcagtttttgcctcacttactttgatgctctggttttaggtacatacacgttaaaaattacgtcttttttgagaattgacctttttatccctaataactttccttgctctgaagtctgctgggtctgaaattaatttagcttttctgcttttttgggtttagtgttagcatggtatatcttactctatgtctttacttttaatctgtatgtgtctttaaggtgggtttcttgtgaacaacatatagttagttgggtcttgttttttttgatccactctaacaatctgtcttttaattggtatatttagactattgacatttgaagtcaatgattattgattattgacatacttgggttaatatctactatagttagtactgttttctatttgttgcccttattctttgtttctatgtttgtcttccactcattttctgccttttgtggttttaattgagcatttaatatgttcgtattgtttctctcctttcttagcgtatcatttatactttcttttttacttattttagtgcttgctgtggagtttgcagtatgcatttacaacaaatccaaatctactttcaaataatattgtgctgcttcatgacagtacaagtaccttataataacaaaattatcctaattcctccctgccatccttgtctcattactatcatttatttcacttacacataagcatacctagcatatatgaaatactataattacacataatcagcacattactaatattatgattttgggcaaaccattagctgttaaattaattaagaataaaaataaaagtttttattttacctccacttatttcttcacctttctttacctgctctctttttcatgtagatccaagtttctgagctgtatcatttgtcttctctctgaagaactacttttaacatttcttacaaggcagatcactgcccataaattccttccatttttgtttgtctgaggaagttttaatttctccttcacttttgaaggataatattgcagggtagagaattctagggtggtggggtttttatctcaacattttgaatatttaacttcttgatggcatggtttctgaggagaggttggatgtaattcttatttttcctcctttataggtaaaacttttttttttcctttgacttctttcagcgttttttaaatagttgattttctgtagtttagaaattatatgccttggtatagttttttgttggtttgtttgtttgtttctttttggcatttatcctgtgtggtgttcttcaagcttcctggagctgtggtttggtttggtgtctgacattaattttgggaaattctctgtcctcattgtatcaaatattaatatttttttctgttcctttctctttcttctcgtagtggtagtctctttttgcatatgttacactttttgtagttatcacccaatccttggatattttttccagtctttgttctctttattttttcatttttgaagctgctatggatatatcctgaagctcagagattgtttcttcagccatgtctagactactaataagcccatcagaagctttcttcatttctgttagtgtttttgatctctagcagttcttctgattctttcttagcatttccatctctctgcttatactgcccatttgttcttacatgctgtgtacattatccattagaacccttagcatattaatcatagttgttttaaattcccagtcagataattccagcatccctgctatatctgagtctagttctgatgtttgccttgtcacttcaaactggttttttggggtttttttgtttttttttttctttgccttttaggatgccttacagttttttcttgccagacattatataccgggtaaaaggaactgtcagtaaacaggctgttagtaatgtgagtaacgtgtggagggagggaaagaattacatagagctgtgattagggtgttttcatgaatttgtgcctttgagctgtgaacctcacaagtgctgttcagtcctcccctggccttagataggacaggatggctagagtgggctggagttggggatttccttgtccccagatcagtcggggtctgataaaacctcaatctctgataaaaaaaaaaaacaaccctcaacctctgataaaatagtttctcctaagagaagccctcgttaagaagagcagagtgctctgggctattttaaaaaatggttctctccccacgttccccacccccaacccccacactgaaatcctgagattttctccatatttactatgagaatctagttgagctcctgaagagcacgactctcaactgaatgtacaaaagtctatcaactcaacgactgggtcccccttagagtttttgactctcaggcttgtctgctctgagcccatttgttggttacagttacagtttttctaccccagcattgttcctacagaggtttctgcttcagtaagttgcgattctctgtattcgcctggttggctgtctaattctgggagcagcagtttcagtttgccctaggacttcacttcacttggtggatctcggaagagctgttgattttgtagtttgttcagcgttttgcttgttagaatggagtgctgctgacttctaagccccttaggtgccagacttcaatgagcaggttgttttcacctgtgatgtcttacaccaaggacaactaagtgaagagggaaaagcaaaggaattcattgaattcagactggagatctgaaagattcccagtccctggagggaaatataaatgtgacatttacttacttatctatatttagggtatacgtagaaaggatggctggaatgaagtactagaaacagtggttatctctgcaaggtggtttaatgaatgattttggttttgtatgatggaagacatatatatatatatatatatttctgtattttccaaattatatcttaaatgaacatgtaatacttcatgaacatataatacaatctcaaagaaaagaagcaacatcttaggccatgaacacttatctgtcttttctccatgtctccttacagtctgcaaaatgaatgttcaccgtcgatgtgagaccaacgtggctcccaactgtggagtggatgccagaggaatcgccaaagtactggccgacctgggcgttaccccagacaaaatcaccaacagcggccagagaaggaaaaaggtaactggctgtttggtggtgttgctggagcccttttcaggctagcatttctgtgctgacttccagagggtgctctggagtgaggtaataagattcctgggtttgaggtattttactcagaactgcagtacttaaagaaaaaaacaaagatagaagccaggcaggtaacattaatgtcttcttgagctccaaaagtggactgaaaacacagcaagcctcaagggttacgtttgccaaagaaacataaactttgagatgaggaatttgaaattccttctagaaaaagcttaacaactccatacaaggaaatggacttatctgcttccagaactggcatgaaagcaatgtcagtgtctgaacttcacccttggtatcattataatggagataaatgggtgaagaactggaaccacattcttttctagggaggaagccaagatgatttgtgatcataccagcactgagctgcctggggaatattgttaatgtctcacgacatgaaacatctgggccattctttggagaccaaaactgtctctatctctgtgacattctaaatatcagtaagaagagatccatttgccaaaatgttattttggtaagtcagggcccacagatgtaaacagggggaaaggcatccgtagcatttcatttgtaggctcttctttagccctggctcctagcctagaaaatttaagaggtctttgaaaagtaagttatgagaaaattagaaccatgttaacagggcagaaaatccgggtgaagggtgcagtggggcgtggccctcattgcccagtggcgaacatcctcaagccccctgctagaaaagcaagtctgactctaggtacctctgcaatcttccgcctaaatagtctccctgaattttgccctgaaatgtcttctaaaggcatttcctacatttcctggtcatcttgtcatgttagaagctacccgtggctcttccatgttgcttctcttgtataggaaaggttgaagggttcttattttcttaaacttctcctaccctgttttctcaataagcaaagctgttgtgcaagggttgcagaaaaaattctcttctctctggttgagataactgagactttgtgcttttggtggctcttctcagctttgtaaattccactggtggaaacaagacttcacttgttgacccaaggccctggaattgcaagcagagtatcagtacccaagaatgctagggccctgctgaagaggcaagctgagcaaacactctgtcatgacaacgttatgcaaacacatttaaaagctctagagagaacccttttcaggagacatggtttttattcttgtctagaagtaaattaagacagaatctttgtcatgaaacatttgaaagaaaactcagtacctgctgtctttgcgctatatttacatgggttgtcatgccagctgtgagacattgtctgccttgtcttggatttggaagaaccaacaggtaagaagccaacatggagaaattcaagaaggggcagggtggaaggctgagggactgtagtcctgatatttttattgctgggatgcttctgatgccaaaattgggaaaaaccaagttgtaactcaagtcactatgagaggttgggagaggagtgcccttggtctgaagctcaaaggcttctttgcaggaatatcagactttctggtgttttggtagccctcgtgttgccccttgcaactagtccatcatccagaaaggatgtgtgtgcacagcaggtagaccaagagttagtactaaaagggagcagaagtgtttgtgatctttgagtctaaaccactgatgttaatggagactcaaagtggatatgccagcatctatgcgaaggaacaaacctcactggaggtgttctattaaaatttaccaacaaatatcaatatatctgaaaatatttattgagcatctattatgtttcttactttgtgtaagtcactaggggcaataaaagtgccggacagagtcttacctttaagtatcctatagtctacttaagtggagaacacctcacaatatacacataaagatactaactataaaaagctgaataagatataaataagtgccaaacaggtgttagagacaagtgtcacattgctttgcatgagataacttgcattgcttggataggtggagggggacgttatggaagacatggggtgagctttgcttagaaaggtcaattgtatttggatagaattaaaagtgaacaaactgaagtctcttgttttcttcccttaaattggcaaatgaaaccttgagtctgtgctttcagaatatcaattcagcaagtaacactgggtattaggaacactctcttttttttttattttagcagtttttaatgaaagttatatgtaagatttattcctgaatcctctcaattgttttttccttgcatttgcccttctcttttcctacttggtgagatgtggctttccgttcaaagatctctttgcagtctttgtccagctttagcctggtgataaccaccttgctggggtagatacccacgtggatagttgaacattagccttttcctgctgtacccgtccaatgtagatgatgtatttcttcctgtaaacctggactacttttccagcttgctaacctttatggtgtcctcgcacaacccgaactacttcatccttttggatggggttggatcaaacattgtacctctgtctcagctctttggaatgaggggaagacatcatccttctgtgaatgtagggaaggtgcactgaaattccttttgtggttcttgctctggtcagacgtcacagagggatcgaacttcattttggctactttggcgatggctgcaagaggacagagatctactgaattcctgctgctctgggaactctcatggctcttatacggcatcttgatgcttttgacatcagaaaactctcaaccctcccttctgatgcctctgtccctgctttctctcctctctagctcattgctggtgccgagtccccgcagcctgcttctggaagctcaccatctgaggaagatcgatccaagtcagcacccacctccccttgtgaccagggtgagaccctcagatttgcttcctgacctctgagttctgccattggatggaccaaggagctctgaggcctctttaaccaagagtgagcttgttagctgaaatagctagcagccctggtgggttttcacacacccgttgcctgttgatttaacagttctttcattctccaagaccttcttgagggctgggcactccatggccatatctgccttaatttccttccaggccagggtaagaggagagcgagtgtatgatgttatggttatctgttttcccttgcctctgtccctggttccaagtgtactgcagagagaagggtacagctccctctcttaaagctcttgcctggccctagacctgtcaacaccactcccttgagttgagtttgacactccctcccccatcatcatacccaaaacctgagatcagcttgagtttggggctgggtgagggaggatgtcttctatcctggcctttgggtgggtgaggatagaaagatgaagctagaggagagactgagaaaagaagtgggaaggaggccagtcctaggcctgtttcccctctacagctccagatatctccttctgtccgactgtgcttcagacaataagttctgcagacataatttgcacaataataattctgcagccatccgagaatgatgaggctgaggagggacttacacttgcaaaacctcctgctctcgtgaccattatcagatatgcctggtaagggacatatgcatctgcagaagaggaataaccatcacagcctgacaatggtgccttggtttttctatatccctttttgtattcattatcctaattttatgcccatacccactctatgttggtgcttcattactgtcccccaggttagtgagtgggaagtgggaggtcagagtgtggaaaagttctgtcccaaggtttggagataagtcagtggtaagggcaagactgtacccatgctggctgagggacacactctcagaaaccctgccatcaaaccttccttggaggtcaccaccatgacccagaccttcttacccaggagtaaataaaagagcttcgggggtcatgcaccagccctgaggccacagaataattggtctcagtccctcttcgtgctactccaattaactttctgtgtctttatactctacctcattccaaatgagatttgaagcattcataagtagcctgatgtactctggggctgcagaacttgtagctattttcccagaccagtttgggggttttcacgtgttcctttctgaggctgagatcccctttgggagcttcagggagacagggtcatatagaaaagagaccccaggtaagagttcagagaccagggtttgtaggcctggctcctgccctgcatgctctctggctctgagctctgccattggatggatacagtggcaggatacagcggccccagggcctctgttcatcccacttgacacagacgccaggatttcccagtagtgatgttagcacagatgtccctctgagcgacattattacagaacagaaataagacatagtttctttttcttcccttgtaaagacacatagaaaaaccttttcttcaagctttgctgtccccaaacaactatgttttgccttccaaaattcatttaataactgaggcttttagctctattgtgagattaaaagttatttagtcaagctaagtgataggtggataactgctgaactggcaaggggagtgtctgcagactcagcagctttccccgtcttcaccctccccaacacgtctcagaggagccaaactccagatctaggaaagatctccggattccttgagtaagcccttatgggactctgtccttctgaaaagaagctgaagatctctttctgtcactcatgcctaattctcattcccaagggttaataggctatgttccccttccataatccaagttattcacaagcatcatttaaaatcggattttgctcaagatgcccatttccacacagaagagtgcgtgtcttgatgaatgagttgctaacagtaaagcttcttcaaatagaaaaggtcagaggatcatccagcattatctcccccaggtaattcaggtcataagctctagagcggggcacaagactgtctcgtagttgagaaattgtactgagaaattcccgccccattggagataagtttgcaacatgtcacttgggaaagcaattcttttgttaataataagcccattgctcattttgttagataaccttgtgtaagatgggtatttagaagaaacccggcaacaaggctgagtaaaggtttttagaaggtatgaaggtttctaccttcagtgatcagccaccgttctgatggctcagttgttgaaataattatatcaccagtgattactgtgatgacagttcttgattcgttgttctcatcttcagaggaaacttgaaggatacctgtgactctgcagaattccagagagggcccagatttgtgtgctttacctagaacagtggaataggctactagccaaagggggctttcagagagacagccaggtccagtgtaatctggagttgacaagggcagggaagggactgtgtcctcctcctctttgcatacctaagctctgctgcgcattaggtgccaataagagtgtggtgaacagatgaaggaacatacaaagggatgtcacactggatctgttgtgaagaaccagaaagaggactgagagcttacaggggaaagtctgagtgttgagtcctaatgtaacaggcttaagaggtatgcactaatgcaatttcttgttccccttggccctagaaataaaagaacttgagaacaacattcggaaagccttgtcatttgacaaccgaggagaggagcaccgggcagcatcgtctcctgatggccagctgatgagccccggtgagaatggcgaagtccggcaaggccaggccaagcgcctgggcctggatgagttcaacttcatcaaggtgttgggcaaaggcagctttggcaaggtctgtggcacacacgggtggaactgctggttttgttctactccttagcattgtttcgtctgtttgatctaagattgagagaggaacctttcagcctgatctcgttaggttttctttccttttttgtaagtgcaaatgacctgaggccaagtagataggagcgctggttctgctattaattggctatatgagactttcaagtagtgatttaatctctttggaattcaatttttctcatttgttgaatggggacaggaatcaagtgagatggtagatgagaaagcactttggaaagttttaaatgctcagtgttccaaatcaatagtagtgtcaatacatgtcttccctccttcagagatcagctgaaattctgtttttaatttgttatgaagactttgagaatgaatctctgccctcagcaaacctagggtttaaagcaaatttagcatgcattactttggaaggtaaatgttatttaactgatctttctggcatgtaataaatgttctgtttatcctttacacgtggcaagaaaatgggaataatcatctcatgcctcggatcagggtcctctgcccttggtgccattctccatatcctgttcccactgagatgaacacagtggtgtggggtgtggcctttagtatgctcaataaagcactaaaggtgatcagccaccattccgatggctgggtgagatggaaaaattaactcctgttcatttagaaagaagatgaaggggcagggagcagaggaagctgtttgcatttcacctgagatctctgattgttccctggttctgttcagagctaagcctgggagtcacctttctgggaccccctgagaagttctgggaggtcctgctctggggaccaggaagctcctgggatcacatgccctggcatgtcctggactcttgaaagcagcagcctgtaggtcagtcagctggcccatcccacctggttcccagccgtctcacctgcccctatctcaccctgataccactctggtgggaaggtaactggggtttacttaaatggcaaaagctgaagcaattacattctttagagactgactaaataaaaagaggtcctctggttaggcataactctgggacctgaacaggatgtggtctaattttgagcaagactccgagattctaggttttcatatagtgtaggcagaatgggaacttagatgactttggagcatttaggttatctcttaggaaaaatcacagccaaagtttgagccagttttaaagagtctgtaaaatacgcgggcgacaaaaagtcttcaggttaacatcatgaattccctcattaagtttctgatggctgctttttagctttgatgacttacattggaatactgtacttaggagttacttatttaagaagagaaaggcttgtgacgtttgtaggtaaatgagtgcaaaaatatcaaatgataggaacactttaagaacatagaactgttaattagctctcttgaaaaggaatcacgtttccagcttcagagttataaaagaaaccataaaggcaaacaaggacagattcaactacataaagatacatgattcttttcaatagaataaaataacagaaaattataaaacaggcttagaaaaccttttacagaaagtaaagggttagtatctttatatatcacatgtgtataaatttgtaagaaattaatatgatagcagcataattagacaaaggagacgtgaataatttacacgaaaagaaatacagtcagaaaacagttaattttaaagtttcattttaagtaaaaatagcatcaaggtaacatttcacacctattaagtgagcaaaaatactttttaagtgaaactactcagtattggtaagtcaccatgaaactccaacacttctacattgctagtggcacattgtatcacacatcctttctgaaaataggaaatgtgcaaaatgcttcaccctttaatctacttatgagggtttccatcttacaaatgtaatccaagagaaattgttttaattgtgtacaaaaatactcaatgcaacttatataatacttaatgattagatataactgaagtgcctaatttgagggaaatggttaaataaattatatttacttgaattgagtataagcaaccgtgataataatggagaccatatggagaatgtctgtaagataatgttcagttaaaaatagttacattattttactgtactgtaactgtaaaaatagttggtgtactgtaattgtaagtatgacaaacacatataaacatatgaataaccattcaacagatgtgcattgaacttctcttttctatgcctgggcattgtgccagagatcaaaaataaataaattgtagtaactattagaatgtagtaactgtagaacggtagtaattgtagaataggaagttttcttaaacattatgtatacatcttgagagggggtcttgctatgttgcccatgctgatctgtaactcctgggctcaaatgatccttctacctcagcctcccaagtatcttgggtgcatgccaccacaccaggcttgttataatatttaaaattaaagaaaaaacagaattcgtttttgaagtatttggtattagcttacacttcttctttttattccatacatgcatagattgatggaggcaattgattgattgcaggtcatgttggcagaactcaagggcaaagatgaagtatatgctgtgaaggtcttaaagaaggacgtcatccttcaggatgatgacgtggactgcacaatgacagagaagaggattttggctctggcacggaaacacccgtaccttacccaactctactgctgcttccagaccaaggtatgttaggaagaagctggctggctgccatgttggggcatcttgactatcagataaaataccaattttagaccctctacattgttctctcaaagactttgtaaagtgggatgggttttacccttgaaaagatcaggatgtatttgaacagcatcttcttttttagggcacaggattttccattcaaggttgtgcttgtgaagggatgagagagctgtagaattctttgcagccagagttggacaaagccaaatggctaaactcactgtttgctcattggaaaaaccaacaagtgtggttagtccttgctctgctcctaactttctatcactaatcaaatcacttaacttctaagttattttcatgtcatatgaaaaagagtaaaggccaccttaatctcttctaatctgtgtaatgtcatctgaaataaaggatgtgaacaaatgcttaaaatttcatagtgaaacacaaatataaggcagcatttttaatttaccgcataggtgtctgggaaccagaaggtggcagtaaagaaacaaagataatccataactccatggtagagtctgactcgagtattattaactaatttgttacctgtttttagtaaagaaacagcaatgttcttcatgaagctctaattttgttatcctttttgaggggttgggaggagttaaagtcttttaggatcattatggatgtttgtagtattttgcttcttgagaaggcaaagacagacatcacctgaaactcctagctgtggcttatgtggaacccagaccctgagggtgacatcatggagaggtgataccttgcttctgggtgtattctcatctccatgtcattttgaatgccagtttttccacttaaaattcaatagttattcattgagtcatttggcaaacttttcttttattatatttcattatatccttcccgtgtatctgatgccatgccaggtgctggagatacagtggtgaactagactagtccctgacctcatggagtttacattatctttggtacaccgtttcccagagaggatttctcagaaccccaatcacttgagcagctgtaagaagaaaggactctgtgacccatagttggagtcactgcaaacgtaacctctcttagtctcaacacacgtatgtttattagcatccttgaggagacctgcaatgaaaacaaaattacctttgtttaatctacttttccgaacttatttgatcccagggtcccccatctctctcttacacacacatacacatgcacccacacacacacaatgcccattccatactgaggaaccctgatccagtggaatttttcctatccttctgatctctcaggagaataagaaatatcgtctgaaaatctggaaatcattctgcttatctttcaagatggacacatatttctttgtctacgaaactttcctcagagaccactatttaataggaatctatccctttttctgcacaagtataagaattactaactcttctcatttttcatgtgtgttgtgtaatgcctaatatttatgggtttgtgtgtgtacagaatcctgaataatagagactcagtgatggagttaactttcttcttttttccactagagcataattttagattcatgagaaatgtatcatattttgtattttccatggtgcctatcacagggcctcacacttgacaggtacccacggacagaatcaaagacttggaagattttttcaaagtcaccttatctttctttatctctctctcttttcctttcttttcttttcctttttttttttcttttctttccttttggtaccagtgagaaaattgggtttcagagaagtaaaactattttgctcataggcactccatcttggcagagtcagacctggcatctcatctagtctcagggactcccaaggtagtggggccttgctctgattcacattgctagtttcttgtgcctgatccagcacagggtcccttctgttggaggaaccctcccacttccccctgtccccagcaggtagccctccctctcactatctgaggtggctttccaggcagggagccactctggcaagttttctttacaccattatcaagaagcccaacatcctaggaggggtccagtttagttgtgagggctctatggagcccctgtacgtggtggatcatgggaagccacgttgaaggtcagcttggtgaatgagtgagggagtgggaatggatgtcttcaatgtcagcagtgttctcctttgtgcgttgtagaataacaaggctaaggattcctcatcatatggcagcttttggagcacaaaatggtgttgaataacaccagggatttcttttatggcagaacagtgatcaagctaacatggatgttgtcatggatggctgtagggtgaggatgggcagagaaggagcttcctctgtagttcagatatttactatcttttctcaggccactgtcaggcagccacagtcacaggagcagctttgcaccaactctctcatgccacctcagtttcatagaatacttagctttatgtaacagatgcatattcactgaatttttctaaactgaatcatattttaacctcatagaaggatcttaacttacttatgaaaggaacctgatgaagaatcagcttataaaccttcaacttaactttttaaaaatgtgactttccctatgacaaaccaacagtttatcatagttttaaagagtagctattattcacctgactctgaggtagatgctggggttattaaccaaaggaagacagttctcacgtggaaggattcactgataatagattgggaggttattctaaattccacaagctaagagggagtagcaaacagcattgaatagttatgttctagatgggagtattcaaaccaagaagactcaggggagggggtcttccctacgatctagtggaagaagtgcgatcaagccaggctttgaaaggtagagaggatttggacaggatttgggaatagcagctgggtttggtagccacagaattcagtcttgattgagtttcacttttcctgaaaacaaaggacagttcctctgagccaccttaaacctggtttccactaagactctgatacaacattcaggaacacaaagacccgattgcaatcctattaagatttctttcatgcttgtttaattatgacatacagaacagcaataatattaagtcgagtttaattatttttaggtgagcctttatttttcaatatatcggaaaaaaatggtccttttggaaacattcctttgagaacttcttctgagagattagacattgcttcagactgcacactacatacaagttgcctggaaagactcagaagtgtgtaaagtgatgtcaccatatctaatacggtgaccaatggcaatggtcatatgaacccattggcatcagtcatgatgacatagtcaggttcaggtctggtcagtgcagcccagtgaagggccaacttacagctgaagagagatttgggcttttctttactgagcccgcctacccttggctcatgtgctccatccgctccatgggatctagaaaggcaaaaagcaaataaaatggctccagctttccagggctagtgagaaaaagcagacagaacaacaaattaagccagtggttttaatttcagtcaaattcaaaccagtgtgtctttgggatgcaagagtaacctgaaccatgtagggaattctaccaaacttgatttaatttactgtcaaaatataaagtacagaaagaggaataaagaacttctaattccagtcaagatcaagtagccacattcgtcccaggtcctccctcttacaactaaaaatccctggacataattcttattttataaaggtagggtgcttatcagcttatcaaaattggcatagtcacaaaaaactgtatctgttgatgtgaatgaaagaccaaaatttttatatttaaaaattctagaagacttttaagtgggtaacattgtcagtagtgtttaatattttcttgcatatgagaaaaaaaattttttatacatccacagttgtttcttgctataaaaaaattatggcctataattgtttcaattacaagtctttattgttaagcatctatgtgctagacactgtgctagattctagggctacaaagctaaaagataccaactctgaactcatgccaattactgcctagtagagagatagacatgcaaggaggcagtcaggaaggtttcctgatggaggtagaacctaccctggacctggaagcatgggtggcatttgcaagagggtaggggtaaagacatggctgctgaaacctagaaattatttccaaatctcatttgtattatttttccaatgcttgaactcccaaccaatgctatctcctacttcttccaaggaaatgataatggctaaaccagagcaaagaaggaagaggagaaagggagggtatttggaaaataaggagacagattcctgcatctacaagatcagatgcctatcggtagaggagggaggtaatgctgtgagccctccttattggactgctaggctctaaaacttaggggcttggtcagggtttgtgggggaagtgacttttggaattgcctctcccagttcccaggttcccattcaggcattgactacaagggataggagaaccactgagaggtagttttgttttttttttctggaagttacaggaaatgaaattcccagatttttagagtctgtgcatttgtatttatgacccccattgttgaaaccattctctccaacaggatcccacaaaacctgtcttgaataatttcatgatttttcctctttaaaaatttcatctctacacaattctacccatcccccaccctttggcatttcctgccaggcctgggaagccaaattctggagggctttgctgcaaaggaaacaaagggtgaactagagaatctcccttagccaatctcccttgctgccctagggaaaatgcagcatggaaacatccttacaaagcaacgggagacgtttttcaaatgcgtttgaatcatctgtgtgagcacggggagaagtgagaaaaggagtgttaacaacgtaggagcaaaagtgtcatttcaaggaactcaactctgaagaacagaaacactaaaccaaaaaaaaaaaaaaaaaaaaaacgaagtaaaaattaggccattggtagattttgttctaaagagacagctatgtcagattaaatctaaacgagctgacagagccgttgaggatgggtctctttcctgctagaccatactgtctacctgaggcaccactactactccgaaggagttggagagtgtgtgagcaggtttggtgagtgcttttcgagaagagattgagatgctcaacacaatgagttggtttgtgggtcaggcagccacctgggaatcaatatgctcgccagtaacagattacaagcagagatagcctcagtaatttgcaatggattttagagaaatgagatccgtggtagaggttacaggcttagtgttggcagaatcagttattaatagaatcagactccagggaagtccatctctttacttctgaagaccatctttgcttgatagtgggctggacagcaatgccatttattctaatcagccaattaacacatctttagtgagcacctatggtgtgcaaatcactgcaagatgtgacaagacttttatggcaggacctttggtcaaactagttgaggggtaagctctactctcttgtgaaggaatgcacgggtgtatgtgtgtggtggcgtgtgtctgtgtagatgagctggcggttctctggccggtcagagaaagatcgtcactggtttccacgatcaagcaaggcttcatggagcaagacaacttcacccaggtcttgaagcataacaggattcattctgtgtgataaaggaaaagttgtggagtttgttaatgctcatgtgtcccaggggcagagaaggatgtgttggctcttaatctaactgctgcagcttcgtgtaacctctttgcatataaggaaaccttacatttgaataggacctttgcttttaaaagtgccctgactggctaggtgcagtggctcatgcctgtaaccccagcactttgggaggccgaggcaggtggatcacctgaggtcaggaattcgagaccagcctgaccaatttgatgataccccatctttactaaaaatacaaaaattatccggacacggtggcgggcacctgtaatcccagctactcaggaggctaaggcaggagaatcgcttgaacccaggaggcagaggttgcagtgagccgagatcgtcccactgcactccagcctggggcaatagagctagactctgtctcaaaaaaaaaaaaaaaaagaaagaaaaaagccctgacttagatcagccattttataactgcctaatgatgtctctatgaattcacctaccatactctatggttattcactcccccttttttttttcggaatttgttattgtggtaaaatacacataatataaaacgtgccatcttaaccgtttttaagtgtacagttcagtggtattaaatgcattcataatgtccatccatcacccctctccatctccatgcctcttttcaccttacaaccctgaaactcaatacccattaaacagtaccttcctattccctctccccacagcccttggcaacagccactctgtcagtctcaataatcttgactactctaggtacctcttataagtggaatcatacaataatgtctttctgtgactagtatatttcatttagcagaatgtcctcaaggttcatccatgatgtaacgtatgtcataatttccttccttttaaaggccaaatactattctatcatgtgtataatatcacatttcacttatcatctatggatggacattttgacttccacgttttggctactatgaataatgctgctgtgaacatggttgtctgaatatttctttgaggccttactttcaattcttttagctatatacctagaagtgggattcctggatcatatagtaattctctttttaattttttgaggaaccgctatactgttttccataatgactgaactattttacattcccatcaacagtgcaccagggttctgatctgatttctctattactttgcccaacacttatttctttatttgatagtagccattctgatgggtgtgaggtagtatctcattatagttttaatgtgcatttccctagtgatttgtggtcactcatttttacagataagaaaaccaaggcccagtcaagtcttataatttgtttgcaacagaacccagattggaataaaggtttcccaacagtctttgttgttcaccatgtatttctgtctccttctctgtcctcctgtccaaattctccacttcaaatagcctcacctccaaatcccctcttccccaattcctgtcacacacatgaaaaagggtctgaaggggtgtcagctcaattttacatgaactcaatgaggctgggattaaaaaatattaatgtcccttaagctggcaagaggagcagggttgatcagcctgtttctggaaatgtttctgttttctgaaagcgtaagagagaaaggaggaaaaagggggcatgggcacaggaacgatccaaaatgggctggagtaggatgaggccctcacacttgtctgtttagccattgcttactgagcacctgctatgtgccgtgccatggggcatcatggggcgccatgctgcctgctgaggaacacaggtgtggggaaaggtaggtaggagtcccggccttgtgaacttgaagcctcatgggagcgtaaaactgctggcctctacagaggttacagtgagccgagatcccgccactgccctccagcctgggccacagagtgaaactccatctcaaaaaaaaaaatttttttaaaaaaagcccttctggcctctatacagtgcccagaactcagtgctttattttccttcagaaactgttggcctgatcttcttttgtaaattgtgttttaatcacaaagattatttattaattgtagaaattttggaaaagtcacaagaggacaaaaaagaaaataagaacaattcacatgactactactaacatttcgatgtgtatcattccagttttagaaaagtacatgtctgttcatacatatatatttataacatcagtatcatactctatgtaaactgtttcacttagtaatatagtagagctattttccttgtcactaaatattcttcagccaaatgatttctagggttctacagtatctgagggcgtctcgtagacattctgcatcgggggttgcaggtggctggtaagtgcctggcttcctcccagctgatgttagcagtgaatggaccgcatgctctgcccagtgctggccagtgatggtgctgcgctctctgcagcagaactgcctccttctatttttatttctctctgtaacatcaacctgagtacaacatgtaaataacctatttggcattgacataatgcaaactaagacttaaatgtctttaacattaaatatgtgtgtatacagcaggtctttgaataacctgattttgttcaatgtcatttctttataacattaatgagaaaaatatcaattcctggccagggccactgactatgtggagtttgtactttctccccatgcctgtatgagttttttttcagggacttcggtttcttgccaaatcccaaagctatgcacatcgggagaattggcgtgtctaaatggtccccatctgagtgtgggtgtgcgtgagtgtgccctgccatgggatggggtcctgtccagggtggttccccgctggcaccctgagctaccaggagaggttccacccacccataaccctgaactgcagcaagtgggtaaatgatgctcttactcatttttcttcatctttcttaaacatatgtatagctcacatttacttcagtgcttaatattagaagtgttatttcagttttactattcaaagtgttctaaataatttttcttagaagtctgatgtttttgtagccagaagtatacttaggaacttaactcttctttataccaattagcctatggtaaaactggtttccttacgtgtcttttcacttgaagttgcagtttctaagaacttaccaatgacattgtgaggacttcctgtacactgtttggctaggaggcatttttttttttaccactaaggaatatatttacccattctcctaaactgtttgctttttcttgtaaagctgttggttttctctttttttttttttttttttttgagacggagtcttgctccgtcaccatgctggagtgcaacggcgcaatctcggctcactacaacctctgcctcccaggctcaagcaattctcctgcctcagcttcccaaatagctgggattacaggcacgcaccaccaggcccagctaatttttgtatttttagtagaaatggggttttaccatgttggccaggctggtctcgaactcctgacctcaagtgatccgcctgcctcggccttccacaatgctaggattacaggtgtgagccactgtgcccggccaagctgttggttttcaaattacattttgtggaggtgcctctgttgcttcagtgtatggtgggtgggagctgggtacacagacccagtatgcgctattagaggaggatgtacacgcaccacctactccacctggctgtgcagctccatgtccgactgtttcacatgttagcattccaaggaagataacatttgaagaaaggatttcactttgaaaacagtttaaaaccactacagctctgactgggagctggagtgagtcttgatttttttttttaacctacccatattataatctaatgtatacaggtgtcatttcctgaaggtctccattacaaatgtcctttcattattaaaatgggcacattcctgagatttgggcagaaatggaattttggaagcagattcaagattctggtattctgtctcagtaacatatttcattgtttagatcacgcacagaagtgcctgctgatgtgtaaaagtgtgtgtttaaacctttgactcactgctgacagatgtagaggcctgtgatagaatgtaactgggatgtcacactacttcattgatcaggagaatttgcgtcagaatcttttgaggcacagttgggagataacagggactgggaaggagagatatgacaaggcacagcaaacagtaacttagaataaagacagtatgtgataaagaggaaggagagacgtatttattgagcacctattatgtggcaagcctatccaagttgtttaaaagctgatttcatcaatcttacccaagtcccatgggatgtaggtattgttgccagttctttgggcagctaaggaaacagactcagggaggcttaaccatttggtcacgatcacacggagttaagtgataaagctgggatccccacctttgcctcctgggggtgagaagggccactgtggaacagggtggatgctggggcattggggggcagggcacagtgagtttgggggcaggaggcatttgcaggaacagacccctgatttagcgagtgtaatgatgagtcctgctgctgttgcaggctcatgctaggaagccgtgaggaagacaaccttgtgaggaggtactggctaagttgtggagttcttactctgctaggcaaggagtttgcacttattctggaagtaaagggggattccttgaagatattgtgggaaatgatgacttaaatcatagcctgacagctctgcgtagcctgcattaaaaggaaaaatgaaaagcagagatatctgtgagcaggctatttcaataggccaggagtccagaggcagtggggaagaacttctgcaggaagcactgacgtggccattcgctttcccctttgcatctgcaaaggcctcctgcttgtgaagaaagcatagtcctccctttagcacttagaaactgtcaattgtgtagccccttaccgattagaaacaagaacttaagttgctgctagttgcagcaggtgatctacacatttctaaggtgtcatttggtcacagttcagttggcacatcatgatccaatttaagtaaaaagtttcatcttgaaatctaaaactagaggtctaagttatctaacccggtcaccaaacaaagccagtttcctcatggctgacgtcagattctctcacctctccccaacgcccgccatctattggatttcagaatttacctttttgtgtgtgtgtgtccagtttagattcgtgttgaattttgatagtggtctggtggtgttttctacagggaaagtcatctggggcctttcatagggagcttctacatagtctattgagatgactccattgaagcaatgggctttccccatataacccgaactttttgtcctagtggtctgaaatacttcagacaacccagatgattcctaatgctctgattttgaagactttggtgggtggtaggtgcaacctattcagctgtttgggttcacatatgccctgttgacgtgtgggaaacacaggatgcagtaaagaaggcaccacgagtcaagaaactgcaggtctagctgtgacttctgccactgatgcttgctctgagacagttatctgggcactgacttttctcattcataataaaagatgtggggaggacacagagaggggagtttcaactacatgacctatacgatccctccagaatctgattctaaagacctgtgacaatgcaattcattgggaaatacgcatggtatcactacaggtttacctgttgctaatgcatgagtgagacaaggacaatgacaaagtcagtgaacagtccttctgtttagtggtctagtggtgttttctacagggaaagtcacatggggcctttcgtagggagcttctacctagtctattgagacaactccattgaagcaatgggcttcacccatgtaacccgaatttttcaaagctcaattcagcaaatgcttctaccttgatcaaagcctctgtgttcacaaggctgttattttacatcagggttccaaactcaaacacattttcaatgactaatgctcctacatcagaaaatttaccaggaggttttatagctgtctgtttaaagtacagcatagtttctagcacacagaaggttcaataaattctagcttctgtcttatccagttaacagtttcaatatcatcggccgggcgcggtggctcacgcctgtaatcccagcactttgggaggccgaggcgggtggatcatgaggtcaggagatcgagaccatcctggctaacaaggtgaaatcccgtctctactaaaaatacaaaaaattagccgggcgcggtggcgggcgcctgtagtcccagctactggggaggctgaggcaggagaatggcgtgaacccgggaagcggagcttgcagtgagccgagattgcgccactgcagtccgcagtccgtcctgggcgacagagcgagactccgtctcaaaaaaaaaaaaaaaaaaaaatcatctatatagatagatcccaagctgacttgagagctttgtcatgtttctctttgcctagaatgatggcctgttctggccagttggccaactgtttgtgaaacagaattgagactacctgagtctaccattgttggtaggtttgacccctggcacactcatttcataaagagaaaatatgtattacctgtcccctaatctgggcacacgttgcctgtaacaacagcgatgggccaaccctgtaacctgtttagtcatctcacaagtgcctgttcaggagggcatcaagcaagaaatgactgacagccaccccttttcccagaagtttatgccagctagaagatgaatgctttgtggtagcacttttgtttcttaattatataacctgtttatgactttagaactacagctggttaatgtgaggataacatctttggctgtgtgtcctcaggagtttgatagcccttccttcttactgcttgacccatagcttgaactagggctagccacaagattccagtgaattcctgctgggccctttgtctccttcctgtcactgaggaggaggtcacaaattggggctggcttccaaatgtgtgaagaggaggttaccggttccagtgaataataacttggacagaactgtgccccccactgcctgtggtttgtctttggaggcttctggtgtagcctgaaaggagagaggggccatctgggtgggccagtcaccaccttcaatttcagggtcatctttggctcaataacaaaaatggcaggaatttctatatagtgttcattacatgccaggttcaacttggagcattttacacgtattaatttaatcgtcacatcaaccctatgaggtaggactgttattccaaagagggatcatacagctggaagcggcagagcctaaattcaaacctggttagctagcttctattatagaaacctcattttgtctgaatgcccaggggagattagcctcctgaggattgataaaccaaggtcccaagagcccaaggtgtaaataaaatggcaattggttgatttatactggggtgactgaactacttacgtgagttgcccagggcaccctggagtaattctttaagggtggtattccaggcaatctgagttgtattgggaaagcaactgatggaaaaacagaccctctgcttcctgttatgaggacattttttttttttttttgcagaggcaataggaagttgaagcctccacttttgacctcattggagcattttgtttttaccatgacgttccagggagaatgccaggaaggatcatgggcaaaaagaattctctcagtccgcctccttagtgtggcaggaggtacaaattaattcctttgttgggtcagtatgatattcacctgggattcatcagcagtatgtaatccattttatcgggaacacttgtgtgcgggttgctaggaagctaagcttattacctggctctggctcttagagctgagcctgctggtgctaacagatttgggcctgagaagtttgtggccttccctggacttcagaaggagggtggaaggtccagtaaagtgtccaaggatgagagtgaatggggaaaatgacttttgttctcagtgtttctttcaccatttatccaacctatccccatgtgtttttggtatttttttttctttttcaggtaagagtttaaatccaacctcctttatcaagccccagtttatgaaaactttctagattcaccagtgttaacactaaaaacataccaacacaaccaaaggaaacacgttgtcatgaatggtgaaatacttctaccatccaatttgcccagagttttattcccttgggagagcttcttaaagatctaggaagtatcttttgatgtacataactcagagattaaacacacttcacaaagtataggtaggctccactgaaagaaagctcgaaaatttgactgtaaaaaaaaacaaatgtaggtgtgattgttgaccttgcaaaagctaactcctattataaaatgtttacaaaagaattcacgagagaactcccggggttggcaagatccatttggattgccagacgtggtgactgaggtgcagcagtgctaggcagagtaactgaaccctgaagtgttaaaaaacagctgtgcaggagcagtaccagggaacgtaagacatctggaacacacacccccagccagggacgaagtgttctgcttcagtatacattagacaaccagtattttttttagtacctggtacggtatgtcttcaacttaatatcaggtattccagggatagaaaaagacacaatccttgttcaaagaactgctggtccacctagggaggttaggctaataggtgaaccagagaatgaaaatcagaggaagagatgagtgggctgactagtaggtatactcctacaaattggaggaaactgaggcacaagcgttgaagtgccccttccgggtcacatacacgctcatgtgctccctctctctcccttgctctcactctctccctctgtcactctctcgctgtctcataagggactttgtcacaggaataagaaccctgggttccacctaccccacaggagcacagtggcaaggtcccatctgattcaaggaaattggctttgtagggttgttattgtgtgaaaaggagcaagccctgtccaaggcagatctggatgtttgtgtagttcagatccatttagctccctggccagtgttgatctctgctgctttaaaccacattaatctctgggagggcaaactgacccatcactatgggaaccagagtgagcctgtgtcctgggtactaggtaaacactggaagtcagtacctggtagacgccataggcagaagcaaactggggccttccaaaagctgaaaatgatcaatagatatgattcttgtgcatccatatcccaggaaggagggattctgtttagctctttgagctaattgttaattttcaaatcttgaagacactattgagcatgaaatgcagatattcaaatacccctttctccttggtaggaaatggtactaacagtctgcaggatcatgggagtaaaaagcgcagtctaagcacataggcattcatggggagagtatacgaagttagagggtataaaagctatgtggatggttcaaagattaaggtaaagatgtgaaacctaaaatctcaattctctagaatgggacatttagacttcatgggtagaggaggacaagaatcgggagtatgggcagttagacaaaatcagaaagaagcgtagaagactatgcagaaacattaagaatgtagtggtggaaatgttacctttttggaagatggtatcatgcagaaggtttgaatgcatttctctgatctttaattctaccaaaagtgtcactctgatgtaagaaaatatttaggttgaaaaggtgaggaactggccacagctttcctaaatgtggttgacaacctgtatccaagagaacagaatgaattggtcgatttgctgtgtcatgacattttagggatgtttttgggatgtttaagggatgtttttgaaggggatttataagagagtaaatgagaccccttaaacacagagatctgaggcataagagctggtaattttaaaagatacacagctgactacagaaggaaagaagcaagtcccagaatagacatgtagcatatttccatttctataaaacccccaaacaggcgagactaaacaatattcttaggaggaaacacatgggtgatgaaactgtaaagaaaagcaaggggccgggtgtggtggttcatgtctgtagtcccaacattgggaggccaaggcaggaggattgcttgagccctgggaacatagtgagaccctgtctctacaaaaaattgttttaaattagcctggcacggtgatgtgtgcctgttgtcccagctactctggaggctaaggtgggaggatcgcttgagcctaggaagtcaaggctgcagtgagccataatcatgccactgtactccagcctgagcaacagagcaagaccctgtctcaaaaataaataaaagaattagccagggatggtggcacacacctgtagtcccagctattcgggaggctgaggtaggagggtaggttgagcccaggaggttgaggctgcagtgaagcatgattgtaccacttgtacttcatcctgggcatcagagtgagaccctatctcaaaaaagaaagaaaaagaaaagaaaaacaagatcatgattaccagggaagtccaaatagggactgaatgaggatggggagagaggttgcaattaaagagagttaaaggggtttcaaaggccagcaaccatgttctatctgtcaaggtgggtcacagctaaaagtgagtcttatttgatctttaaaatgcatatgcatattttacatattctcattcgtaggtatattttacaataaggcagggaaggggaacaagaacatgaaagcatccaaactgtcataggcactagcattttaaatgatgacatgctctccaaaaattcgaactttaacaaaaaactgagcttgtgcactacctctgtgtatcattcttttgccactaaagtttcgattttcctgttcttttggcagtatgatctgtctcaaggacaagaagtgtggtgactggtcccatggcctatttagctggaagaatgaagcgtagtccctatcctctttccaagaccaaggccaagatggggctcaagaccagggggttatctacagaactgctggcccaccttccacctaccctgggggacctccctcttgaaggttgggattcttttttttcttttttttttttgagatggagtcgggctctgtggcccagactggagtgcagtggcaagatcttagctcactgcagcctccgcctcccgggttcacgtgattctcctgcctcagcctcccgagtagctgggattacaggctcccaccactgcacccggctgacttttgtgtttttagtagagacggggttttgccatgctggccaggccggtctcaaactcttgacctcaagtgatccgcccgtctcagcctcccaaagtgctggaattacaggcgtgagccaccgcgtccggccgaaggttgggattcttaaagagtaacctagcccagcctcactctttcagcaagcagctctgagttggggggtaaactttcttcactgccacaacatttgtgttttgcaacatgtttttaaaccatgttttataactaagaagatgccaaacatttcatttggcagtttgtattatgaaaaccatagttatctttccattttcacctataaagtgatgttataaattgaaccttttaaactgtagatgtgtgtgttctttctagattctggcatattctataggggacatagcactcactgtgctgccctccccacctgccaccactggttgaaaataacagctttccttgctgccatcacatacgtaaatgtaactaacatttatagagtgttttctataagccaagaatgataataactgatgttctttttaaaaacttttaagttcagggtatatgtgcaggtttgttacataggtaaacttgtgtcatgggggcttattgtacagattatttcatcacccaggtattaagcttggtactcattagttatttttgctgatcctctccctcctccccactcccacaggccccagtgcatgttgttcccctctatgtgtccatgtatgctcatcatttagctctcacttacaagtgagaacatgtggtatttggttttctgttcctgtgttagtttgctaaggataatggcctccagctccatccatgtccctgtaaaggacatgatctggttcttttttatggctgcatattattccatggtgtgtatataccacattttctttacccagtctatcattgatgggcatttaggttgattccacgtctttgttattgtgaacttagctaatgttcttatggcacttactatatacctgtcattttttaaagctctttacgtatgttgattaacttaatctttgcaatagtcctgagaggtggatatcctgagacacagggaggtagaatgacttctccaacgtcacatagttaagaagtggtagaattggatttgaaccaaggcagtttctgttccattgtcctagtgttcatcattctacagtgctgtctcagataatatgttaaatttacatggtggtttcatcttttccacaacttttttatttccccattttatggataagcacattgaggtttggaatttcatgtgacaccggggtgaacagcagggggagccacaaaagtggcttggaggtgggaccaatgaagatcctgtctgttcactgcccccactaacgccaccctttgtgaaatgaaaaggcctccctgtatccctcagtcccagggtgagtggctcctgcaacaggaagaaggagcaggtcctagaccaagagctcaagcaagcctgttcatgcatcgctaattgcttaaacatcagggaaaggggtttgtcgtcgtatgggtttttttttttttgtgggaaagcttttcatacaatgctggctgactcctgagccttaaagtaaacaactacatcatcctgtacagagggagtcaggaaaaggaaactaagaaaatatcaaactcctgcagctttttttgaaatgtaagtggaggaggaaatgatgtttggagggcatttgctggggtccttgtaccagaagactccatgaataatgatcctcttcccaagctgtgtatctgagtaaatgtttcccacactgtcctttcttctaaataccctctctgtgacgcaaggtgaaaaacccacccgcaaaacatggctagaagattctgtaaacccattagaaagttaagctatttcccaccagggagtaatgaaaagcctcacttgcaaaactgctgggtgactgagctgatcactccctgagatccccacatcctgggagggcagcatcctcactgctgtctccatagtctaagaacatggacaatattctaggcatccaccttgaacatggagaagacagcactggagaaccttgcagatatagacacactcagaaagacagcagacttgttgaaaaacaagcttattttctcatccatacaacagatgtgaacctcctgtctaacccccaggtcctttaaacccacatggggcactctggagtgctttcctgcttccctagctaagtttaagtctttcctgtcctcccagaataccccaagtagtggggcggtcccaaataccaacttggtagtgggggttagagagagggagagactgaaaggacagaagacaaaatcatgaaaatcatgtggctgttccaccatgcccccctccctggggattctgaagtcctgtccctcctccctcttgctgttacttctgaacagctattgcatctttcaggtgtgatttggggatgcataagatctaaagctgctaccttcagggtctctgaaattaatgtctcttaggattgctgctatcataatacttccctgtagcaacttgtaattatgtcccaacgaaaaggaattattcgcttaaacgacttttcccttttccaccttctaacccaccatttgtttctcctagccctgtgtgatgtgggatagtccctgtattcctgcaccacaaactctaacatccttgcagtcttggtcatccacggaatatttcttctccgtgaagacagttttcgttacgtgtttccttttatgattggtgggaccttctctggagtgtcttgcacggtcctgtatacatcatttgttacctggagtgcattctatatttaaacaactctgtcgtgaatgatgtaccatgctctatgtgagtagggatgaatatttaaatggatttcccttaaatactactttggatagtaactgaagcaatggattagagtgggatagccaattagatttttatttgaaataaatcacttgggaaaggagctttacaaataaacgaaaagaacttgcccacttttgtgaccgtattttgagactttgagcaccactcatgcccagcaaaataaaatgtcaatatctccttgttcctttgttggctctcagcctgctgtcttcgatctcactgcccgctttctggaaacattggcatgtgaattcctgcctgttccctctgcctgagatgccccagccatgccccttgattgtcctgacctcccactgatcatctcacatcccgcctcttccacaaacccttcagttcatccaaatccctgtagcatttattaattttccttctttcttggcagccagcatacataccacgactagctatttagatttctatgcacaaaagtcttatctcccaaaatcactgtcagtacccaaaggcagacacacagtcttctacccctttacattctgctcgtgtgtgtgtgtgtgtgtgtgtgtgtgtgtgtgtgtgtgtgtgtagaaaaaacccacttacccagagtaaaatgctcataaatgctcatgcatcctgtggcagtgatggtaatgaaagccagtgtgattacacccagcaggagtcatttctggaactaaaatcggctgatttagcagctaccgtcaagttgctagtccatcatgctcctcctctcagcccatgactagagaatcctgaatatcccacatgctcctcacagcccctaccaactggtcgcaatttgcatgggagagaatgcgaacttatttttttaacctcttcccacccacacaaactcatctcacagcctcttagcaatagggtatctcattttgaacatttacttttcagacatttatttggttttttaaacttccagcaaatattaacaatgccagtgaatcctggtgttctcctttgcgcagtggaaataatacttcccttagaagactgccgcaagaatttagttaaaacatgtatggcctttagcacagtgcctggcatgtagcacacatacaacttttaaattgctttacaaagtcctttgtccatgatcttactttatcttcatggtgcttttgcgacaggcagggtcctgggatatctttctttgacagatgaggaaataggcacaaacgatgagctgggactggaactgagatctttccagaaccacgcctgtgcccttcctgttcctgacaatgttcattttaaggaggggagagaggacagcatttgtctatggaatgagccctggcacccagcttccgcctgggaaaaccgccatccctctcttaaaatgggcacgggtttgctggcaggacttgcccttaattatggtcaggccacctctttacccccagccttccaaaaccttcccgctggttgtccccagttgtacagtttgttaaagtctaccgtgttttttttcttgcatctcagtcatctccaaaagttccaggatgacttgggagtttttattggctaggctgaaaaaatgcccaggcaacaatggtgtgttgatgcttggagtcaggctggctagagcaagaagtgatttatgtaactctagaaggtcctaatcaggaagctgagagaaagggatgaagcatgttaatcctctccataattttctcttaagaatgactttagttagtcatgggtaaagtttatcttccaaggtgtgtgcttttgggatatcgaaagatttcatgtttcccagctgagacttccacatctgcaggctgccagtgttttcaactgtgagaaaagagctctctttcccaaaaattcatcatggactggaaacacggaggtataagttgaagtagccgtcagtggtgcttctaaaggtcagggtttcatgtatagaactggagccatccagttggaggagaagcccgttctcacctgtaatcagatgaaaaatgtagaagcatgagttggatggcctccacttatgacgcaatgacaagaagtcaacatgtagtatttacaaagatcagtcatttctgggaggattagagaggagaaaaggtgaaccaaacatcacttatggacttagtcatatcattttcactgatggtgatgacagcacgtcaacacatcatcatttggtgagagaggtctggtagccgttgctcatcatcttcctcactgggcgtggtggtgggaagtcccaccacagtgggtggtttccttggcattcatagcagaaccccacaccctgtcttctgatggcccttggacatggatcttgctgtctcagttgactattgcattgtccctcatggcagggttcttaaacattagtgtttttggatctcccagggagccggttaattggcaaattgtaggtcccaccccttgagatacagattcaatagggcttggggatctgcattttaaaatgcaaggtggttattggccacgctttgagaaatactgcctgatagtggcatagacacctactgttggagagagttgactttagaatcaatcagcaaatgactgcccaaggcactgtcctaaatctgactggatttgaaaaagatctgtaagctatgagccttatcctcaaaagtgtacgtatgaaatgaggtaagcagtgcaggattcgatagaatcagatgccgggctgctggaggagttcctagaagaatggagagtcagggcaactgggcatgggaggtggcatttcacctgagcctggaggactgtaggatttgcactgatgactcagaggggaaagagcatttctgatgagaggaacaaattgaggggtcaccagtgtgaggacaaccttgagcttgggatttcagtctgaaagcctatgtttcagtttagagaaagccgtaggctttctaatgtacctaaaacaggcaccaagtctaggcagatggccccagcccactgacagtgggtaaggacatagccttaagccatgctggagatgacaacactctaggcttttagaaatttggctctgaaataaaggatgtcttggggcatcccaagagccaagactgcggtctgtgagagtccaaacctgagtacttatacctcaatgttacttgtaaagtagttacagattttccaagcactcacttccatgttatccttagataggggctgtcacctaccccatagggttgtagggaggattaaatgaaataaattgggtaaagcacttacccaacagcaccaggcccatagcaagcatttaataaatgatagtggtgattagggctcttccccctactttcgtaaggagggggctgtgtgcccgtgtttgcatatttggtattgtattcttccttggtcggagtatcttccattccaactcctaattttgaaaacattgcatatagatctctagccaccaatccttcaaacctcaagcaacaccagaattggctgcttccttccgaagatcctccctcccacatctaaggacaccacagtaactcagtctctgtcagcttcccctcctgtagccttgggagcacgccgaggccatgggcttaggagaggcaacctagcatgctggacagaacccagggcggggatcctgtctgggctctgctgcccaaccacagggagtcctttggcaaatcaactgctctgacctcctttggaggcttgttgggaagattagagatattatttctggcatagtgccatgcacgtatcagaggccaaacagtagccagattcattactgatggtatgttctgaggtttgcacctttgcaaaccattctgagactgctagcttgttggcatgcactgcctacaccttagagtgatagccctactatgtgtggtctctgtacatcttggttctgggaaggggctacaaatctggattagacccaaagagtcccttctcgaaagcagcctgtgaccacatgggttgtacctctgaagctgaaggtctcacccttcctcttccttcagacagggtctcctttgctctggctcagcaaaatcagaatgacccttgatgtcagggctttcaagcagagcacattcccagcttccatcgtccaggtgtccccatacaccacaggcctgcccatagctcatgacaccacacttcaggatttctttgatacctctagagaaacatcagaatttttgaagctggcctgaaaggccagagccttctctgtagcctgaaggatctgaactcctttctcatagagaaaacaaggtccaggtctcctgtgtgagcaagaagcacaaaaggccagggctttgcttgactagaccataccccagggcaggctcttttgtgcagatgctaacttgaaacaggacactttgtccttcccagtccctgcctgctccatccccacctcataactcccctctttagtccagggggtgccctcccagacttagggaaggagtgtgtgaaatgaaaaaccattagaggtctcagctcaaggagggaataatattgttgttcgtaaatgtctgctgaacatttgtcatgtatttggcatatgccatatatgtgcgtgtgtatatagtagatggtaaggtaaatataaattactatatatggtgtatatggcacgttatatatagtaagtgtatatacataaacatagcctaacaccatggaggcaaacaagttataacagatatgcattaatttaacatctgtttatcttatacctgctacatgcaaggcacagtcctaagtccttgagatccagcagagaacaaaagagctggaaacctgtcctcatagagcttcaagtagtggcagaaaggcaataacggattaaaaaatccctgatgtcaggtggtgataacaaatgagactgcaaagcaggggaaggtggaagtgctagggaaaaggtgtttgtttgttgtaatccagggtggtctctgatgaattacagtaacatttaagcagaacatgaaagaagtggaggagccggccactcatatgcctgggggaggagtgtccctggcagatcgagtggcccgtgcaaaagtcctgtggcaggagtgtgtctgggacttctaaggagcagtgatgctctgctcatggttggagacagagggagttaaggggaaagtgggatgaggtggggtcagagcgagagcaggcactcacctgaccattctagaaaagaaagaataactaggccggtgtgtggtggctcatgcctgtaatgccagcactttgggaggctgaggcaggaggattgcatgaggccaggagttcaagaacaccctgggccatatagtgagacccctatttccacacacacacaaaattaattaaaaaacattagccaggtatggtggtacatacctgtggtcccagctacttgagaggctgaggtgggagggtcactagagcccaggaggtggggactgcagtgagccatgatcgcgccactgcactccagcctgggctacagagcaagaccttgtctcaaaaataagcttgggtatctggacaaggcaggacatggcaagcacacactaaggagcacagagcatccatctcaaaactctcagaggggagggagtgtcctctctgggctggggtggtcaaggaaggcctcttgcaagaggtaggacttgagctgatgagaaggacactgcaagcccggcggacacttgagatgttcctggtgggagaaaggtgaacaaacctcagtggagagtttgtgtaggggcctagtggaagataatgcagaagagagatgtcggggctatgtgtagagggcctcaagtgacagagaaagttgtaaaaccagtggaagcctggctgtcccccatcctcttctcccagtcagctaccttggcccaggccctggtagatgctgactctcagaagctcccagcagctgccaggacggaccctcctcctcgcctgccttcccacagctggcgtccaggacacttgggttcagccccttcatttgctgactcagattttcctgtacccattccagtgatgactatcactctgccagggccccctcccagccacagacaccctccccagacataagtctctgcggtctgcaggaattctctttccgcctttctggaaccactggaatcccacagactggggtggacagctattcttatgaaaagtgtggctccatttctggactaaacaggcgtactggcgctgaagataaggatcccaaactccaagtcaggcctatctgcaagcaaagtctcagcctcgctcacctcttcccttcttccatcagtcattagccctgtgtgagaaagcaggggtgcattgttaccatatgacatggcaaaaagggattacctgctaatgccatttggtttagtgatgccttgttacataaactactctggaggagttcaaatatccctcaggcgaacgcttccatccccaggttggtaacactatagctgagtattgttttatttgccatttttcaaaagagggagaaacatacccaagccattatccagcctaccaataatacatttcaagaaaacaaccgcaactcccaatcctttcttctgagggcaggatgttgtagggctattgttccttctcaggccactcttcaacctacagaaactggtctgggctacagtcagattacagggggtatcaggaggcctttgagagtcaggaagaaagtcttacagacagaagcccagctctagcaaagagggaaagatcactgcctttgaagctggatacatatgtggcctttaatttgagtgctggttggttgtcgttgggcaaatgactgaaactccttgatgcttattttctttatcttaaaaacataaaaaataaatgaggataagatgatgatgaccatcatagggttgttttaacgctgggatgcagtgatgtgtgtgcaagctcctggcacagcaacttaataccagtctcctctgtcctgtcttgcatctgctgaggatgaagaaggagagcagttgagtgtggccctgcctggctgggggcccttcctctatagttatcttctttataagccatttatagtcttggtataattttaaggaaaaaaaatcaaggcgctactttgcatttaaaattcatttttgaaacatactggcagcaaacgccacactattgcagttagggaagacaggagagcaaatgtcaggtcttggcaaagtggggtggggaattttttgagtgtgacatttgaataaagaaatctaaactaggaaaaaaaaaagttttccccgatcttatcatggtacaatgaagagttgtataaaaactgtttgtccctgctgcatgtttacttacccatgggcaggatatctcacgggccaaaagttcaaactactgctagctcccaagcaatgtgtgaacttaaaatgaactggcttcagaagaggctcgaaaaatgatttgatccacaaaggttctcacctcccaaatgttctaccaatacttgtcatggtctttggtgtagtattaaatatatacaatgatggaattaaggcatagtaacaacttcacacacacacacacacacacacacacacacacacacacacacacacacacattttccagatatttccttgcgaatgaccatcttattccattacatcaagcatctaggcttagccatgctttataatgataaaacggagctcttctaccaactccaaacagaggaatgacagaagatttagcatgtttttcttaatgttgattgagttttcctacttattgctgtagcaactatgaacatcttcaggttgggaatcagaccttaccaataaacatttgaagcgccaatatagttcctggctgaaaatgtcttttagatgtaatttatctagttccttaggtatctgagatactgttaaaatgcaatttagcgtggtagtaagaatacggctttaatggctaacgtagttgagaccccacctctgctcaaactagctgggcaattttggtcaatctacttctctgtgtttcggattcttgatctgcaaaataagataatagtaatgaatagactaattttcaggattaaatgagtggatgcaatgttaagtcctttacatgacacacatgatttgctatgcttttaattatgattctcttcaggtttaccatctcttgctcacctgcttcccacccagtttctctgtctctctcacatcttcctccagtgagagcattcgttccagggagcttggaagccagctgtcagttctctgccataatcttttcacaatggcatttgacccattggggtttcagatctccatatgtatattccaaaacattattgctcaatgagcctccactgaggcctgttcttctaaccctactgaccatgattttttagctgtattcgtggggtttttttgttgttgtttttttgtttgtttgttttagtagagggggaggggagagggaagggaagagggagtctggttcatgttattaaaaaaaaaattaaattttgctcccagggtctaagttagatctttgggttggctcagccttcctcttccagaagcctactctggctaatgtcctctaaagtgtttttcctgttgtttattccagaaatagttcaggatgacgatattgacatttgggctaaggcatatacgaggctcttcaattagacacaggctcagcctctcatttgctcagtggctcatattctccactgatccaggagggggatatttgggttcacaccacagtctgccctcagtggggttatttgtgggtctccgcaccatcctagatttatttctctgctactgggatggattgtggttgtgcttgtgggctgccatgcttgcaagcctgtgctgtttctggagttgccatttttacctactgaggggaggacatttaatttgagtaaatatgttagaaaacttgtttcacaacctggtcaacacacccattaaccatggctggaagtttcctgaaggcagggcctgtttgcctctctgaatacacacagtgtttagacacagaactgaacacaatgtctggctctcatggtaggtgcctaggggatgttaactaaattgaactgaactaggcctcaaaggatgagtaggattttagctggtagagctggagagctaggggcattccagggagaggatccacacaaaagaggagacgagtggaaagcaggaattgtgaagggtgaacagcaattagaccgtaatctggttacactggagggtacttggaggacagacagatggcagagcaccgtgaataccttaggatagtgttgtctaccttggcttcagcttaggatcacctggactcctttaaaaacatactacctcctggctcaccccagttcaactgaaattgaatcttcatggtggggcctgggggagcactctggggaagggttgagagccactgtctaggacttccagggacacttaacaggatgtagggagagccccacaccagaagacctcttgtactgtagattgctaacaatcttgagaaaatggcaaaatctgcctttaagtcttctgagctagagtttagaattttagagtaaaactagaaagaattgggtaatgatggaaagagatctgtttatgacacagagttaacagacaggactagtaacaatctgagcaggcagtgctaaagacttactaagatttcatctccctccctttcccttaattctaactaacctttgtactctgaaaatcgctgatttccaaaaagctggcaaactgacgaatctcagttttaaatgtagttcggactttaccctctatctaggtcacagctaaagctgccatatgtaccaggaatgagaactttgtaagttaatcagggcacggtttatatttccagcattcaaaataaatcattccgtttgcctgtcatattctgactttttgaaaatcatttctatctgtgagtaggtggcacgaggtattcatttcataagtaggtttggattcggcaggtcttcaagttcacagcagggatgcagtctccagtttttctcatatttgtaccagttgttaagccataggttttaaactaacaaatgattacccttgatcttaagagtactgggtatacccaagtccaaaatcagaattttaaagcaatattaaaacaaaacaaaatcccttttcatgtaatgattggctcattggtttttccttccataagtcaatatctgatgctttgattttcttaagtcatgtatatttatagagccacatacacctgttagacacacattgagttttcaagagagaaaaacacacttgcatatgtttccctgccctaactcagttcacatccagactggcttctagaagaaaggaaatttatagtgtggaaagttgcagcatttgcaggaactatgggaatctcagcacatagtcttagataaattttacaagtattggcccaagtaacccacaaggcagtgatctggatctgtttaccaagttaactgccaagtcacaaataatagctttttcccttaacttggaatgaacaacatagtactgaagtgtttccttgtgaatacctctccatatgcgtcatgacaaaatactgtatagatcagtttacattagattgtttaattaaatttaaaattctttaagctggaggaatttgccctaaaactgttctgcacggccaacaatttgatgttgaaaaaaccagcctccatgttaacatgtcggcttgaatactcttattttccacactggaaacttaccatgagcaattcttttcagaggttagcttttagttatcaaaatgggtgatgtctatatcaaagattgtaatataatttgaggtggcagtcccccttccaggaatcccattttatggtttgattgtgtttctcaatatatgatctgtagctgaactccaaatactgactactgggattaccagccaagttaatattaacattattgaaaagagtcggttaatgtgaaaaggaaaagtcaaaggtgttaaattagcagtttgttagggagcagtacttgctggtctttggagtgtgtgaatttcatcaattcttctggctgagacagggagtaacatccacagctgacacacagtctgtctgggtgagttctcccctcctgttcactctttcccccagcgtcctagtctcagaatgttgccactttttattcttgttgaacaggtgaggaaagtagtttctcctgtttgcttattgcctgggtcagttggagtttttcacaaggagcattggtaagaaaagaaaacaaacaaaagtaaacaggagaggttagagtccaagattctgttccgaatttcaatcaggactagccacagggtaaattggccagcagggcttaagaggtacttgcgccagcctgcagttctctctctttgcctctggaaaagcatggccgagacctgcttttaaagcccatcagataaacccctcttggtccttctacttaatttcaactaatggcatgagccctgagtggtattctcttaagtaactaatgggagaagaaatgtctccctggaggcttcttccatgttacaaaacaccagaggcgaagggtgggtgcacactctcaaaagctcagctagagacccccacctagttcttcctggctaatcaggaatggtaactccagcctgactgtgggcttcttcccagcatccttgttcacaggcacctccctggtcagggttttgattgccacgcaatgttcttgtttggtgtagcatttttactagaagaagaaagtttcagaaaccacattggcctctgtgtagctcccgtctttctaaacccttctagaattgtggtagtttcctgagggaccctctttgttttgttttgtaacttcattctacactcacaaggcaacttcccatccaaattaaacatttgaagtgggaaaactttgtagggccttcagaaaaacagtttttttttttcaaggtgttctgtaaatatgggattattaccgatccttgtgccaaagtcatgttaaataaaacagtttcagatatgtacttctgacccaaagccctctttcatcacaattaggtccttaatctgttctaggagtattgccataatattatcactctaattacagcccctaaaaatgtgaaatatgttatataactcagagctcgtttggacttcttacagtcatgcttatatggcaagacaaacaactttcattccagcagtgaaggggaagagtcacacatacagtaactatttcaattttttttaagtaacatttgaaatacccattgatatctttttaatatattatgttacaaatgttttaacttacaagagcagtattatagtatacccctagagataaggccattgttgcctataaggtattatggtaagtaatagaaacatccaccaagcttcttcattagcagcaaaaatgagttcttggttgtgtgtttgggcagtggggatgtggtagaggtggaaggggagatggagcagggttttaggcaactgagatgatgtatcagagaaagtaaggtgaaaagggggtttctgttacttctgatttttcccctagatttcccttatggaactccagatgcaaggaatcagaaaggagtttctcttcatccatgaatcattataatgtatcaatttgttctgaaaacatgagtgtttctgtgattgaaatagtggctgattgtttaggagtctcctatttatttttgtggcaaccatctcaaagcggatgccgaattctgaatggggaagatctttctgcataggagagtcatgagtatctggcccactggctggggtgtcctgagcatagcaataatgagtgacatcatgctctctgtccttgttaggatttcatgccaaccaccttggatgggaggccaagatacatttctaatcctggtcaccaactatgcaaattcaattcaattctgtattgtaaaagtacgcactggggactgtgttcaaaccctggtttagagaactaagaagattacaagagaagagtaacttggtgcttagtgggtacagaatgtttgttgaatgaatgaatgaatgaaaaagtctgggcttggcccttacattcttatttagtaaggaagatctagctatgtgaaataattaaagagtgccttaagtcccagtgatctgttagagaaaggagatatcaatattggcttagggtaatcagggcaggaattagtgagaagactagcaaaggccttatgctgagctcatctggtgctttgggggctttgattcaagtatgagcacttaatttttggctggggacattcatgtaataaatacgcttgtatttaactgtgatgtggtcccatttttgcactgtgctcagatttctctcttcaccatcttgctcttgagttgagagagttgctaacttagcatgctgttattaaatttaggatttatgtcttttagcattttaaatgcaaagtcctgtagaaacctggaatgctcaatagctcctaataacagtaggaatgctgtgaggtcaccacacacgaagctttaatttatgctaatttaattaaaggtagttggcaaataaataaattagggaaagtgcactgagttcctcttagctctggatgagcccagtattggagctgtggatccactctgtgcccaggggccctcagctccgctctgcctctccaagcaggagaatctgtcacagggaaggcttcactccacgtggtgtgtgattctagtgtatgttacatgtttgtatcttcttattctatatacttcgttatgtatagtatatgttctcatattttattttacagagcagtatacataaaaccatatatgctatattctacaggtgagttaaagagcattttttaagctccgggttgtgttcaattagtggatcacaaaattcatgtagtgtgtctccatgggcatttttactttaatgaaacagagtagggtagacaacctagggtataccacatatagcaaaaataggaattccattggggaacatttaatttgagttacttatgtgtatgtacacatatatagtatttacatacatacatacaccctcatgtgtgaataagttggccatgtatgtgtctacatgtttattgactgggtcatcagtactgcatgttgtggttaaaaataaaacactgatttaagggctgttaaagcaattttgaccgtcctctttgacatatacagaattttgcctgacttatttatccctcagtcctacctaagacaggctagcgccaggttcatgggttggtggagatgtttaggctagtaatattgcaggagcttctcaggctccagtcagtaggatctgcatgttgttttgtttcttctctctcctccctctggtatcaagggatatccactgtgctatggaaaatgaagcatatggctgggcatggtcactctcgcctgtaatcccagcactttgggaggctgaagcgggatgatcacttggggtcaggagttcgcaaccagcctggccaacatggtgaagccctgtcttcactaaaaatacagaaattagctgggcatggtggcacatgcctgtaatcccagctgcttgggaggctgaggcacaagaatcatttcagcctgggaggcagttgttgttgcagtgagccgagatcataccactgcactccagcccagagcagaactctgtctcaaataaaaaaaaaagaagaagaaagaaaatgaaattgaagcatgttaggctgtaggtcttaacttacagtgtggggccctggtagagggaactgagtcagcaggtgagagatcaaaacagcatctcctgggggacaaagacaatggctggaaggaggcctgagtcacagacatcctcagctgtcatgggaagatggtatctgatggtaaatgaaataactccctttcttccagagaggccagtgcccctgcttacccagtgggatggctgggattcatttctggtggcagtactggatgagaaccataagagcagacctgtttcctaacagatcagctgccatcctttgttcagagtaaatcagctgctccaagttggctgagcagccagcctcctgtctccaccagactcagcatgctctagccgttggatataggctctggggcctgccctacctctagggctagagatcatttcccccaacaatatgcagtgacacctagctccacatgacagtgtttctcaatggccctcagaaccattgcttctcaacaaaatcacctcctgaagttgaatctctgggctgaggcccaggtgattttaataaaccttgtaggggctgcttctgcatgttcaagtttgagagtctccactttggggtttcctcgatgtacacgtcacattgaaaaatggaaaaatttaagcatgtggcatttttctaattaagacacgttaagatggcttaattttgggttcttcctggtaagagtttacatagctggttgaaactttaaaagtcagtgggggaggcggagtgtcaactgtgtagctacagcagcaacatgatagcgctgcccttagggtctacacatgggcaagaccccttcaggaatcctcttgaaaataccatcttataagcaagaacttagagcactttaatagccagggttcccttggatgggattcaagacggacttcacattctctgtttatttccagtgtagtcattgagtgatcattggtaggacagccctatttccactttcatctaccagttcacaggcagctcttaaaatctcatcatgcacaggaggacactgggctttcctcaacttagtggggaaggccatgatcagcctgctctctgtcccttctcctgaagtgaattctttttaggtcaggagaggtgtatctgatattcgagaaatgattgaggcaggaatccaatggcatcttgttcctggagacccagccttcctggccatttttatccctacttagagaagttttgaggcacaggattaagagcaggctgggccaggtgagtcaaaggctttcattgaactgccctccttgtctgatacctccttgctaaactcattagaaaaagagtacaggaaatctcatctccagttggccaagggaacccgaggaacttgaatggacaagatcccgttaagggctgataaacacaactgatgcctggtgatgaaagtcttcttttatacagcaatgaagacaggtggctggaacaagagacagaaaaaacacatcgtggaagacattgttctgggaggtgattgtaccctctgccctcccagcaggctgtgagctcgcagtgctgtgtggtcagtggaaggaggcctttacttggcacatcctgtgtaacttgaggagttggagatcacggtaaaactcaaacctattagttacatgttaggtattgaatgtttgaaaagctgcatttcaaaacactgaatttgatcaggacacactctggacaatgtcatttgttgaaagcttcaaatcaaagtggttcccatttcccctccccttatttacttaactcatttattttttagtaagaatgctacataactcaaaagtgaatacttggaaaaaagattttttcaatagggaggatatcttggcttaaaataaataccatcaaagcatttccactgcttactaacctttgacttgcatacaggaagttttctgtcaagtaccagaaaatcctggaaaattgaatttggttttaaaatgcaattctcccttggctttagaaggaccagctgggtagctcattaaatgtaaaaagtactttgaaaattggaagactaactcacatattaattatcatcaatagttatcaaaccagtgtattttaatttaactcacctacttctaaacagcgtgtcaaggactccacaaatgagcctgcctgccacccctcccaccccctgccccttccatagtaaggtttagtgacttgcttatgggcacttaggggaaaaggagaactaagttctgttttctgttctttctctgactagccataggaccttagggcaggtacatgatctctttgagccttattttccttatctgtgacatggagacagtactccctcccagcttcattctcagaactgtcctgaggcttcagctacagcctattgaaaagtctcaagggtattaacaaaatggaaatgtcctatcttcatgttcttttgtattccagcccccatcaatttcccatgtccagagattctttacagccaacagggatccatatggggttcactgggctcaatgtcccaccagagcccctctgccagtgcctcctaccgagcagatgactttctaagcaaggtgctcgggtcttgtcaccgaggggtggacgtgcccagtgtcggggtctgtccagtggtccttgattcccctttgtccacgcacttggcctttctccagggggagacggatgatagctggaagtgatctactctgcttatgggttctggccagttctctctctgtttaggggtgaaccagtgtctgacaggtgaacttttccttagggtaggaaatacattggcctttaaatgcaaaaggacaccaggtcattgagctcagaaccttcaccagctctggaaatattgttcctcttgcaggactcaactcagtgtgactcttgccctcctcctttctccttcccagacagaatgcactctgcactttcctatagctctgtatggggcaccagtcatgtgttgtaatagttggcctggagtgtagagactcgccagtaatgcctccatctgacctacacaggaggaactccaaaaaacttttataagcaatttagttaggctcttctctgtagtctagagtcccagggccttccttggagtcccgtgatgtctcttaccttcatagtcagaattgaaaggcaggaaggagatacaaggtctgtctttccccttcttgactgagcttggggcaagattgtccgggcccatttttcctagacgtttccttagcgcaaccctcatcctatttgatggtttccagggacctcagggtttctgcttagaagcttcccacctgtcagtattgccgagtgggcttacagcctgatagaagcccccacctcactggattagtgctgccctggtttcttcccagtcctgacaatgcacatagcccagctctctctcatgcccacagatactttaagcttctattgacttaaagtggcctgagatagggcaacaggagatgggacaacctatcccagttggtgcaaagccctttacacgcacatcttgcaattaactgtgagcctagactggagtccagcccttgggcagccaaggtagtttctgcctgattgttcctaagcagactctggtcaagggggaagcagctgcaggtgtaatacccgctgcaggaaataccttctagtatccttgtagctgtgggaaaatattctcacttgaattcatgaaggtcaccagaggggcttccctctgctttccactctgcattctcgtaaatcccacctcttctagaaagcctgcctcagtttcccatcatgcgtttccttctgcccagttccttgtgttacacatcagtttagctctttctgatacaccattttgtgttctgcagttgatttcatgtaatttacattttcccatcttgactaagaccctgaggcaaacccgaggcaggtccttctgtccatcaaatccaacacagtactggtcctggtgagtcctctgagaggtacccccagcatggtcaccatggccagtgtagaaggctgggggtaaaagctgggcccaccgactgatggggaaacctaaagttcttgcagaattggaggcttggcactccctccactggctcccattgcccgccctgctgcctggtccccaggggtagggtggcttagctgggctcatggcctgtgatgcacattcccagatctctgaagtcatttccctgaaatcacatttaccgttcacaagaaaaaggccaaagctggacaaaggcactgctgccaagactcgagcactggtaatttcttatgagccctttgtgatggtagagtttatgaaatgtaagtaaacaggcttccttctaatccctgagccgtgagaagctgtcagggtttatttgccgagccgtccctgcatgcctgtgcatggcacacctaggctccagtgttccgctcgttaaaaggtgtctaatttctgtaatcaccttggagtttaatgggtttaagccatgtgggttgcagtggagagaaaacattatttctagtcttttggcttcctttcctgccttccacacctcttctctctccttgtccctcccttgtgagctgaatggattataaaatattagctgtgaccttgtggggtgggaaggaagaaaggtttctgtttcccgctctgtcctgccttcccagccagcactggccccttaatgaggttctaaaggtaaaggtatctgggacaatttcaggacactgccacctgtggcctgcaaagagcatgacttgatggacctttgatttcttttttcccccccagccacgtcctgggaataatttaggagcaagccaacacatttggaggcatcttctctcatttccttcattcttgtcaaagtctcactcttttctagaaaagaaatcatggtctttctcagtgcccacaatgggcagaaacatctctgaagccatcacctgaggagtcttaaaaggcccagttctttgtggtcctcccttcctttcacttcacctcactgtcatcacttcctttatctctcccactccctcacccccaaatgagagagggaaaggaagaagaaagacaatatgtgcatcgtgtcaggtgagaggaattagcttcctccatggattctgctttcatagtcaagccacaaataactactgagatgacttcagttcctcccgcaagagtaagctgataacaaatcctctttcccactgcaagtctcaaaactccttcaactttcagctcatgttatttaatgttgaaatctgaccttcccagagcaccacaagtggtagcctgggtagtgggcccctgggctggtggtttctggtggcaagaagctgtccacatgcctcagtgcaccatacacatgctgtcaccttctctctgatctgtgactgtgaaggtggggagctgtgggtagggcaaatgtgattttctcacttaaacagatgaggaaactgaggttcaaagaagttatatggcacatggcacagctgatctccctggtgcaagagagtgcccttgccattcttctcccaagctgctgattttaaggtggctctgctctcctttggggaacctggaagacatttcctgaatctagcacccgctttgaaggcatgctgcatctcagttgttcatgggccatttcctattttctttggggcttttccacttacaggtattgttttctctactttattccccctgctgtttttaccttagtgaaataaagtgagaaacaaatcctcaatgatgctatattagtctgttctcacaccgctataaagaagtacctgagactgggtaatttataaagaaaagaggtttaattgtctcaaagttccacgcggctggggacgcttcaggaaagttacaatcatggcggaaggcacctcttcagagggcagcagagagagaagaagtgcacgagagcagggaaaactgccttatgaagccatcagatctcgtgagaagtcactatcacaagaacagcatggggaaaaccgcccccatgatccagtcccctcccacctggttcctccatcaacacctggggattacaattcaagatgagatctgggtagggacacaaagcctaaccatatcaggtgcttttcagtgcatgggaagggaggagaaaagccatataatctaagattgtgtcactgtcaacacagtcccttcttccttccagtagttgagtctacctaagatttgaaccactttcaaaaggtagtgtgtgcagagaacaccatctgatatgtagaaaatactagtcaatacacatgcaaaagaagctactagaactaataaaagagtagagcaaggccacaggagacaagatcaatatacaaaatcaattacagttctttatactagcaatgaagaatccaaaggcaaaattaagaaaacagttccattcgcaaagacatcaaaaagacttaattgctcaggaataaatttgacaaaagaagctgaagacttttatactaaaaagtacaaaacattcctgagggaaattaaggaagatcaacataaatggaaaaaacattccatgtttgtggagaagacacagtattattaaaatggcagttctccccaaattgatctctacattcaatgcagtccctagtaaaatcccagcagagttcttggcaaaaattgacaagccgatcttaaaattcatatgaaattgaataagatatgcaaagggctcagaagagccaatgcaaccttgaaaaagaacacagttggaggacttaaattcctggttctaaaacatactgtaaagctacataatcacagtagtgtggtactggaataagcacaggacatataggtcaacagaacagagttgagagttcagaaatgaacacttaacctttatcatcaattgatttccaagaagagtaccaagaccattcaatgggaaaaggatggttttccataaatggtactgagacatttagtctttgctctcacaccatacacaaaagtgaactcaaagtggattataaacctaaacgtaagagccggtcacccaactgcctgtgaacttacggatgagaaagctgaaggccaagggaaccagcagcagaaagatgggcaggaagataagattattgtattgtcaaagacttcagtaatttcaaagaaataactgaatgtgagagagaaaaccacataaacatggggagaagccccactctggggagaaagctgtttggattccactagacatttgcagcctaggaaattaggacctggaaatttaaacctagaaaaatcccaggaaagtgaccttattatgttataagggagcttactttttaataaaaaaaagttactcccccccgattatttattgtggtaaaatataggtaaaatttaccatcttaaccagttttaagcctacagttctgcggcattaaatacattcataaagttatgcatccgtcaccactatccatctccataacgcgtttcatcttgtaaaacgaaaactttatgcccattaagcagtaaactcctcattacctacctccttcagcccctgacaaccaccatgccactgttgatctctatgaatttgaccattctaggtacctcatgtgagcggagtcatacagtatctatctttttgtgtctggcctatttcacttagcaccgtgtcctcgaggttcacccatgttgtggcatgtgtcataatttcctttcatcttaaggctgaataatactccattgtatatacatacgacattttgcttctccatttatcctgtgggtggacacgtgggtggacacgtgggttgcttctgcatttttgcaattgcgagtaatgctgctgtgaacatgggcttacaaatatctcttcaagaccctgttttcaattctttttgctatattcccagaagcagaattgctgactcatatagtagttctccttttaatttttttaggagccgccatactgttttccaccgcagctgtaccatttgacattcctaccaacaaaaacagctacttcttatttcagagtagccctgtgcataggtccttactgctctctcacaatctcttagtgagataagagaattagttactattgtcctcatgtaggctaacacttattttgtgctttttatatagcaggctgtgtccctggcactttagaaatgattaactgattgaattctcacaatagccctaggaggctgttactgttattacttctgtattacagataagaaaatggaggcaaaaagttattttgtcacttgcagctagtgagatgggcagtgtggctatgggagtgacctccccatgctgtgcaccacctcttcccacttgcatttgataactgaggaaactaacacgcaggacattaagtgattccttcaaggttatgcaggaagttaagcatcagagccagggtctcttgacacctctactattttttttctactatgtcagaataccccctcagcctctgctcactaggagtgcatctccacatatctaaagtgtttggtagagaagaattacaggagaacaaaaaatcttccattcttaggacaactcatgtccaaatttagaataactgcaaccccaaccatacacacagaatctcagggcttgaaggtgtctctcagaaatcctctagttctgatagggacaggaggcagggaaattcggggcagaagagggcaggtccccagcaagggccctaccctcaagcctaataccgtggcccaaagtgagaacaaacatccctgttttaccactccaatgttgccttttccaaaaccacccatggcccgccccaccccccatcctgtgcctataaaaaccccagaactcagacagcagagagaagaagcagctgtgcatcagagactatgggcggacattggagagaagcagcttgactttagagggacagcttgacagcgtagcttcagaaaggagtctggccatcccggggaagatcacttcccactccatccccttttcagctccccttcccactcagagtcacttttaccctcaataaaatcccccacatttaccatctctaattcgttcgtgatcacattcctcctggacgccggacaatacaagtgccaggtatgcaggcgcaaaaggccgtcacactgaccctccactgagctgttcatacttaaatcaccatggatggcaaaactaaaaggacactattatactgcttctggggcttcagggatcacagccaccaccttagatgctgccacggggccctcacagagatttgctcctgctggcgaccaaaagtgctcgccctggctcctgcacctgctcacctgtgctccccatcccacaagggtggaactcagcgggaccaggtgagtggagtctgcccctgccagcaccgaagcggctggctagttctagcgcccgtgaactctagttccctcccatgaaggggtcagtgaaataccctggttcaattcaatctctcagtcagactgaaattcatcaaagctagttatctggcttgtgtattttctgcaataggataccctttgtctataactttgattcttttatacccctaccagatagaaaattcttctttttgagccaccattggcattggccttgctgtgacttccattctcagtcctggatctgccctttggaaaaatgctaagtctaattttttttttttgaggagggtcttgctctgttgccctgttggctggaatgcagtggcaagatcaccgctcactgtagcctcaaccacctgggctcaagtgatgctcccacctcagcctccctagtagctgggaccacaggtgcacaccaccacgcctagctaatttgtatagttttgttagagatggggttttgccatgttgcccaagctggtcttgaactcctgggctcaaatgatctgcccgccttggcctcccaaagtgctgggattacaggtgtgagtcatagcgcccggccagtaagtctaatttttgcatgccaacccattgtggataaaaaatacaggacttcaggggtccatttttctgggtttgaatcctggctctaccaccaacaggctctataaccttaggccataattttctcatctgtaaaatggaagcaagctgtttcgaggactgaatcaagtatacccagtgagtaggagctccatcagctgttcactgttgccatttgtggaaacaataattgcatttgatcttgatcttacttcttcacggttaatgttcttgaaccttttttttttttttccatttcatcctttggctttcaggcccatcagtttcagatctctctcctccaggtgtgctttgtcttcaaatgtctgtcccaaaagacagaagccagaaccaacctcagtacctctggcccgtttgcccctgctgtgagctaagcatacagtaacttatatgggattaagttttcctaacaggggctttccaataagctgttcctgtcctatatgttatttgcagtgattgtatggtactttccccaaatcctttcatcttttctttcttaaaaggtattgcgttgattaagataaaaattgtcagcaattagcgaattaagatgtttccagaatttagatcttttcctcttgaatgtcttttcattacaagctttactctgcctcatgagtaattatttatctatctaaaaatatgtgttggatactagtcaagcctagagttagattttgccatcatcatgtcatccttccagcaggtggtagcagggctgaaattctcttctcttattcttaaagagagccttcaaacttttctttttttaagtagtgaatcatggttctaatattaatgagaaaattcaagtatataaaacagatgaaagcacttctgctctgactgataggggaaacttggacctgtttggatcactattgctacaaaagaaatcaccccaaaactcagaggctcagctggttggttctggctcagggcctcttgtgtggctacagagggtttgaacagtggggatggagggggtggaaacaactgagggctggctgggcatctctctctctctatggagtctcagagcttctctatgtggtctctgtgtatggcctgactcgggcttcctcatagcatggtggcctcagggcagtcaagctgctcacgtggtggctgaagtgttcaggagagaatattccagtgaatgatgtggaagatccactgtcttcatgacgtactctcagaagtcacatagcattgcttctgcaaaaataatcccacctggtgtcaaggggcgtgtggaatgggaaacattcctgtaacgatcttgagaaaatttgttcttcttcccacctattcccccaaatttagggctctttaatacatagttgaaagttattggtataaagtattggaaacagagggaaccaggataagaaaaaatattctcttcaacttttttttttttttgagtcggagttttgctgtgtcacccaggctggagtgcagtggcacaatctcagttcactgcaacctccacctcccaggttcaagctatcatcctgcttcagcctcccgagtagctgggattacaggcgccaccaccatgcccggctgatttttgtatttttagtagacacggggtttcgccacgttggccaggctggtctcgaactcctgacctcaggtaatccacccggctcagccttcaaattttttttaatgtactgaatgtctatatgaccttgtatttttgtttgtttattttaatttgtattttttctcaagcattcaggcgtcagtttgttccttcacaaaaatggagatcaggacatagccacctgtctccctcaccaagctgttgtgaggatcagataagcaacaacttgtgaaaagatctgagtataaataccactgttagggccatccacagtgattctttctacactaactgaagtgaaggaaaggcaaaagccacttgccggccacaaagagaatgcgaaccttggtcagacctcaggagttacctcctaattcagtttcctttcctctgccctcactttccaatttgcaacagtgaagtaatgggcaaattcatagtttcctctgcactttgtagttagagctggaaggaacctcagggaccatctagttctgttcccattcggtaaagtggcctgcataggtgcacacagacgttagacaaggctgcacggaggactgagttttgctgcttctgcagacttgaggcttccctcttggcaggacacaaacatccagggcttggtggcccatggcaggtcaggacaagaggaggctaactggccacaccacccatccagcctctggaaagctgggacaggactggctgggatccagatgctcattgtgtggggatgaaacgtcatgttcccaaaggaactggctcattgtttaaactgccaaatatttatttaatcaaccaaacttcaactaaagaagaaaaagggtctgaattttaaatcccataaacctggcttggagaaacaggcagtggagaaggggagatgagagtcgtttcaaatcagaaagttgtggtaaagatgtgaacgccagactcattctgcatatcacctggtggcggagtgtcggactactcaccatcaagacaggcctcgacacttccagtcttccagatgtcccaaatgctgtggtttcactcacattgaattgattgattgattgactgattgagacagggtcttgctctgtcacccaggctggagcacagtggcatgaacacggctcactgcagcctcaacctcctaggttcaagtgattctcccggcttagcttcctaaggaactgggaccacaggcgggtgccaccacacactcagctaatttttaaaatttttgttgctatgggatcttgccgtgtggcccaggctggtctcaaactcctgggctcaagtgatcctcttgccttcaccttgtgaagtgcttggattacaggcatgagctactatgccccactaaaagtgtcattttaagtaatagaataaaagatcattcaggctggttgcagtggctcatgcctgtaacgtggcaagaccgtgtctccacaaaaaaatttaaaaattagctgagctttgtggtgcttgtttgtggtcccagctacttgggaggctgagccatgaggatcactagccatgagcccaggaggttaaggctacagtgagccatgagcccaggaggttaaggctacagtgagccatgatcgcgccgttgcactccagcctggatgacagagtgagacctcaacccttgaccctccaaaaatcacttttagatcaaataaaatagtattaatgcctatttatttgcactttgttttcctttagccaaacaaattatcttctgcaatcactacatacagtggcctcagcccataagtcattacattaaccagggatgattcttgtcactcctttaagtaaccagcagcagtgactggtcaatctttatggcacaagtacttcagtagtctctttccagaatcttattcagaaaaactcaggccattaggatttatctcacatttgcagagattagttatttttctaatattctaagcagatttgagaggcggtttattattttagttattgcctaccatgcttgcacttctcaacattctcaaaacccagaagccagatgcctagagtgtcagctgcttggcaggctgagggggatcacctgagcccaggagctcaaggctgtaatgagctatgagtgaacctgtgaatagccgctacactccagcctgagcaatatagtgagacccctgtctctttaaaacaacaacaacaacaacagtgcctggtttgggccatttgcttactacttgtaatttgcttatttcagcatttgaattatttttgaaataaacttaacttcaaaggatattgcacattctagagattatccaggagcacttcttactactaatttgacattttcttattgctttgtgctcaaggtcatgtgtttgcattattgccacatatatgggaaaaattaaaaccaaataaaattaaaagaactttaaaggactaaagaaaaaatagtaaataaattcaatgtgaattattctgtattttattaacctcagtgtatatctttggctttgaattgcttactagttgggagaagagtctttttgccatatcttttctctagggaacataactatttcagtttagggatgcattttcagccccccaaagctgaagttaagcaaatgtatgattgaggtagcaagttcatgtctaatctccatacgtcaggtcagacagcccttcctcctgggcactgcccgggcagcccaagaacctgcacaagagagaagaccctgcccatggttttacaataccttcgtgatgacaccggaggcaggcaaagcagtgagggttaagtgagttgtctgggagctctcctgctcctgggcaccacacacactcatcaacacggagctgtcatccagaaggagaggggaaagaccagagaaggaaaacagtacccaatcttgttagctcccaaagcagtccttccctccaggaccactgagttccagtgggaaaagggtcccggaagagttctgtgtgattataagacacccctcctccccttcccgttgctgtatgcacctgtgcgtccatcccactcacccaaagaaattgtctagttctgtcaatcttatagtcagatttttttctctctccttttttttttttttgtttttttgttttttgtttttgagacagagtctcactgtgtcacccaggctgtagtgcagtggcacgatatcagctcattgcaacctctgcctcctaggttcaagtgattctcctgcctcagcctcctgagtagctgggaccgcaggcgcacgccaccacacctggctcatttttgtaattttagtagagacagggttttgtcatgttggctaggctggtcttgaactcccgacctcaagtgattcgcccacctccacctcccaaagtgctgggattacaggagtgagcaactgcgtccggccagattttttgtctttaatgattttcttttcttcttttttttccttttttttttttttttttttttgagacagggtcttactcctattacccaggctggaatgcagtggcatgatcagggctcgctgcagcctcaaatgcccaggctcaggtgattcacccacctcagccccctgagtagctgggactacaggtgtgccccaccatgcccagctaatttttgtattctttatagagatggggttttaccatgttgctcaggctggtctcaaaactcctgggctcgagcaatctgcctgcctcagcctcccaaagggttggggttacaggcgtgagccatggtgcctggcctttaacaattttttattcttttttttcccccctataatttagttatcgttgttttctctgggtgagagaagaaccatttctctcaagtccgttgttactgtgctggggccaatgacctagagcagtcatttctggctattttagtaatagaatccttccttaatatgaatcctgcagagaagctcaatatataaacttatgaaagaggaatcctccctttactgaagtgagctgggggccaacccccaagccacctccttggtatctgtaaggattcccggagtagcattttaaatcccctagttcctgggagaaatcaggactggaaatcaaagtaccctggagatgagcacggtgtttgctttcctgaagacccattcagcatctcgctgtcactcatgcatacgttaagtatttcttttcttttcttttcttttcttttctttttcttttttttttttttttttgcaacagtctcgttctgtcgcccaggaggagtgcagtggcacaatctcggctcactacaacctccgcctcccgggttcgggttcaagagatcctagtgtgtcagcctcccaagtagctgggattacaggcaagtgccaccacgcccggctaattttgtacttttagtagagacagggtttcgccatgttggtcaggctggtctcaaactcctaaccttaggtgatccacctgcttcagcctcccaaagtgctgggattacaggcgtgagccaccacacccagcctcatgcatacattaagtatttcttgccctcctgctggatataaagccctgtgtcagatgctgggggcatgggaatgaatacgatagacatgtcccctactcttttgttgaggatagggttttagcctttcagaaacaaaatctggcccggtgcatgaggtcgtttgtgtgttctggtgacaggtcatccctgtgggtgctccctgggcagatatgtcctactcaaattagtcagactctctttcaaagtgtgccccttaggaagccatgagaagcccagtgtgccaagaacactcttttgtgattctaaaaccatccccggggattaggactagacacaaactatgaagactaataggtaaataggagagttcgacagagtgatacctaaggggctctttgcaatgcagtaacaatctgctttctgtgtttatgcattgaccaaccctcccccacttcacccccaatattcttttaagtaggagttgaagggtataaaagctcagcctttttttttttttttttttttttttgagatggtctcgctcagtggcccaggctggagtgcagtggcaccatctcagctcactgcaacctccgcctccggggttcaagcgattctcctgcctcagcctcctgagtagttacagtggagacgttgtttcgctatgttggccaggctggtctcaaactcctgggctcaagtgatcctcccacctcagcttcccaaaatgctgggattacaggcatgggccactgcgcccggcctcagcttattaatgtaggttttcctacacttaaatcaattacatacaaatcttccagttttctcattttaagtgcattcttagaaatcacgaaagaaagcagagtgggcaagctgatcattttattctccatctgcagtcaacttgctaagtagcttgcagttaacagcttttgccacgagagggcgatgattgttggaaaggcagagctgagtgggccaaggttggaccctggggatgttgatgaaatagcaactggttattatgttccgttgatccagggccagaaagaggagacaaaggacctaaaatgctttaggcttagatagctaggtgatattctaggaggagaaaatttggaactgcttcagtttccagcattgtgttatacttttatgtgtaagagcctgaagttgaacagaaaaaaaaaaaaaaagtcggggcggagctgtcttttcttttaaaaatagacgcatggaagcatgtgtttgtttgttcctacttggtgtttttgttttatttataaaatgaaaacagctgaaataatttctggattgttctgaacttttgagcacagactcccagatggtttctgtggtctgggccctcaaaaacccacctgatgggggatggcgcccatctttggaaaaagctatttgaggctctgtgaagcagctcgagtttgtttgttttcccttgtatttgaaaatggaagtcaagcatgctcccagggcagagaattccgcaactgtgaccatcttgcaaggggcaggaaaagatttacagtgttttgctagaccaatcgccacttccttctggggtaaaaatccttaccagcaactccttaccagcgactcctcttctggctaaattggagtagcattttcctatcaaagtcatttaagatacagattattcaataacctgagagaagggtggagtattcatttctaatgacttcacagaattccagtcctctctgagcccgaagagttgttgactatcatcaggtgttaggcctcacatctttcatttgctaacagtattttactgtctatgaaaatggttaactggtcgggcacagtggctcacacctgtaatcccagcactttgggaggccgaggtgggcggatcacttgaggtcaggagttcaagaccagcctggccaacatggtgaaaccctgtatctactaaaaatacaaaaattagccaggcatggtgacacgtgcctgtaatcccagctactcaggaggctgaggcaggagaatcgcttgaacctgggaggtggaggttgaagtgagccaagatcataccactgcattccacctgggtgacagagtgagactctgtctcaaaaaaaaaaaaaaaaaaaaaagaaaaagaaaattgttaactgcccttaaaaatatagtcgttctccttcgacactcaaaagttctctatttgcaaatgaagttcatatgaatttgttaatgattcacttctcagtaattggcaatcccaaattaatcagatttccttgcactaatggtttctttaataaatgatattagatggtaatagaaaggacagtcttggcaataactgcttaaatcatagcatgagggatttagattttcatcagcagcttgcaccagaagcagagtctgactgaatattatctcctttgtagattagatagaagaagaattagggagatacaaagaagcattttctaagcatagttagactctgattttggtgacagtacgaactagggaagttggaaaatgcctcattggcctaaaactggtaacatataataaactaggactggaggcaaaattacagaagtttttttggtaattctcttgggctctttctgggggattcttagtcttatagaattttgctacttgatgctcatccatggcctgtggaatgtatcgtcctttcatgtgggtgtggggagaaaaggactggggcagtgggaaaggggaggccccattgttgccaacaccaagcccaagctttctgtagatgtggctccccattttcaactagaagaagagaaatttttcatgttctagcttgagaagccatgctcttaagttatttgaccctgtacatcctcgacccttcaaaatatttaaattattccacacttcagcgctggcatcacagattatacgataataatttaccaagcttcttttctgcaaacaggtaaaggaggaggagacatgggtggtaatgtaatttctggatagtttaaacctaaaagcctgctattaagagaaaaggggaaaatgactgttcaagacctgtatcttgaaagaatgctgtttatctagtattcaggggccagggagtgtgtctgtgggtaaactaagcaattcctccaagaattctgacgggaaacagttttggggtttgtcatagtttctaatattctcttaaaataatctgtttcccaacaagtaaaagcagacgtcatttcacgtaaagaatttctctgactccaccagtagcccttccatcttctcatttgtccggttaagcttgagtcagaaaaagaacacaacaattttggtaaaaaatttgttgttcttctcatctgaatagccaaaagttattggtgtgtaaggaccacagttcagataagagctactgtaactaaatttagagaaattacttttcagatcgactttcctgttctaaaattacatacttctggttggtctttgctttatcttcctaatcaagatctgaggtcactggaggtcagaaacatatggcaaaaaggaatttaaatattttccaattaaaaaattatcctaaaatatctttattatatttccaagccataaatgatcacaggtgctttgagccatggtactgatcccaggaaagtgtttgcaaacgtttaaaaaatagaatggatcagttgattcatgctttagctgatggcacggtctcttgggaagctaacccactcttgcctcttgcccatggggccaggggaacactgctgtttaatttgtcttaaatacctcttctgagactgtattggtccccgaccacccatttgcaaagatccagcatccgtcaagactatttaacagacgttccaaaaagctggatgctgacagtccaactgtcattttaaccttggcatctcccatgacagagtgtggagcagcaggctgtgacctagaggaaagacacagaagtggtgaggggttgcaggggctgtagcgtggtgagatggccctgtacaatatcaggtgaaggggaagcatttataaacttcctttgttttgatgtatctgtttttccccctatttctgcctatacacctacttgagcactggcttggctaaagttacccccaagaaaatgttgaagtaatgagtcacctacctcacttcatttttttgagacctcactttctttccttcctttctttccctccgaatttatgaatgaaaatagataggtagaggttgaattggctaaggctgtctgttgctttttgattttcccatctccaggggaagagggcagggaacgatccactccaattaggaatcctagacttatattcatttaacaactttatattatccagaacattttgtacaaatacattgtagaaataagttatttctagtgcttggggcatagtctgtgaactgatttgtctgtatatctcgtaaattttccatttagatgatcagagcaggacagaagtttctcgctgtgctcttaggctacaggcaactgttgtcactggctgacccttggttataagtacgtgggaactatgtcctgggcttcacagacaggaggagaagagttagttctgtggtgagctgtgtctttggggtggtgggaagtcaaccccaaagaatgattcttatcattgcttcttttttaactaagttggcagagttttatcttctccatagatacgtggtaaaggaaactcatttgaaccatttgaactggtggttaatctgagtaatatggaatatgttcaaagtgatgacattgtattacttctgtgcatggacaggaactagaacggctaataaaattgttgtcaggtagaagttctgaagagcctgacatgataaaaagataaggatcattttaaccagcacatttgctaaataggtagttgttactgctgtgccaaaaatttctttctattcttaaattatttaaaacattatctacctttgcattggctattaattggccaagcaatgcattcctttctacagataaatgttcagcctggtcctatacaagatatcaccatatcctatttgaacaagtgccaaatgaatgacgtgcattatatatactgagtcttcatccatcaaaataattttatttaaacagtttggattaataggaaaagaatggtacttaaagtagtggttcagagtcacaataaacagcctgaggtgacatctgagaggcagttttggcgctacctggaaggcagaggtgacaggagtacctgttagccgaaggcagtgagttttatgctgtggcctggcctttgctccctgcagtctttctcgtctcttccacatgtttggtgcgtattcaggtttgggcccagcctacgtggtgcaaaatgaaacaccatgtgtaatttcaagggtggacacatcttagagttctgagcaaaagaagaatgagcactttatgtgttgcaggaacgctgcttgcatctagtagatgctcacaatgtatctgctgaacattgaatggcattcatgaaattaacgcataaaacttcccgttagtttaaagcagagcctgggggtctacagtggagggcttgcccatccttatcaagctagacaacttggtaataactacttagctaactctcctaacgctacagaccaagaatataacgcaaggtaggggtacagtaaaagtcatgtgaatctggaatgccggtattccaggcatttgttgtgggtttcctggcattagattgttcatgggtcagtattgcaagagaatgcacattttttacatcatactctcgttgaaggcagggtttccttactggcttactgattatatcactcgcgaagggattagtcagaaggcaatggaaacatctttcgttttcattgttcagagagagactgggggtttgtctgcacttttacattatcagtgggtagaatctccctttgagattcttaacagagggtcatgaattagtataaaccttagctggtctgtatccaggatgaaaaaaataatctattttggtgagccacttgagtcataggctatctaacttacgagcatgcctactctgttaggtccagtaaaggattcagaaagagacttcaggagctgccctgggaaacaagacaataaaacagtgttgaattaggttttctagagtaatggtgctcacccaccttggtagttcagacaatcatagcagagcagaaccaaaatgatattaaatatattaattgatatatctaattaatcagtcattatttattggtgtaccattaggtgcaaggtataattcctactcatgaggactgagaaagaccagttgaagaagggtagaaaaataataccaactttaaaaaactctctctgatgtaacaatataaggcaatggtagaaggttgtcacatacagaataagatcaatcatcagatgtgtagtttaaggattgccgtgaattcagaagcagaagaattctccaagggctgtcttcatttgcaaaggcatcaccaatgagcaggaggataggaaatgcctggcatgtagacgggagagacttggagcagttgcccaaatgcctcagaagtaaccaagagcaagaagtggttgtgatattaaaagagatcagctcaagtagggacttgtgagataccagattgaaatttagattaccaccagacgacaggagctgtggtccttgtgactccaagggtgatccctagactagcagcattgcattacctgggagcctcttagaaatgcaggatttccggtcccaacttagacctgcagaatcagaatatttgggtgtggagtccaggaattatgctataaaaactgtccagttgattcttctgcatgctcaagtgtggaaagcactgctgcttagaactggggcttggttccaaatgacaatggagatgctttgaagaatcattgaagatgctttgaagaggagaagtggcatgtcttctagtgagcagacagaccagggcatttcagagactttcttttacgtggtagcctctgctgtattctcacttacctgttgctcaccacctggaaagtgaaatatctccaaattgccagtcactaactattgaagttgaaattacatgactgttctctgaagtggtttctgaaggctgtcagtaggccttttctggattctgatatggtatgcgtctaaaatatgtttctgtaagtaaggattttttaaagtatatactttgcaaaaaaaaatactccaatcaacaataagaacaactatagggtacttagagtttagaacataaaagtcattcatatgttttctaaccatttaaaaaatcagtttcctgtattttgattccattcatttatctagcacttatcaggaaattcaggtttccatgttacacagtttatatgggcccttataaatcagtataccactttgatggaaaaaatttccaaactaaatcattgcataatcattcatagcaatagcatcactgttataataaaattagcacaaattttaaagtcttggtaaaaagatttttgaatcttattttagtttttcttggcaactttggtgtaacagttggctataagaagggctataagatgttaggattgctattcctgctttaaatagttccagattggcaattttggggcaattctagcggtcacctattcccttatttcctaagctgggaagaatggaattttcttaaggttgaaatcctaacctgaattttactgatagaaccacaaagtggtacctagccgacagattcacacatggtgttcacttctgctgttgagtagcacgtgggtcctggtgctagtgtttcttttcctgctcagaggacctcttctctcttactgatttacagtgacgtccagatggtggagtttgctacaaagcagcccactgtatgaaagacatgacattgtattcacctggactctaggttgactctaaagaaggcaagggtcctttggtcacagggagaactgttgtgttccttcacgaggtagcagagactttgtgttctagagacttgagaccacctctataaatataaccagagcacaggcttcctgtgtggaccctcaatacacatttttgaatgttagcctcaagcaccttcatttttgatgtataaaaaaatggcattttatggctgggcgcggtggcgcatgcctgtaatcccagcacttgtggaggccaaggagggtggatcacgaggtcaggagatcaagaccatcctggccaacatggtgaaatcctgtctctactaaaaatacaaaaaattagccaggtgtggtgacatgcacctgtagtcccagcttttcaggaggctgaggcaggagaatcgcttgaaccctggaggtggaggttgcagtgagctgagatcatgccactgcactccagccttagcgacagagcaagactccgtctcaaaaaaaaaacaaaaacaaaaacaaaggtggcattttattgacagctctattgaatgatggtgagggtgactcctggagtaacagaaagagcccctggctttgggacagacacggggtcaaattctggctgtgctacttactagttccatggccttgggcaagtcaactcctctgagcctctgtatctttgtgtcaaatgtggatgttaacatttgctttcataattcttgcatcaatggaaaagtagcttatatttgacatataggaggtgctcaataaatgatagccatgattactctttacttgttaattatgtcctctcatttgccttagattatcattttctaagcaaacaaaaaggccaagatggagatggtttgctccaaacagctaggtctcatcactgttctcttaagtaaaccaaatgcgtagagatgcccatgtcctcatggctttcctgcacccagaaaacccacaccctactcattttgacaccttccccctaaatctccactcttctatggaaacttccaaataataaaataccatcgaataatgttaacgtatttcattggagtttctcatctctccaaagagattgtagcctttttgaagtcctctataaatatgtactagtcagctgatttgaaatttgtttatcatggagccataggctgctactgaatgaagactagtgaatgaaaaatcagaactaatattttcctgagcaatttttaaggggtaggcagctacaataaagacaccttattttagttttccatgaagtagctactattgaatctcgattttacaaatagggaaaccagcatttccttttgtccaagttcatgcagcttgttcacgcagctgagctaggattttaacccaggcagtcaggattccaaggccaagtttggacccctataccacaccaatgagaatgaaggatgaggaaagctataggaaactttaaaaacgtccatggaaggagtgcccaaacagggactgactacagtcaaatcatgaactgtttcagttaggttcccaggcatttgtgacattacccactctgtttagataacgaatttatgtgtttagagagaccagcctcctatctgcattgtcagccatcagtctaaatcaaagcttccacccagtcctgaatctctcccttacttggtctaaccacctttccaagtatttaggaacaaaagatttgtgaacagattaaacacaggctgcttttgttccactcctacagctacctatgcctgcttaatgcggactacagggtgtagactggagtctgcgctcgtgtattttaaacacacgcgggaattcagcaccttcctccgacagcacaacaatggttcaacaattcttcacagaagaccccgcgctattatagcaaatatttataagtttatctcaccacactgctcagtgttcagagtaaatctgaatggaaatatggagatcaaagaatttaataatttaaaaaaccctttcacgctttatctgtcatcaaatgaaagtattagtgaagtggtatggaaatcctcttcagcgtgccttcagccaccagctgtgccacttaagatttaaaacaatgtgatcaagtgttcagaatccatgggattgagttgtatgtttacgttagtgtattatttccaagtttccagtttcccccggattagcacattttaatttcggctttattaaagcagtcagaacatgaaaggggatttagcagagtggagatgtcaaccacgctttcttgccatcatgaaatggtttacttggttctgggcagccatgcatatgaatccaacaacatgtctataagactaaaagtcagccaagtgggacaagaaatgcaattatggagtgaaaccacagctatctaaacacggtcgggaccttcaggtcctcaatttgatttcatatgaccctacagttatgaaaacccaacacagcatagtatcaactaaacagtaaatgctttaaatgctaggcattcctggagtggctcacataagcccagtatggtgttaggcattgtagagacatggtcagatacaggagacatggccctgggaactccatgagatacctcttgtaggaagccatggttttgatgggggtgcactttgtccatcagtgtgctgggatagaagactaaaagccactggtccaagaaatgactctttagttagatttaccaacacatgaaattatcagagaaaaatgcagtagaatcaccaaatgttcatgttagaaggcaccccagcagctgcctaatctgctggttcccaaaccccactcatcagtaggaagtacctggggaattcaaaaataaatgcacattcccagggcccaccccagaatcagaagctctgatagaggggcctggaaatctggatgctttaaaatgctaccaaggggttctaaacgtccaccagctcatctggtccagcctctcagtgaacaaagagtatttctgttcacagccttgcaaaagtgaacatccagccgaggccagcatcccccaggttggaaggaactcattgtagaacaaggcagcacgggtccgatgttgcacagaggattggagttactagaggtttttcttctagtgtaatcaaaggaaccttgctgtaacttctacccactgggcttagtttgaccctttgcagtgacacagaccaaatctccttccaatgtggaaatccttcaaatattttaagagtttctcttcagtttgtcctttgtctgatacttatttgcccattcattcagttcagactgccagtctcctctaacactggatttactggggctggctgttgcacttccctcagctgcttctcggaggtcctggcttctcctcgccctcctgtttgccctcagtcagcgttcagtgtagtgcacagtgtctgacaccacactgaccgtgtggtctgaccagcagaacccaacaggagcagcaggagcggttgcttcctgcattccaggctctgtcctgcttcaactgaagactgttctgagactaatcagggacccaaactgatgcagacagaaatctccgtggcagatcaggaagggaaaatgtcagtgtggttgaatttaccaggcatgagtcacgtcctggtaaatgaatacatctggggatggaagagagacaccgtccttccagtattccaagtggagaaatactgtttcactggatacctgagtaactgctgcacagaccacgctatgcacgtatcatcaggtctgcaagctgaacagatgctctcacgtgtcatctcttagaggtaggatcagtcctggctgctatactcaagcaggaaaggtaagagggggcagctttttttccctctctttgtgtagtgtgagcaacctaaatatttccatctaagcaggttatggttccttcccacaattgaagggaaatattgatgtgcctgtttattggggggtcagcttcctggcctgatttgcttatctttaaaacagtcacaagaactttgcatattcttaggaaagaaaagggtaagaaaagaatcattgtgtcttgacagctggttgtaaagtgaaggagtcagtaaacaggttggtggttttatatacatgagattgaaaaaagttgccttgattgtttttccctgaatcggctggtcattttaatatcgatgtgggcatgttctaatcccctggttagtcagcgagatttctttctaagtagaattaagcaagcaaacaaacaaacaaacaacaacaaccaaaaaaaaaaaaaaaaaaagaaaaacacggatagaaaaaacagcagcaacaacaacaatagcagcaggaggagccacaatgaaatggttcaaggattgacctaccccaggactgcaggttttatttactgcagtattcagtacttgagcctcctggaaatcagaactccagcatgacctctgtaggttttgctttttctgttggtacaggaactgataaggtgactcttgagtttctggaatcagagtggcagccacgagggctgcgtaggttctgtgtgaggcccagctccagcatcagtggttggagaccagggagacgctttgagttcttctttactgagctgcacgtgcactgagcctggacagatggggatctacaaggggtgttttgagcaccagctgttagccacctatgtcctgcctgggacacaggaaggtgtaaatgtgggaaacaggcagagtctcatgcagtccctacaccagatcgtggggaatcgcctgagctcacaagaagagcattggtagagggcaaggcattatgtgggctttggctgggttggggaaattggattagaacaagaatactttcatttctatgctcaaaaatctttttctttttcttgttttgagacggagtctcgccctgtcgcccaggctggagtgcagtggcgtgatctcggctcactgcaagctccgcctcctggtttcacgccgttctcctgcctgagcctcccgagtagctgggactgtaggcacgcaccaccacgcccggctaactttttgtattttttagtacagacagggtttcaccgtattagccaggatggtcttaatctcctcgtgatccgcccacctcggcctcccaaagtgctgggattacaggcgtgagccaccgtgcccggcccgctcaaaaatcttataagaaatatttcataggtcctaaacttcggccgcaaacagctggctactggtggcaacaggtgccagtgagcaacctgttgtttgatttctatttaagttatttcttggctggatgtggtggctcacacctgtaatcccagcattttgggaggccaaggtgggcagattgcttgagtctaggagtttgagaccagcctgggcctgggcaacataacaaaaccctctctctacaaaaaaatatgaaaaattaggcaggcatggtcgcatccacctgtagtcccagctactcaggagactgaggtgagaggactgcttgagcctgggaggccaaggctgcagtgagccaaaatcaagccactgcactccagcctgggcaacagagtgaggccctgtctctaaataaatagataaattattgatagaatcaaaaagggatttgactaaggcatcctcttggccagaatgggcagactggagcgtaaaacttctgcaagatgatcaggacacagcattgggtagaggcctgaagcaaaggttcctgaagccgtccagcttttctgaagtccaggtgaacagccagggacagaggacagtagccagaagccatgccccacgaatggcaattgatagagaaagcaaccagtggggcgaaaccaggaggaagccagcatactggaaagtgatgattcagcctggacattgatgctggtcatgcaatggaggaaaagaaagagtctctgcaaaacagtaccactgtgctttctattggctgggttccccttctaaaaccctcctgattctgtcattttcaaagaggaaactaacaacacaccattcctgcttaactttagatgctgctattgttcgtggcaggagatcgctctggtggtcagcattaacgagatgtagcctagctgggggctgctccatttgtgctgtcatatcatgtgataaaaacttctttttcctaagatgttgatgacccctggaaaaggaaagtgttctctgatctattggaccaaaacttttcttctttcccgtggctttcacacacagatggaagtgagtgggacagggtggcggtaatttgaggtcattccctgggataagcaactctaattagaggcaggaaatgtttatttgagttttattgggtgagtcagtttggcgcagctttaggtcactctaaacttggggtatcctgtttaagtcaaataatcatagttttaagcaactgggaacaaatatcagatatatgtgaatgaaatttttactttctcaaccagcagactatagagtggagtttttaccatttggccaactgtgattgaattaaggcttttctccaaaaaaaaggcatctccccttttaccaaaagtgggatggactctaccctctctggcttatagacaatcattataagaaagaaccatgtctacaggcaatggaatattatttaaccttaaaaaaagaaagaaatttggaacaatgtgaatgaaacaggaggatattatgctaagtgaaataacccagacacagaaggataaatactacgtgatactactcacctgatgaatctaaaatagtcgaactcatagaagcagagagtagaataggttggtggtttccagaggctggtggagggggaatcggggaggtgttcaccaaaaggcacaaagtttcagttatgaaggatgatgataagtcctagtgatttgctgggcagcatagtgccaatttcacaatactgtattgtatacttaaacatttgctaagactgcagattttatgttttctctctgtctctttctcgtgcacacacacacacacacacacgcacgcgcacacccaaaataataataataataataaaaagaatggacaggaactttgggaggagatggatgtgtttatggaatagattgtggtgatggtttcatgggtgtatactcatctccaagcttatcaagttgtatacatgaaatatgtacagctttctgtatgtcaaccagacctcaaaaagtagttttaaaaaaagaaaataataaatatacagcattgcatttagaaagaaaaggaaaaagaaaagaactaatcatgtgaaaacctattttatatattccatcttacaactggtgtggatggaattggcctttgctataggagtttgattgtgataactctgaatttggagaaagaccacaagaaggttattacatacttgtgtatggctttgaacaatgggagttagcagggggtgaaggcctagtagaataagggctgaaaacatgtgaaaatgactttttaaacatcattaaggtggttatttttgttattattacataggaacattgacatcactaaaaataattattactcagatgagactctttcattctgtatgaattgacaggcaagtccccagtaagaaaaaaaaatccttctttctattacccacactgaccttctagaaatacagagttggaagttctgggacactgactagacaaggctctgcctgtagttcacacatagtctgtctactttagagctggaaagtcccactcatcattatttactgttttcatttattctaatgatggttgtactttctttgtggcttaacattcagaaatggggaaataaatttgatttggtgaagttctccaaagtggctgtatatttattgtgtttctaccaaggaagtgtagtagtgaggaatgaggattgcttgtttatctttttcaaagacaataaaacattttggacaatggaaatggggaagagagaataacttcaggctgccttcttccaatccaccttgaactctgcttccagaagagttttccttaaaatcaacttgatgccattttacaactccagaaacttccaggggccggacgtggtgtcttatacctgcaatcccagcactataagaggctgaggcaggaggatcacttgaggccaggagtcaggagttcaaaaccaacccgggcaacatagcaagactcttgtctctaaaaaaaaaaaaaaaaaaattagctggacatggtggcacatgcgtgtagtctcaactactcagaaggctgaagtgggagggtcatttgagcccaggagttcaaggctgcagtgagctatgatcatgccactgcactatagcctgggtgacagagcaggaccctgtcttgaaaaaaaaaaaaaataagattttagggttctttacttcccacctatgttctcagaagcacttttctgtctccttcctacctatgtcctggatctatgcactgtttcctaaatgacagtttttttactgagctcacacctaccttcctcattcccacatgtgattttcgtctctgcttacctctgcccttcaaggttgtgcttctaatttgccaggccttctcctcctcccactcacattgttcaagattttactcaagtgtagtctttgccccagttcagctttatctgaaacaaattcctatagcagtggtcagtttcacacaccagttgtactatagaaaatataggagtttctggccgggcacggtcgctcacgcctgtaatcccggcactttgggaggccgaagcaagtggatcacgaggtcaggagatcaaaaccatcctggccaacatggtgaaaccgcatctctactaaaaatacaaaaattagcaaggtgtggtggcgtgtgcctgtagtcccagctacccgggaggctgaggcaggagaattgcttgaacccgaaggtggagactgcagtgagctgagatcatgccactgcactccagcctgagtgacagagcaagactctgtctcaaaaaaaaaaaaaaaaagaaaatataggactttccataggactgttttgtgtaatgatcttctctaagtgataaagcctggatgagcgatgattattctctagggggtgctaagatacaatccagatgcatagacttcacagtctgattggatacaggagagtttagcacataattatacagcattttgtgttgttttccatgatttcctgtcttcagtttctagctcttgaaaaacataagccatggcttatatcatcttctatatcccccagccacctacccaaaatctgggcccccaggaaagacctgttgaattgataggttagatgatatagacatggaggggagaagatgtttcagagtgtgaagttaggacccacaatttccttatatggtacattggagaaactgctcatgctgtcaccagcatatcaagtatgggctgttccaagcctggtctttagttggtcatttatgtgaaatcgatgtaagagctataaaatctttgcacgtataaacagctgacaggtgatggagaatctgtgtgtccaaagaaacctaactgctgctaaggagaagcctctggctatccgtcacaccttgaaaggcaaacagggcaggcctagttttctcttcaaagacaggaaagattaacgctctgggaaaatggagcccaatgggaatttcaaacacacgatgtggttcttccagccagtaggtcattatgaactattcttaccctaaatggccatgacacataatctctttcctaattttattattttacttgctatcacaagaccgtaactttttagacattcaggtgagattaagggaggaggaggtggaataaggcttttaaaatctttgattacctcagaaaacgtatttgcttactttaccaggaagttgatgttttgttttgttttgttttctacccatgccaagaggggattaatgagtagctgctgggtttgccagctttcttttgatttcatttacgtaattaagcagttctcagaatgacttgaggttctcaccctgcatcaaaacatgcttctcaaatgtgttagatttggaggtcagaaacaatgcagactcagtagagtgaggggaaatgaaaattttaccttgctttaaaacacccttaatgtgtaaaaaaagagttgatcgtgctttggggtcatgaacatggagctttgttgagtagaaaacaagttaaaactaaagttcaaaatgggctaaagtgagaatagctcaagatgaggttttacaatagaaatgatgtggggaaaccaactctggattacctttgagtttctagcaatctgaaccatgtccatggtgggtgttcaagaactcaggcatttgacgcagacataataggaacccactatatgcctggctcagttctagttgctggactacagtaaggaactaaagccacaaaaattcctcctctcatggtgctccctggagtgaaggttggatgagcagattttgtttgagcacctcctcaggtatggagtttggagctagtattgcttgggattgctaggaagaataagtgtgttcctcaaggagctgaacatctcactgggaagtgaagacaactatccaaagaacaaaagaaccactcaagtccataaccaaatactggggtgttgatatagacagaccctctgaaatggtgagagtgggcacccagctccaggttctgcagacacaggctcacggcagcaggctggcttaactagctaacttaactaagcagtaagaatttgcagttatgcatacacacacacacacacacacacacacacacatttttagaggcagggtttcaccgtgttgcccaggctggagcacagtggtgcgatcacaactcactgaagccttcacctcctgggctcaagcaaccctcccacctcagcctcccaagtagctggaactacaggcgtgcaccacgatgcctggctaactttttaatttttttgtatagacagggtcttggtatgttgtttaggcctcaagccatcctgccacctcagcctcccaaagtgctgggatcacaggcatgagccaccacacctggcctgcagatataaatatttagatcactctttgcttcttatagccccctaaccttttttgttcttctattcacatggtgtttgcttttaaaagagattataacaacttctctttcaggttagttcaattcccttaaaaaacagcaagccagagttaccaacagttcctgccctcatgaagcacacagactacggcggggaggggagaaagttataaattaattacacaaataaaacctcagctgtgctgaatgctacaacagagagtgtagcacgtcacagggggatctgaccttgtcagagaagtcaggggcagcttcctgggagaaaagatggttgtgctgagatctgaagggtgaggaggggagagaagaaaacgttccaggcagaaagaacagtgtgagtaaagccctggggcagagggaacaagcgacagctggaaaggagaagactgagaagatcacacagactttgaagcatattagagagttttccgtttattcctagagtaacagggagactttaatagaatcaagctatagaggctgggcacggtggctcatgcttgtaatcccagcattctgggaggccaaggtgagtggatcacttgaagtcaggagtttgagaccagcctgggcagcatggcaaaaccccatctctactaaaaatacaaaaaatagctgggcatggtggcatttgccttactcccagctactcgggaggctgaggcaggagaatcacttgaacctgggaggcgaggttgcagtgagccaagatcacaccattacactccagcctgggtgacagagcaagactctcaaaaaaactaagcagtggacttagaggaggaagcggggtgggttacaagcagatttctgtttcggcaaggtccctctacctggagcgtgaccagcatttgcaataaatgtggggagcatcagaagcaaggcatctgcaagaatctagacaagggatgatagttgcttgggccataatggtgggcatgatggtggtagagagagagagaaatggacaagtatacagggaaaaaggtacaaaatgcaaagatacgataagtaaatatgacaggacttggtgagggctgagggagagagaggtattaaatgactaaggtttctgaagggtgaagctttgccccgagacctagagaactagttcattggggtagatcgtgaagtcaattttggacatattgggcttgagtgcctttggggcatctggatggagatgtcagaaccgcagttggatgagtggtccggagcttgtgagtcatctgcatagaggtgccttggaaactgggcgtggacaagatcctcagcaagcactcagtgaggatggggagcatctggagcccagcctcgtgggattccaacacttaacagctgggaagaggcgaagcccatgagagaggcagagaaaaccctgccagaaatttaggggggaagcctgaaagccaagggaaacaagtgtgtgttgaaagaggatgtggtcagggaagaaagctgcagagaggtcaaagaaaatgaagacttacgataataactgctggaatagcatctatagcaacagtcatagccaatcttcattttgagacaggcattttaacatataatttaaccttcatgagaattctgtaaggcagcttctattactcaatcatcctgatttttttttgagacggagtttctctctgtcacccaggctggagtgcagtggcgcaatctcagctcactgcaacttccacctcccgagctcaaatgattctctttcatgcctcagcctcctgagtagctgggattacaggcatgcgccaccatgcccagctaattttgtattttttgtatagacagggtttcgccatgttggccaggttgatctcgatctcctggcctcaagtgatctgcctacctcagtctcccaaagttctgggattacaggcatgagccactacgcccggcccatcctcatttttacagatcagaaaactgagcacagagagccaaaggcatttgcctgagtcatttgcagccagtgagtgataaaaccgatatgggaaggcctctttctcatcccacagcccctactcttaaaaactgtgtccagtgttggtagaataaaaagcatccagggaggatgatggggaggggagattttttccccttcagagatttggagtctcctaaacacagtcaaggaaatactccattgttgctaaagtccgagtccagggctggtgactgtggaatgggcacttcagtggctgtttcaggtggtgtggttcagtgttcagtgaatgatccagctgtacttcccatgtgaaaggcttatcctggtgctgcagggcagaggctgtcagagtgttgtccctggcctgccagcattgcccggaaacttgttagaggattcagattttcagactccgccccagatcttctgaaccagatatctgagttggggggctcaggaatccatgtcctaacaagcttccatgtgattctaatgcacaagtttaagagtctttgttcttggaaggaatccttgaaatgacaaaaaaggagaccagaataatgtataatccttatattgcacagatgcaagatacctaggcagaaaccagatggaggagagtcagtgcttctcaaccctggccgcacatgggaatcacctgaggagctttcacaattactaaggccaggcccccaccctcagaaattctgattccagtggtctggggttggcgagagcatttaatttttgaaatgaggatttgagtggagaatggatgattgaataaacagtgggcaaggcagcccatgtacttctgattacaaaattgtactctggggagaaaacgaggtaggctttgaaggcgaagggcaaagtaaatggaagaaaagctggacttaggccctttgtgaataccggtaaagatggaataattctggagactggagtgggggtgaaggtagtttgaattagtaacaattcttaactatggactttattttcaaagagatgtcaatagtaagatagatatgctttgtaaataaagaagctcattggtaaatgttactgagacctaatggaaaataatatgctaacatcctcctggaagcttcacttagactatacctatgtgttaaaaatgtgagccgggcacggtggctcatgcctataatcccagcactttgggaggccaaggcgggtggatcacgaggtcaggagatcaagaccatcctggccaacatggtgaaacgccatctctactaaaaataaaaaaattaactgggcatggtggtgtgtgtctgtaatcccagctactcaggagtctgaggcaggagaatcgcttgaaccagggagtcagaagttgcagtgagctgagatcgcaccactgcactccagcctagcaacagagcgagactccatcaaaaaaaaaaaaaaaaaaaaaagaatgtgctctgcctctctggccttttaaacctcaccatttacttcgctaaccttcctctacaactgatctggtcagtttactggcccctaaacttgctcactccgttcccatgtcctggcattggttcctgctgcccccgaccttctttttctctccaggcctagctgcatctaaaatcctccatggcctcccaagtcagagagctcctttttctctgaatctttttagcacctggtgtctttcatgcattcgactcttattttgtttttttatcattttgtccatttcccatctccacccctggattgtaagctccccaggacagcaatggcttgtaattatttgccctcacctagcagcttagcaccctaggagcttagaatataatagtcaagaaacggtgcaaagagaatgtcagtccatcctctccccacatcatcatggattgcaggtaagagggggccacctacaataaggtgtgactgtggtttggccgttctgagggctgccttgcaggaggaaaccataggggatcctggaaggaatatcctccaaagtaaaaagtggccctcacagtgcatgggggttcacagtcttgattccacattgcaatctattggtctcctgggactgcctcaacaaattactgcaaacttggtgccttaaaacaatagaaatgtattctctggcagttctggaagccaagagtctagcatcactgggcctacatgaaggtgctggctaggctgttctccctccagaggttccgctccttgcctcttccagcttctggggctgtctgcatcctttggcttgtgactgtttcactccaatctctgcctctgtggccacttggcctcctcctccctgactcaggtcttcctctacctgcctcttataaggacacttatgattgtatttaagacccacgctggtaatccaggataacctccctatctcaggatccttcacttaattacatctgcaaaatccgttttttttttttgtttttgtttttttttttttttttagccatataaggtaacattcacacattcaagggttaggacctggatatcttctagaggaggattgttcaacctaccacacatataaagacaactggagccccaaaagggcagagacttgtccaagatcacacttccagatgacaacaaaaatcaaagatccaggtctcctttctgtccatttaggcttcttccactagaccgaggtgatgcccaccgaaggcggacagagaaaaagtaaaattgtgcttcataccctaatctgtgtgctttattcgtttgtcttctttatggatcaggtgctaccaggattcacccacctttgaggcttcttcccccttgagtcttggtaaccttacactgagctcacactaagctggcctgtgtgggcagctgcaatcaaatgacccaaatggcattttcttctctcctttcaggaccgcctctttttcgtcatggaatatgtaaatggtggagacctcatgtttcagattcagcgctcccgaaaattcgacgagcctcgttcacggttctatgctgcagaggtcacatcggccctcatgttcctccaccagcatggagtcatctacaggtagcctcttctctcctcctctttcctgaaagtgaagaaaataaaggatgcttcagacacttgaactgacttcagctcctgcccactcgtctcttagcaacctgctttagattagttgtttgttccaatttgcttacagaagacttttttgggggctgtttattcctgtgaatgttagtatttgaatggccctgggagatttgacccactgtttgtgccagttttgatttaaagctcaagcatgacattttaaaggcttggtgccaggtgaccttggtgtgaccttcgtttttctctctctcctccaccctcttccttgaacatcagggcattctctttacgtgtttcttctgtgccatgaacttcctccccttcctagtctcttgccacttcctgagtttgtttggcttagttttctccagcagatagaatcagggaaggaggagttgcttgagggactgggggtttatgatcttgggtggggaacaaggaatgggaactagacaatatccaacaggaagttactttttgcagatcatccaatcctttattactgcccactccccttccaagaaacacacgcacgtccacacacacatgcacgcgcacactgattttccatgaagagaacaaaactacaaaggctcttctgtgaggtcaggaattctgggaggagtaaatatttataattagccacaaggatactcaagttccttaaggttttctcaatggctgttaatttcttcacttggtctttgcttcttctttttttattttattttattctattctattctttttttttttttaattgggtagaggagtagctggcttcgtttcacctagaacttggtgaaaccaagtatggacatcatcttggtctagtggaagaagcctaaatggacagaaaggagacctggatctttgatttttgttgccaactggaagtgtggcattggacaagtctctgcccttttggggcttcagttgccttatataaaggttggtaggttgaacaatcctcctctgaaagatatccaggtcctaacccttgaatgtgtgaacgttactgacctgctcctgggagcagtgccctggccagatgttcttcaaggcattctggtcaaccccactccaggcttcccttccttctgccatctcttagcttccttagtcagtgatttcctagagcccatataataaagtccatacttcctagcctgccattcatggccctctgccatgggaatcgacgcatttgttttctattgctgcatatccagtgaccacaaacggaatggtgtcaaatagcatccatccattatctcacagtttccattgggtcaggagtccaggcatgacttacctacatgccctggtcagtgtatcacgaagctgtgattgaggaatcagccaggctgcattctgttctgcagtttgggctcatctttcaagctcatgtgcttgtgggtagaatttttttccttgcagctttagtacttatgtggcttgctccttcaaggccagcaggagagcaagtcttttctgccgtaagtctctaacttcagggaaggtctgggccttcttttcaatggccctaatcaggcttacccaagataatgtcccttttgattaactcaaagtcagatgattaggatccttaattatatctgcaaaatccctttgccatataatgtcacataaccccagtagtgatatcacatcagctttgccatattctgttggttagaggtaagtcacaggctccaccttactcaagggcaaaagattatgggattataccagagcatgagttgggggtcactttaggctgtgtctgctacagcttcatatacctttctctcctcacttcccacaccccttgtttcgcacccacaaagtttcttagcttttctcaaactcacctgccaatttccaactttgctgtgcttctgccctcatttgcacctcctctgtccagccccaaaaccccatgtagcactgcctgcctggccccatcagccagagtgagtccctccgtccctcacactttcctttgtgaagaaatcgcaatttgagactttcattgctgcacctgcccctgttcaccttgtggtaggattagacatctatatggatccttcactaagtttcaaactcaaagggccatttcttctttttattaaaccttcaatcttcctttattcttaatctacatgctcttcttgatttgtgcataatgaatatcaaccattgacttcagttaatggtctgaatggccttaatccctatcctcaaagcaatttacaagctacttagagatgcaggagttggatacaatgcacgtacttcaaggctgtgcattgttaggtgccaaggacaagaagaaaaacgccatttcttgagatgccttccccatctctaatacagtgagtacaatcaccaacattttattgcagggatacagagactcaatttaaggaatgtgtccaaagccatacttggtaaatgacagacataggaggtataactgacacaccaactcatgctgcacaccatgacacttggtaccctgccttttcaagtccaactctaaactccttcactaatcattttaggtactccaaaacttgaccttcccttagacatttctgcttccctaaatgaatgccttcctctcaccaacctgtgaccacttttgccctgttggcttctatgagccattctcttctccccacttgccttcccattgtcctaaccattcttatcacagtggctggctccttcatcctctaaatgctggttttccccagggccttcctccctcctcattcttattctacatactgggcaatttcaaccttcgcatggcttcagacaacttctacatgccaatgactcttcacatatgtatatccagcattcctctatatctagccccccattatttccagagccccacacaagatctcttccgttaaacctctccccatcaatgttggaccttcccagccttctcccttcttccctggctagtttgcagtagttactgtcttcactagctcactgccccttggttttctgccctccagtctatccatccacctcccctcaatggctgcccacaattcttctaaaacacagactggttgttgcatgttccccttcttagcagccttcagcccttataagataaagtccaaacccctttgggaaccagaccccttcacgccctggccccggggctgctgtgcatagctttgtagtttgggcccagcagaagtgaggggcacaggccgcgggttggggaaggcatccagcccctctccacttgcatggggagcttcagccctcagcaagagatgcttttctgcccagaggagatggagttttatgcttctcacaaagacaccctactgttaacagggccccgatggccatgatgaccttttggcccttatccctattgccaccctttaggcactccaaattacttgccattatcccccaaataccattgcctctcacttctctgagactttgcccccattgtccctaggattcccttgctcctaatctgtgtctgcatcagtggttcccagattgcatccaagatctgactgcctcagggtctctggtttaaaaaaatacagatcctataatacttggggaggggaaataggtaaggggatgggtgaaaacagaatggtcatgagtaggtgattgctggagatggatgatgggcacttggagttcactattctgtctacttttatgtatgttttgccataataatcataaacacagattccagagtaatactcctggagctattgattcaatagacctgatatatggagttcaggaatttgtattttaaaaaaagtgttctctaggtgattgggggaccgtagctcaagagaatttcatcctcaggacctcttcaagcactccagctgtgagcggcctcccctgactccctcccctagtgggatcatgcctccctgagcaacatgacagtctctttattgtgcattttgcttgttccctctgccacccttgggtttttacttatgatacctcttctgtgattgagaactccacctgagagtgcttacctagttgatctaagacagtaccctactggcagtagatgatcaataaatatttgttcttctagtctctcctgccccagagtcttctaatccagtggattgctacctcacaggtatatatttctccagtctttgtttgaagcatttctagtatacaagatatttttttctgtgaccctagaaaacaccccatttcctcttatcttttattttatggatttatgaggaccctgtggtctgtgttcccatgctgcctttgtatcaagctgcaaaaggctctgtggggaggtctatatgaggttgatggagaagctgtacatatgtgtttctgcctgtttgcttctggccattctgatccaggcagagaccatgttttatgtgatacagggaatttatgtgggagacaggcaagaccaaatttaggaggacaagtgtcattgcttaagttgagatagaattttccagccttcctgttggaattgatatacaaactaattagcagctaattggttcatgtccaagaagtaagagaagtcatttctctggctcacacttgaaagagagcccaaacagatagacacaatctccttttcctctggtttcttttccccctagacagcagagggtgctgtctctgtgtcccctgctggacacggggtgggggaagcagggggagggctgggtgggggttcctgtcccttgtgctgtagtagaagaatgcattagatcacctgtttccacttttcctaattatggcatttaaccacctgccctccccatacacttgtaggcactgtgggaggtttttgaagggtgggctttccgtccaaggttgattcagggaaattcctcctcctcaacatgctgctcagtgcttatgcatgttagtctccgagctgctcaacagcagcagctgactttcagagaatactccctctgtccccatgtcatgaaggagaaattttgtgatgatgcctcagacagtgaggggagtagaggggcctgggaatggagttgaaggcttggcagccaggaaggtatctttttattcttttgtaatccagaagccaggagcgctgtgcagcagagggtggagaaagacgtagattccatagccctgaccaagtgtccccatgttttctgcctgcatcctcatcaataaagtagggatgatagttatacctgtctcacaaagtcgtagggatttcatgagtgaataggtctaagtaattttaaataaataccacctgccacagagtaagtactcagtaaatgttagccagtcacatacctcgaatttacattactaagatacagtgaaagaacattagagatttcttatccatcccggtctccaaaaggaatgcctgaaatcactttagagaaatgaattatttcttgtccttttttcttcattcttcccttctgataaaatcgaactctttcttttttgaaatgataaagtagtagtcataggaaaaataaaaatctaagcagtgaagaaaggcgtaaagtccgtttttcttcatcaaactcataactacccaggggtaaacagtttaacagtttctagagaactttctgagaaatcttcgtgagcaacttacaaaacctctttgtgactggtctccacttgtgaagtttagatagtacctgccttgtctctttcaaaaggtagctgagagtgattgctggaagtcagactgtgatagaggatatgaaagccagtgggaaatgacagagcgtcttatctatgtcacatatcatgaataattaacatttgtcattttgagcattaaaatttggtctttatccaccagcagagaaagatgtaagttatagactcttcctccttagattctccaagccttttgatctctaatgagcccttatcatcattccctgagagtcagtcttgccttagtgcctgtcgtgtgcccggtgccagaattgggcagaggggagacaaggagaaaggaggtgcctctgccttggccaagcctagattcttctgtactcaggaggtacttagaaagggctttccttgttgaccatgatgtttataaaaagtcagataagaatcaagagcaaggaacaaaaatccagtcagaacctcagtgcaccttataaacctgtcttaactatcttgttctctccagagctggggaacaaagcccaaaggagaggcttaggaggggctttcctagaagaagctggggttgtactgaggtctctagctgtgccctccaaaccaggcctccgtatggaaaatgcatacgaagttgtgatgtaaattttagtcctgccatcctgctagtcagaggggaaagtgtgtgccttaatctctggaatcatatcctgccattggcacacagttagggatttgctgacatgaatgaaggtctttagttaaacctgagttaataactggaaggtctaacgtgtagtctcatcctcttttaatacattatcaagttatttaaagctctaatacaaagaaagggaggagaaggtaggggcatctctttttgcctttgagtcttctaggacctgacctttagaaagtcactgagggtacttggggatcgttttccccagagagcatcgttcttagctgtcagcgttaccccatccattatagaaaatgatattttgacataaaattcctaaggatctaagggccgagtctctaatggaaggaaatcagctaccatggcagaaatgatgagttaaatcagggagggccttggagactgcataatccatctccttcgttttataggtgcagaacttggaaaccaaaattgtggaataactcacccgagtttacacaatgagatagtataaagcttagatgttacttcagtcaaagatatacatacagatgaattagttctacatggtgttttggttaataaaaaagcagtttttttttttttgccttccctcccctcaatttccccttccaaagaagcaaccacattcaactcgcagctgggtcttttggtatgtacctctgtatttagaaataacattatcttattgtacttttcttttttttttttttttgagatagggtcttgctctgttgtccaggctgccatgcagtgttacaatgatagctcactgcaacctggaactcctggatttgagcaatcctctcacctcagcctcccaaattgctgggattacacaggcatgaaccatggcacctagccttattgttattttaaaaacaattattttacacattatctagtgacctaccactgtggaaaatgaggttttagttccgtttctcacccactacccacctccacagccctatcacatacgcacacccttcccaacctcccatcctctcaatatggtttactgtaattttggttaaatgaatatatagtatacattattataactgtgaaataccatttggaattcagttatgtggtatgctatagttacttttccttcccagtgcattttttttgtttattttccctgaagttaataaatatctctttgttttctatgtaattattattgattcaaccacaaactctctacaaactgtccatatctccttttagcatgtttaggtataagcagtattctatcaatttcatattcttggatacattctttgccaagccttgtaaactattccagtctaaatggttaccttctgccctgtgtgcctgctgcaaagctgtcaccctgggatcccacttcactttcatcctaggcttccttttcccactatcctgtgaagctcctggttccagtattccttgccttcctctttctttgtatactgcatcaatttggtgaagcacctttagtagatttctgagaacaaatatataggaagtgaaatattgagactttccttttatatctaaaatcatctttattttactctcagacttgataaagagtttgactgggcatagaattttagattaaaaagaatcttcagatgagatcatgtcctttgcagggacataggtggagctggaagccgttatcctcagcaaactaacacaggaacagaaaagcaaacactgcatgttctcacctacaagtgggagctgaacgatgagaacacatggacacatggtggggaactacacacactggggtctgtcggggatggggttgggagggtggggagagggagagcatcagaaagaatagctaatggatgctgggcttaatacctaggtgatgggatgatctgtacagcagaccaccatggcatgcatttacctgtataacaaacatgcacatcctgcataagaactcagaacttaaaataaaagttgaagttaaaaaaaaaaaaaagcattttcactcaattttaaggtatcattccattgtcttccagctctcagtgctgctgtgcagaagtctgaagtcaattgaattctcaatcatttgtatggatctatttctcttttccagaagtgtgttaaagctttgtctccattattctaaaattattgaatgatgcgatataggtctgttttcatctattgcactcgcccggcatagatctcttcaatttagaaaattaagcccttcagttctagaaaatgtattacttatttctttactgattctttctcttctgttttctctttctggaactatcattcagatattggactagtcaacttggggttcactgtagactaatctgggtggcccacttagttggggaacctcagactatcactatttctaggcctttcctcttggagtgcttcgattactcccagagtcctgcctaaagggagacggcctggtggccagcatcgcaggaaccaagtgaagccagattagaggacccggcttccagaatacacatgtttatttaattctcctgtgttcagtactataccctcatgcccatctacccccactccatgcttagtctagagatcctgtttcacttctccagagaataaacctctagggacagggaaggggccgtgccaagaagaaaagagaatctggatttataactagttttcaaccaaatctctcttttctctcgctccacatcaccctcatctccagagtaactgttactgcatatttcctgagctttggggataggaagatggaaattctgcagcaaaaatttcattgctcttgaccttccccattgctggttcaggattcagttttcttggatctactaattcagttaccactcatccgtttactttcaagattccaacattgtgttgcattcttttcttactctctccatctttgtgtgtaattttgagaaggaaagtaaaatagtggtgaatattcaatatctacagtctttatccagaaatgaacaagaatcgtaataacagcagcaacaacaataatagcaaaacacttatttagcctttgtgtagccagacactattctaaacactttgcacatgttacttattgagtcatcacaccaaccttatacagtagaagctcttactgtccactggatttacaacctttccaaaaaggagatgttgccacatcctaccaccatcactggcactgtgtcaggtcaccctgtcctctctgttgccagtcacagttttacatgggaagcaacattgtatgttggagacagcacagagtttgaggtcagaagaatgaggctgaatcctgggtctgcctcatctttgttgtgttttcctgggtagaataattaaactgtttgaaatgcagttttctcagtgttccatgggaattataatgcaaacctctctggactgctttgaaaattacatgagaaaacatttgcagaagtgctgagtgcaatctttgacacctagtaagctccattattattggttggctaaacggagaacacagttctggagtcagaaagtgaatggactgaatcatgcccccaacccccagattcttatgttgaagctccaatccccagtaccacagaatgtgatggcatttggagatagggcctttaaagaggtaatgaaagcaaaatgaggtcattgggtgacctaatccaatatgactgatgtccttataagaagaggaggttaggacacagacaagcacaagggaagaccttgtgaagaaactgggagaatacagccttctgcaagccaaggagagagactcaaaagaaaccaaccctgccagcaccttggtcttacacttctagccttcacaactgcaagaaaataaattcctgttaagtcgctcaatctgtagttttttgttatggcagttctagcaaactaatactgagaacctcagttcaagtcctagtattgccacttactaactgtgtaatgctgggcaaatgacctcatctctctgagccacagtttcctcatctgtaaaatggctccactaatgtatattaaaataagagggcaaggcctgcggacttggcataaattgtaatagttaaataagctactgggcataaaaatgtctctggggttgtttaggggctcggccagtgcctgaggagttacaggtacccccacgatggtggcagtgcagtaacactgcagtctgggaggagcaggttggtggatatgtgagtctgtgtctcttttacaggctaagggcccagatctcacaaccaggtgatattttattcttgtggtcactttgggacccagggacaggatatattgacactgataaacgtgcatgacggtaaccaatgggctggaagggctgacagatctgcttgcattataaagctgcaaagtcggcagggtgcagtggctcacactggtaatcccaacactttgggaggccgaggtgggtggatcacaaggtcaggagatcgagaccatcctggctaacgcggggaaaccccgtctctactaaatatacaaaaaaaattagccgggcgtggtggcgggcgtctgtagtcccagctactcgggaggctgaggcaggagaatggcgtgaacctgggaggcggagcttgcagtgagccgagatcacaccactgcattccagcctgggagacagagcgagactccgtctcaaaaaaaaaaaaaaaaaagctgtgaagtctgactttggtgtcttgacttccctgttgggctccctttgcacccagccaccttcatgagaacccggcccaagccctggtccctatgtgacctgcttcagcaaagaagctgcctttggaaatgtgcactttagttataaaagtcattctgtccctctcccatgtcatatagatgaagagcttgtcccctactaaaggaatgccaaataccagcatgagtttttcaggagtcatcacttttatatgggtccaaatctacttgaggctgagactatctttatcccaaactgattccatgcagtgttacctgccaatgacagttggggggtgaaagcattgtgacctaacaaaggggaagggaggaggagagaggagagcctgagctggctgggatgaaagccaagtttacattccttggaggaagccgcgttattgctgaccagcttagaagtagaattctgactgcctttgacatcagaggtttagagcaaacaggaagtttggaaccaaagggaaattcctgattaaatttgagtgtttcagctagtaatgtgtgttcagagcaaaaattatgagggaccccgtcatctcttatttttgtgtctttcatggtagctcatatagaactgagaacccattatagtggttaagggcacaactctggaacccctggtctctaaccctgcctctgcgctcattagatctgtgatgttgggcaaagaacttaacttccctaaacctcagttccttcatctgttaaatggggttattactccccccccaacccacacagaaatattgtgagaatcaaatgagagttagtacaagtaaagcagtaacaactggttctagtacagagtaattgctcactaaacattaattaatgttattattatcattgttattttgcaagtggctgagtgcacagttcataagattcactttgtccatctcaaaaatggggatgaatgtatcctgctagttagtaaactgatgaaaacactttgtctagttagaggcctccaaacaagggctaatttgaggtgttgggacctgtcctatataggggaatttgacatcaatatattttattttatgactatgctgtgttctatagaaagtagatgccttggaacaattattgctgcaatatattcaacagccagtactgaatgctccaaggcttagtcatatgatttttgtttcttcaatgcctttggctattgaatcattagattgagctactaaaaatgagaattgtttcagcaaacaagtggcagctttgccgtggtaagcagagtcctgtgtgaatgtttgaagttggtctctgtggtccctcccagttggccatgtttgtttcaagatgactcaggctggaggtggggtgaggaggagagtggtagggggtaccatagtgagctgaggtagtggagactacacttaattggctttgcttccctctggtcatgcagcagcaagctaaggattcatactgctaattgttgccaccttctctctccttgcttctgggtctcttcttccaacattcttggccaattcattctggtaagcaaggagctgggttgctttcttgctcagaagcctgccatgactccattatcccaagacatccccactcttctgccacttactcaaagccacccataagctgaccctgcccctaagcttcctctctggggtttatatactgatctctttctaccccacaagatgacccctttctatctcctcaacagcttctccagccaaactcctctttgagtcactacttgagcctaacagaggtgctcattgacaggcctttgacacacccatacacaatgtgcatttattaccaagatcttaagcatcaatagtcacaatacaacatgtttccaccaccctgtacctttgcttaggaataccataccttttcctggaataaggtatggtattttttttttttttacgctaacttttcatcctttgagattcagcttcagatcatttttcctggctgttagttatttcttccagcgaagttagttatttcttccccctgttaacattgcatctgctaccttatattctagcacttcttatactgcattgcaactatttcttggttgactgaccctacagagtttccataggttatgataaatgtatagttatacccagtggcccatgatttcttgactaacctatttacatttatcgagaaaactccagggaggtgaggggattttctaagcatatttggctgcaggatatattttctaatggacttctcactggaccgctcttcccctgggctcctttctgtgtgcatggccctatttcacctgtctttttagtcttcacaaggtctggttggtgagttgctgcagtggaaagaatacagagttaggaattagggactagaactctaataaagctcagtcttagttgggtgtccttgggcaaatgacttctccttgctgggtctcagttttcctacctacaaaatatggtggccagactggatgatctagctctgtgatcctaagattgtttggtctgggaatgccttgaagagcatctgaaaatgaatttctgaaaatctgtctcaaaattacctcagtgaggctccagaaggtaactgatcccaagtaacaagagtgcccctgaggaacattcagagatccaggcccacaattcctgtcattcctcggaaggtgagacttcattggctggtggtcctgtgctctgctctcggtatgtcaaatcaccgtctgtgggttttcctccctctctaatttacccaaagtcctccctcttaaccaaaacaaatagcttttgggggatctgatgttgccaagttgtatttgctcctgtggcaagcagagctcccgcaaggggctgtaaccaaccatgtaagcaagaactgctggccgaggagcagggatgcttgctcagaagtcctagtcctgtcaggattgagaatgccacccctgagacaacaccctctcggaagtggggcatctctcatgaagtcccctcccgtgttggaaatctgctcatgcaaaagcattcatcagaagggggtttctttctagatttgtacttttgtctggggaagcaactaagaaaaatatctgttgtttgaagagcagtataatttaagcagacattcatttattcactcaacagacaacgagtaagtcatttttgctgtgccaggtataggactctaagatgccatgacaaggaagaagagcacattctgtctctagcttctttctgaatcttccttctttccttttcttttttctcttctcttctcttctcttctcttttcttgatgggatctcgctctgtcacccatgctggagtgtagtagcacgatctcagctcactgcaacctccgcctcccaggttcaagcgattctccctcctcagcctccctgaatagctgggattacaagcacccgccaacttgcctggttcactgttggatttttagtagaaatggggtttcactatgtttgccagctagtctcaaactcctgacctcgagtgatctgtccgccttggcctcccgaagtctgggattacaggtgtgagccaccatgcctggcctatttcttttttaaaaaactgataaccagagagacagtctctgcccctttggcacttgaatttaggtggggatggcagacaataaaagaagcaataacaataagagttatgatagaaaaaaatatggagttgccagggaaacacattacagggatacctcagccagtttagaaaaagtcaaggaaggctttctggaggaagtgaccactcccggagagatccaatgggctaagtaagagttggccagagaaagaggacatggaagagtggcccaaggagtgggaatagcatgtgcaaaggctctggtggagggagagggaacaccaaatgggtctgtggctctacagaatttgtatatgcctggaactcaaagcacaaatagaggccagggaccctagcctcagaggctgtcgaatgactgtcaaagccctgtaagtgcacggtgacatgacctcaggttttatctggaacaacatgtgggaactgaaagatgatcctagtatttaatagaatttcagaggtgggagaaaacttgggagtttagtcctccaattcgctgttttatagatgactaaactgaaactcagagacgatgtggcttgtccgaggacactcggtctcatagcaacacagacagaaccataagttgggactctagtgttttggtggtgtatgctgataaactggctttcaaaaaaaaaaaaaaaaaaaaaaaacccaaaaccctgatttgtagcattaactgatttctatggtataaatattctccctggggccagtttcaggctatccatgttgaacaaccagctcacaaaattcctgaaattttaacaatctgctcttgtgagctggtgtgagctagctacaggtcccggcgggaaaggtgattgtgcgtgtctcttccccattctgtgttcagtcacattccattggtagcttgaaatcagccatgatggtagtacttataccatggaaatcagcaagggttttcctcattgtaaagccattgttaagtgcttgccaggacaccactggagtatacagttttcaggactagtaatcagagactctcttatgaagataagagaaagcattccagtgtgttaacaggcctacactgggttcctttacatctctggccttgatttcctcacctgtagaatgaggataatgtcaaagttcaataaatttcagatgtctttaagatacaccattatttttatttaaataaactttttgttttagaacagctttagatttacagaatagttgcaaagatagaacagagagttgccacacaccctacaccaggttcccctattaatgaactaatactgacacattattattaactaagcccatattttattccaatttcctaagtttttacctaatgccttcttgtcgttgttccaggatctcatccagaatatcatattacatttagttgtcatgtctccttcagctcttcttggctgtgacattttctcagactttccttgttttatgaccttcactatttgaggaatagtggtcagttattttgtagaatatctgccagctgggatttgtctgatgttttcctcatgattagactctgattatggattagacaggaatacctcagaggtgaagtcttattttcattacatcacatcaaaggtccatactatcaacatgacttatcattgatattgacctcaatagtcaatatcaaatgtttgccaggtttctccactgtaaagtttctctccttttccatgcccttttccatactgtattctttgcaaagaagtattatataaagcccacacttgaggagtgacaaattatatttcacctctgtgagggcagagtagcaatgtaatttatttagaattcttccacccatgtgcattgtctcctccaccattatatatgtatttgctcatttatttatatcaatatgaactcatagatagttattttatattttgggttataattcaatactactttattttgttgctcgaattattacagatctgcttattgggagctccattaggtggctcctgtgtctctttgacatacccccatcattgtggagtggtttggttttcagcactttcttactttctggtattacaaaatgtatatttcttgccccagtcctagaatcagccattttcctaaggatccctggcttcttttattggagaatggaaatagaaaccaaaatctaggtgcgaagtgtgctagttgctgctgggatgtcatttcttgtagtccctctcaaaggacagaacaaggaattgtgtgtgttctaactcatgaatacacacatacacataactcatgtataatacacatattaagtatttctacagtggacccttgaaaaacatgggagtgagtgagcaaatataaaaaacagttgaaaatctgtgtataacttttgaatccccccaaacttaactactgatgccctactgttgcccagaagccttactgataacataaacagttaattggcccatattttgtatgttacatgtattatatactatattcttaaaatgtaagctagagaaaagaaaatatttatagaaaatcataaggaagagaaatatatttataattcattaagtggaagtggatcatcataaaggttttcattcttatctccacatttgagtaggctgaggaggaggaagaagatgaggggttggcagagatggaaaggaggaggtggaaggggaggcaggagagactggcatacttggtgtaacttcacaggaatacatcataatttctgtctgcctcttttgccttttcatttctctaaaaatgtttctaaactataccaattcttccaccgtttgctttattttcagtgcccataggattaaaaggtccatgttctgaaagaagtcaaaagcaaccttgaataatcagaatcctctgccagattgcctaatgtcagtttttattctggcactgctgctctacttcttcttcctcatcatctggcattgctttggaagccttcgtctccatcaagtaaccttctgataattcttctgatgtgatgtctattagctcttgaattaccccaagatccctatcttgaaacccttcaccttgtacttttttttttttttttttgccatatctgcaatctctttcatgattttcttgattggtctgttgtaaatcctgtgaagtcatgcacaacatctcaaaagttttctcctacaggtatttattgtttcaggcttaatggctttcatggctttttctagaacaaggatggcatcttcagtgatgtaacccttccagactttcatgatgctctctctgttggggttcttttctgtagcattggcagtcctttccatagagtactatatacaatgagccttaaaggtctttatgatcctcttattaagaggctaaattagagatattgtgtttgggggcaagtagaccactttgacttctttgatgttcaacttatgaggttccagatggccagggatattgttcaatatcaaaagaactttaaaaggtagtcctttactagcaaggtacttcctgacttcagggacaatgaaaccaattgtccaatgaaaccaatctagaaaaagtgttcttgtccaggtccttttgtacaaccgaaagactggcggctggggtttatcttttcccttcaaggctctggggttagcagctttatagataagagcagtgttgattataaacctgattgcatttgcacaaaacagtggagttagaatatcccttcctgccttaaattctggtgcttggttctcttccttactaataaatgtcctctgtgacatcttccttttttttttttccccagaatagagcacttttgcctgcatcaaaaacctatttgggcagatgtctgttcttctcaatgattttcttaatggtgtctgagagtttgtccgctgcttcttggtagacagaagctgcttctcctgttatcttgacatttttttaagacaaatttttttctgaaattatcaaaccatcctttgctggcattatatttttcagctttagatccttcaccttccttttgctttatcatataacttcccttcttgaatcatattagagtctatagctagggctttcttatagcaaccctgagcccctgtaaaagctgcctttcaatacaaaattaaaaggtatttcacaaaaagtgcaaggttttcatgcctgctggcatagctgcaacaacaacttcacaaattatctttatctttcctttttttttttttttcacaatagtgcttacgtttgattcatttatcttgagatgtcaggcaaccacagatgcatacctcaatctgtggcacgtatcaagaaattcacctttttcttctaataccatgacttttgggaacacttccagcatcactagtgaatggcactacagtattatactaaacacaatgaaaaatactcaagaaccaccagagatcactttttgctgtgtgtaatacacaatttgctggagagaggaactgctcatatggaggtggttagcatcacatggccttttaagcagatactcacaacacttgagcttaccacaatagcaacaggaggtggctacaaaattattatactaatacagtatgcagtacagttaatttatgcagttatgactacatactgcatcattacattcatttacatttttcatgactgcaaatggcaccaggtatggttggtgtttgcataagttttgataaattttaactttttatgttagatttatgtatgttttatagtagtaaatgataaaatagactactatctacatatgttttattattcatgacatacctaacttgtgcttaactttttcaatatttctaggctatgtggtttgtctgcaagttttttcaagttgtcataaatctgcaaacatttttccaatatatttattgaaaaaaatccatgtattagtggacctatgtagttgaaactcatgttgttcaagggccaattgtatatgtaaccatctgtgtctatatgaagctatttgagctcacaccgatgtctaattctaatctgttaccatatgaatcattctagcctcttctcattgcttatctgtgaactcccactctggcattaagaaacctagctcccaccacctgccacccatttacttaagtgttcattcccagtatatatgcatagaattgttaacccacactgctgtgggaaaaactttatcaactagagtactgcaatagtttgcttgggctgccataacaaaataccacaaactgggtggcttaaacaatagaaatgtattttctcatagttctggaggctggatgttcaagatcaaggtaccagcaaattccaagggccataacagaagtatctgttccaagtttctctctttggcttgcagaaggctgctttcctgctacctctttgcatggtcacccctctgtgcacatgcacacctggtgtcttttctgtgtgtctgaatgtccacttcttatcaggacaccagtcagattggagtaggaccatcctgctggccttatttgaattaaatgacctctttaaaggccctgtctccaaatacagtgattttctgagttatggagggttagggcttcaacatacaaatttttgcagaacacaaatcagtcctataccaagtattgtgcttacgcttaggtcagcacctttcttccccacccttcgatgaagttgtttcatacatttataatacagataagttattttgtcacattttgcactccatctgggatttctcagcttcctaaataatttttcaaatttgagtgtattaagtttcactctttgtgctataaagttttatgggttttaacaaatgcatagcatcatatatcaccattacattgtcatacaacatagttacattggctgaaaaaccccctgtgctttacctatccaactctctcctcctccctaaacccctgataaccacttacctttttttaccaacactgtaatttttgcctttgcagaatgccatttaattggaatcagacagtgtgtaaccttttcagactggcttctttcacctggcaatatgcacttaagattcatctatgtctttttgttgcttgacagctcatttcttcttatttttaaataatattccggccgggcacggtggctcatgcctgtaatcccagcactttgggaggccgaggcgggcagatattccactttatggctgtaccacactttgtttatccattcactattgaaggacatcttacttccagttttgatgattatgagtaaagctactataaacactcacatgcagattctggggtaaacatgttttccaatcagttggataaatacctaggggagcaattgctggattatatggaagactgtgcttagcttggtaagaaactgctaaactgtcttgcaaagtggctgaaatcattttgcatttctatcaacagtgagtgaaagttcctgttgttccacatcctctctagtaattagtattgttagttcttggattgtagtcattctaataggtgggtagtggtgtctaattgttgtaatttgcaattcactaatgataaatgatgttacacatcttttcctatcttatttgccatctgtatatctgtatatctgtaaaggtatccttacagatcttttgcccattttttaattgagttgttttcttattgttgagggttttgtttttgtttttgttttcttctaagacagggtctcactctcacaagactgcaatacagtggtgtgatcctagctcgcttaaccttgaactcctgggctcaagctgtcctcctgcctcagtcacccaagtagctggggctacatgtgtgtgccattgcgcctggctaattttttagggtttttttgagacagggtgtcgctctgttgcccaggcgggtctctaactcttggcctcaagcaaccgaaagctcttggattataggtgtgagcctccatgcctggccttatttttgagttttatgagttctgtgtatattctgaatacaaatcctttatcagataagtgtttttcaaatattttctcccagtctgtggcttgactttttattatgttaatagtgtcttttaatgaaatcatatcttttgcagtaacacagatagaattggaggccattgtcttaagtgaaacaactcagacacagaacaacaaatatagcatgtcttcacttgtaagagggagataaataaactatgcatgcacatgtgagcagagtgtggaatgatggacagtggagactcagagaggtcaaggggaatgggtgataggaggctgctcgatgggtacaatgttcattgctccagtgatggctgcactgaagaccctgacatcaccacaatgcagtatatcaatgtagcaaaattgcatttctaccccatgcatatctacaaataaaaaagtgtgttttgtggagcataagttctgaattttaataaagtccaactgatcaattgttttacttcatagattgtgtttttgggtgtgttgtatcaaaaacctcatcaccaaacccaaggtcaccaagattgtctcctgtgttttattgtagaagttttgtagtttagtgtttgatatttagatctatgatctattttgagttaatttttgtggaaggtgtaaagtctatgtctaggttcttttttttttcaatattgatgtccagttgttcaagcaccatttgttgtcaagactgttctttttttattgcattgcctttgctccattgtcaaaactcagttggctgtatttgagtctattttgaggctttctattctgtttcattgatctttgtgtctattatttccccaataccatgctgtcttgattactatagctttatagtaagtctcaaaattggttaatgtgagtcccccaactttcttcttcttcagtaatgttttgggtcccttatgtcttttgcttttccatacacattttagaataagttgctgatatctgcaaattagcttcctgggatttggatgggtattgtattgaatctatagattttaagttggggacaattgacatcttaacaatattgaagcttctaatccatgaacatgaaataactctttatttatttagatcttccttgatttcttgtgtcagtggtctatagttttcttagttttctacatacagatcctatacatattttgttagatttatacctaagcatgtaatttttttgtgtgctactgaaaacgatatatttttaaaaatttcaagtctcaattgtttattgcaaatacataggacatcagatgacttttgcatattaaccttgtattctgcaaccattctattatgtttattaattacaggagttttttgtcgatgattttggattttctacatagacaattatgtcatatgtgaataaagacaattttgttaattccttcctaatctgcacaccttttattttcttttcttgttttatcacactcactagaactccagtacaatgttgaataggaatggggggagaggaccttcttgtctgttacagatcttagtgggaaagcatccagctactcaccattaagtatgatattaacagtaatgtttttgtagatgctccctaccaagttcagaaaattcccctctattcctaatctgctgagaatttttataatgaatgggtattggattttgtaagatgcttcatctgcattaattgatatgatcaaatgatttttcttctctaggctattgatacggcagactacattgattttcaaatgttgaaccagccttgcataccttgaataaatcccacttggttgtggtatataattctttttacacattgttaggcttgctaattttttgagaaatctttgcatctatgatcatgagagatattggtcagttgttatattttcttgtaatatctttgtctggttttagtgttagggtaatgctgacctcatagaatgagttaggaagtattcattttgcttctatattctggaacagattgtggataattggtgtcatttctcccttaagtgtttggtacaattcaccagtgaaactctctgggtcttatactttcttttttgggggagattattaattactgattggatttctttaataagtagaggcctattcagattatctatttctccttgtgtgaatcttgatagtttgtatctttcacagaattggcccatttcatttagttatcaaatttgtgggcataaagttctttacagcattcatttattactgttttcacgttcccgtgatcaacagtgatgacactgcttacatttcttatattggttattagcgtcttctctctttttctgggctagcctggctatagtcttgtcaatattcttagtctttttttttttaaagcggcttttggttttattaatttttctctattgtttttctgttttacatttcattaatttatgctctgatttctattatttgtttgtttctgccttaggtttaaattgctcttcttttctagtttcttggggcagaagcttagtttattgatttttaagtttttcttgttttttaatgtacacattcaatgctataaaattctgtttaaacactgctttcaccgtattccactaattttgataggttgtattttcattttcactaagtttaaagtatttttaaatatttcttgagagttcttctttgacccatgtgctctttaaaagtgtattgttttatctccaaataattagatattttccacctatttttctcctgttgatttctggtttaattccattatgatctgaaagttttttgtcaattttaattcttttacatttgaggcagtttttctggtctggatgtgatctatcttgatgaccattacatgcaagcttgagaagaatgtgaattcttatgttattggatggctattttataaatgtcaatttataaatgttaagttgattgctaatgctgttcaggtcaactatatccttattgattttctgcctgcttgatccaccactgaaatagggggtttgtctgtttctcctttcagtttaatcagttttttggtaacagcttcattgagatataattcacatactatataattcatgcatttagagtatacaaatcaatggtttttagtctattcaagcagttgtgcagtcatcaccacaatcaactttagaaaactttcgtcacaccaaaaaggaactccgttccttttaacaatcatcccctagtccttccatccccttaccctgagccttaggcattcacttacctagtttccttttagatttgcctgttctggacattttgcacaaatgggatcacacaatacatggttatttgttactggcttcttttatttaacattatgctttcaagatccactttgtagcatgtattagaacttcttttatcactgaatgatatttcattgtttggatataccacattttgtttattcactctcagttgatggacacttaggttgtttccacctgctgctgtaaatattagtgtgcaagtttttgagaagactgatgtcttcgtttctcttgggtatatacctaggagtggacttgctgggtcaagtagtgactccatgtttaactgaggaactccctgcgtgttttccaaaaatggctgtaccattttatattcccaccagcaatgtatgaaggctctagtttctccaaatcctcaccaacacttgtcgttatctgtttttcttattatatacccacctggatcatcacatcccacagtggttttgagttctatcatttcttgcctctgtcagttttgacaccctgttgttagttgtatacctgtttaggatatttagatcatcttgaggaaccgacatctttatcattatgtaatgccctctttttgcctgataattttctttgttttgaagtcgtctttgtctgaagctaatataggcactccagctttcttttcattaacattagcatagtaattctttctctatccctttactttgaacctgtctgagcctttatatttaaagtggttttcttttagaaaacagatagtggagtattgtggatttttggtttgttttggtttgcttgcttgttttgcttatttgttttatccactccatctctgtcttttaattgatgtatttagaccattcacatttaaagtgattattgatatagttgggttaatatctactctctttatccctgtttttgtttttttggttttttttttgtttgtttgtttgtttgttttttgtttttgagagacagagtctcaccttgtcacccaggctggagtggtacagtggcacaatcttggctcactgcagcctccaccacccgggttcaggcaattctcatgcctcagccaccccaagtagctgggattacaggcacgtgccaccatgcctggctaatttttgtatttttagtagagacagggtttcaccatgttggccaggctagtctcaaactcctgacctcaagtgatccacccaccttggcctcccaaagtgctggggttacaggtgtgagccaccacacctggcctctttatcactgttttctatttgttatattcattttttgttcccttccccctatcttttttgttgcttttttactaaaaagaaaaatcaccagttgtaggttgcttcttaatttcagatttgttaaaatatgaaaaaagtttgttctagaatctataacatattgtcatagtaccctcctcatagagagattgtgaggcttaaataggacaatgcatcaaagtacttagcccagtatttggtttggcagtgagcactagatattaaccattaatataattactgtattagtgctgcccaaatacttcatggacctcacagctgatttagacaccccaattctatcactgcaccaaggctaagaataattaccctaaatacatagttctgactgcttttttgtggtcagttactgcaagtgtgttctctttgcatgtgtattctgtggtctgtagttaaatgcagaactctaaagtcagacatccatgtgtttgaatcccagacggtacttacagatatctgaacttaaagaggtttttaaatctctttcaatctcattttagtcacctgaaaatatttatactaataccttcctcacagaatgtggtcaggacctagcaggggcccaaatcatagatattattattgtcatcagttgtcctcatatctcttcctcttaacaaggtgctccctgtggctcagtctccctttttgagctggaaactctggggagaagtactttggacctgacgaaggcagaggctgcatataagaattaagcgttagcagggagaatgtcttgacctatggggaaagatctctgcaggtagagtttgcagtccctggcttgcagtgggaagggggatgtgctacatgctcacctgcctcatgtaagggctgccacttagccctgggtaggggtagcttttaggcaaaaagagattcctgagggatgaatgtaacaggggtggcatgacatgtgaccccttctcatacccatcatatcataaagcagtgactcctgaacgaggaccagccacttattcgtctcagtcctggctgtggtggggacctcagatagatgattgggctttgtctctacagttttctcttcaagactattcaagatactgctagttattcatcttcctttgtttcattattttcctcttatatttttgttatctgactctgcagtttgggtttaacgggaaggaaacactgcctctctcttcactccccagacacatttttaatgtctgaacatctaccaggctgggcctttggacccgaatgagcagggagaagcatatccacagaagaaccctgcggttcttggctctgcttcacagcagtggtgggtatgtcgagaggcacagaactcgagggttctgtataaacttcgggggtataaacctgtgcagacctcagcctgccatgagaggacatttctgtgcctgtcttagtgtccagcgatcaggggggctttgtggatgatttttctgagttaagattacagtcttcccagagattgggcattgcctgaccaaaagggctagaaataatattgccctcccagagtccaaggcttttttttttttttttttttttttttttgagacagagtcttgctctgtcgcccagcctggagtgcagtggcacaatgtcagctcactgcaagctccacctcccaggttcacgccattctcccgcgtcagcctcctgagtagctgggactacaggcacccgccaccacgcctggctaattttttgtgtttttttagtagagatggagtttcaccatgttagccaggatggtctcgatctcctgacctcgtaatccgcccgcctcagcctcctaaagtgctgagattacaggcatgagccaccgtgcccagccccagagtccaaggcttttaagagaatctaaaaccctttccctcaagaaagcccgttcactgtgccttatgatttagtgagaattctaatatactgatgtgagtttaaaataggtgtgtgtgtggttgaatagagcaattgtctggattacttaagccaagaaaaaggcaagatttagagaaaaatatttgagacctttataatatatgtttagggatctttcttatgattatgtattctagaaggtcccaggaactcttgtgccattgacctgggctggtgaggacataccaggacagtcccatgaaggtgtccaacctctcctgagtggccctccacatgaatcaggctgctatagaattgttccatctgatgttcctgcttgatcacagtgtagcgcaaccgtcagttctaggcactggcagcttctctttggattaaggtggcagggaagtagtatttcacaagtatcaactgtgcaaagaacagaggtgctaagctcagcctgtcaccttggcctcttgccatctggtcttctgcatttccataggacagacattctcaggcattgctgtccatcctgccaggtccctgtgaagcagggggagtgattttgctattggcaggagtctaaaaacctaacatttttttgtacaaagagaagcacatctcataaaacccaaattcacagtgaaaaattttcatttagtctatcttgctcagagatttgagccaccaaacacatggctggaaaaataagctgagaggggtgtaaggaacccagaagccccatttctcttcaagctcctcagcattctccagtggggaagcctttatcatctaatctcatgctgtgtatatacaacatggtatctggccattgctgcatgcagcaggccagattttgaaaagatctctatgggcatcagtgcttgcatcaaagctcccaagttctttttgtgtatttgtctaaattataaatcagtgttttagatggaagcaagattcagaggtataattaagccagcttggaaccagacacaggctgctttccccgtttgtaattagcaccccatcacagagggtaccaggtaccccggggaactcggctgagagagagtgaccccaccctttgccttctgttttctctttgtatatgactcttcatctttgattttctttttgatataagacatacaaatttccttacttttagatgcctgtgtcaaccaagggcctaaagttacagaggaaaggacttgctttataatgttacagggcaggaggattggggtgaggtttctccataaggtgaatgatcattttcccagtggcttatgggattttggagtgtgggtacagatgtaatgcttgcttagtctcgaaatgtttcgtttttattagtcttgtctccccaaccaaattgctagctagcccttggagatcagagaccatgacctcaccttctcttggatcctccaaggtacccagcttagggctgtgtccaagggaagccaacttcagagagatgaccacactcctctatgttggagaatgtcacgtgagagttgctttctagaacttcccaggaaacagtgtgcacagatgggcatgagctgccttgacactgcaatatacaggattctaaagtaaacatccctgtgaccagtaataagcaatttggtaactgtgacctggttgctttcatcctagtttcaaataattagatgattaagaaaaatgtgaaaggagattggagaaactgctgaggtcactgttgacactttgaatcaatgaggaaatcagaaggctgggttaccgtgagtatgtgctccccacctctactgtccgcccttaactgaaatcaagtgggtccttggattgatgggatttggtctgtgtagccttcatttgcttgttagccaagttcatggtttatacatctgtccccaccctcctctgtggctggccagagacgctaattcagtcatcacacatggtgctgttcctgagaaggatgcctgttcggagaaaaaaaaagccccttgaaggtctggctagagaaataggaggagtaaaagcatcctatactgaaatgagggaaaggagaaagagtagcactgagagtgtactgcagcggttaggtctgggaggggaaaaaaaaccggagagcaggcatttcacttggagaatctaaagaattgcagggtggtttctcttgctattgtttgaagggaagccagcagtcaagaaaattattggtcaaatttcacagaagaaggaacatgacacagaggattttagttttaatagctcagaatcaaatctgatgtttcaaggaaagtgaagagaacaattgactatcaaaagtactggagaatctgccactgagctcttcccaaaagcaagtgagggcaccagaggggtgggagtttctgtcctttgccataaggaaatagactgacttttttaaaccaacataccagagtttacacattcaaatgagtattgtcctctcctttaactgtccttttgggagacttcattctcagggcaaaaatactgcttttacattgaatacatctacatgcctctctaggtttttatttgactacatagtctcttttgtggctaataatcctgctttgggagtagatctgatttctgaaaatcattttgtatccaaaataatgtaagcctgtaaaggaaaaacctgatttttctgagttggctttgaaatgatggattctgaaattaattctacatgaggtccagaaatcacatgggcagagatttccgggctccccatggtaccttctggggagccagaagttcagccaagctgggtgattactcacctttgagtcagacactcctgggatgggatcctcccttcacatgtgggtcctaagccagttctttttaccttctgatcctcaattttctcacttaaaagctgggatagtaatagtatctacctcacgggattactgtgaatattaaatgaggtgatacttgggaaaacacataggaagggcttagtaattgcttattattattactgatcccttacattgccataatgtggagccaggtacatagtaggtaatcactgaatctttgtcaactagttgcagggttgttgctaaggatgtcaggttttgacttgaaagtacacctgtatttaaagagtggggtcatctgaggtaactccaagactagaaaaacatttctaatcctcaatcctgtaaaacacttcaaaatggcatttgttcacctctaagatctaccctagctctaatagtccatgaaatcatgatgctgaattacataaaacaaggggattaatgtgaacaataagaaaaaatgttgaccaatagcatggataattgaagaataaatggtcagaaccaggcaactctagaggaaaagcttagaggacagtttcgtggaattatcaactggagagactcctttgaggttgtttagaatgacgacatcattgtttaacttgagcatgggaaccatcaccaggaggaaacctacctgaaattctacactcagaagagttggcacttgggtagctgtgggacacggtggagaaagaaactacccaaagttggccaaagagcttgtcactgttctacaatgatctcaaattggtaaaggaggttttcacagcttttccaaaggtttgaaaaagaaaatagctactggtggctgtgaaaacactgcattggctgcaaaaatcagtgtgatctggtatcagaagcaaggtgttaaatattatccaaaaaatgcagacacaatatactcttcatggaaagccttggactaacaaaagagaaaaatggagatgagactattatatgataatcactgcctaacaactggcttcaataaggaggctccccatgctgttgtaaccacagaatacagagcatgaagaaatggacttaagttacagccaaagagatggaggatgagacctaaggaaaaagactttcttacccttcttgaagataaagcataagaatgaagatccctagagatggatgggagtcgctgtggaatctggcagtttgggcgttgacctgtccgatagcaaacccagagcaatggccccagggagtctgggagcctccaagaaagcagagacttcacccaagagtctcattcgaacaacctgactgaatctcagcctgcaacagatggagcaaaagttccatcttaggatgctggagactaaatgggttagaagtagagggggaagtgcacgaactcggctccaggaggaagagagcaaatggcccatggaagttttcctatctctggctccttggaaccatggagtcaacacgataaaattagcagagctaagtaggcagatttgtggggttggaggcataattggtcctgtttttctctagtcttgacctaactgaagttcactgggtatgtaatggaaaaaaaacaaccagcttgatataaaaatacaggaaatgcctgcaatcactgctgattacagtagcagctttccttctgttatttttgtgaaagagaaaaaaaaagggggggttattagggtgtttttttttccctttcctaaactttggaaacaacttgggctattagttctttttagggcattctttactctagctaaatgatgtcacttaatctttataaataaagtgggtggggggagacattcaaattcttatcataaataaaattcctgagtataaaatacatacaaatggttctaaatatggtttattggccctaagggcttgtgttttccgaattcccctaatttctaatctttctaggctgaacaggataaattgagtttttagtgtagtgcctcattttgcagtatggtttgcattagtgctaggagaggaacattgtttccagcaatttatctcccagaaaccatctctgcttagcaagtgaagaaatatttgcaaagagactctttcaactagtgattgagaaacacgcattgttccggcagcagagagacagtacgtagattctcactaaaatggagcttgtgaggaacactccacccagtgtgttagtatcactacttatatcttaattttggcttcaggattctcaactcccgttgctagaatttagatagaactgttgaagtctgtaatgataatgtgtcttttaaaatgtcaccttggaatttgttggattctcctggcttttagttggcgggtaccctgggagtttgtagctgggaggctccttgggcaccttttggagatgctatgctttgtctgttaagccctggggctcctttgttcataagttttcaaaagatgctgtcattctgggacttagaaaactcttctccccaacatgaagctcagataaaaaatagaatttggtttttaagcagtagcattgctaagaggaaacgcactgacctcatgttcagacactcatcaaccatagtctcttcacctccccagtgaaaagtggttcttgatgttcctctagcataatggttctcaaccactagtggttattttacctccagggaagatttggcaatgtctagagacatttttggttgctgaaacttggggatgggggccaggagagtgctgctggcatctagtgggtagaggccaaggatactggtaaacattctgcaatgcacaggacggtcctcacaacaaagatttatccagcctaacatgtcagtagtgcccaggctggaaaacccgctctagatgcaaagttctctgctcatgtgactctgaaggtttgggggtagctgtgagctaacaggtctcttgttttggctagtaagatttatacagattttgccatggtgtttaggtagagtacagccatatttgcaggtttttcagaccctggagaaatcagatgtagatgatgtaggcttttttaactcttctgaagataggagaaggcataaggggagagacttccatttgtcatttcacttcctttctctactcaacacgtttttgtaacttctcagattgtattgacctttctttcaaaggatgccacccatgtttcaaaaaccagaggcttgtcttcttttcctgtcaacgttaagtcaagaagtatatttaatctatccatactgtaaaaactagaatagtctgaatagaatcctgccttcttaccgatgtattaatatcagttttccaccactcacagctgttacgtttgttcaccatgaatctgtggcacttgacctacatgatcaggaagatgatttttaaaaacctaactcagtcaaagctgtaaaatttattgtctaagaaagcataggagccttttggactacttggattcattcccaaagtaaaaccctttcttttgagataaattgtgtttcaaccaaaccaaactttttaaaatgtcactttaccatcacagctccatctaaccagagtatcttcacccaccctttcagcaacttttatggggatgtttatgccaataatgctttggcattcttggggttaataagcttaagaatgcacaggcagacaattttcatttccaccttggtgcacccgttgtaaagtaggcgttgtattgtttatggcctcttggggccagactgccttgaatgttttatggcatgagatcagtccccatgatctgaggtgggccccaccctgcacactgagagatgtcccctggttctgttctctctgacaccaaggtgcctggcacagtcattgcctgtctttgacatacaggtacctgcaactccctgcccagtctgtacagcatcacacagtggactctgagatattatagaggggcccatagggaatttacaggacccggcatggtgctgggcttgtaaaagatggctaaaagatattgaccaattggtggatgggaattctgggttgatggtcaggctcaccaaattcaatgcaaagatcataaacgctaggctttcagcacgtgtcagtgagcacatttgaactgacaacagacaggtgtgccagccctaaatgcatacctgcagggcctcgtacacctaaacatgtactaaactgatgctcatgaatgctgtggacaggagtcaagatctgatcatggagaaaagacagcactgttctttcttgccagtcagctcactcagctggatttacagggaacttaaaaggagtaaatcaggccaagggaaatcatttacattcaccagtattcttctctttttttcaccctttttccctccttccctccttttttcccattgagatataataggcctacagtcgagtgcacagttcttagatattaatgaatttttacatgaatacacacctatgtaacccaaacgaagatacagcatattcccagcacgaggcaggcttccttaggctccttccagtcagtgctccccactgcccggagaggtagccaccattctgccaataggttagttttgtatttaggtctctttatttgtgttttttgtttgtttgtttttgtttttgttttgtttttttgagacggagtcttgttctgtcatccagggtggagtgcagtggcgtgatcttggctcactgcaacctctgcctcctggattcaagtgattctcctgctcagcctcctgagaagctgggattacaggtgcatgccactatgcccagctaatttttgtatttttagtagacggggtttcgccatgttggccagctggtctcaaactcctgacctcaagtgatccatccaccttggcctcccagagtgctgggattacaggcatgagtcactgcacccagcccacttataggtctctttaaaactgaccttagtgatgaaatatgtaaatagtcctcactgggcgaggttacatccctctgaccttacccaggtttgggttgatagatgaagttcctcgcttttatgaagaataataattattattgaggggttaaattgggcctgacagtaagtgttttctgtacattctttcatttaaccactgggaagatagctgcaaggtagatagcattgtccccattttacaggtgaagaaactgaggcttcaagttttaacatgaagcaaaaaggtccaatggtcaggaagtgggggcgcagtgttgaaacctggctttttctggcacaacagtctgggtttttttttttttttttttttttagcagtacaccaaccagcactagtcaccattataatcaggagagtcctggtgaagccaaattattttttatgtaaaactgagttatttcctccctggtaaaatctgaggaaagatcctagaaagctttaccagatcaccttggtcattgtggcaatattactgcccaggggccatggtttctgaaatctgtctctgaaatgtatgtttaaactttaagaggaaagttgactgaagttcactagcaaaaaaaaaaaaaaaaaatgtgcaaatacaaggaaaggaaaagctttacaaaggaaaacacttgcctttttttttttttttttttttttttttttggtctacacacagcttaaaggaaactcagagtaaagagataagcaaagcacatgctttaatatcttaaactattccctgcaattgtggggcagtagctgacaagtagtgaggctgaaatgaggatcatttgggggaagtcaaatgcaagggattacttttaatgaggggatggatgatttgtcgtgtttactcttagaatctttgagatcacatagaacaaaagcaaactttatgggtttctttcttcctttctttctttttgaagacagagtctcgctctgtcgcccaggctggagtgcagtggcatgatctgagctcactgcaatctccgcttcccaggttcaagcaattctcatgccccaacctcccaggtaactggaactacaggcgtgcaccaccatgcccaactaatttttgtattagtagagatagggttttgccatgttgaccaggctggtatcaaactcctgacctccagtgaccgacctgcctcagcctcccaaagtgctgggattataggcatgagccactgtgccctgccaagttttatgttgtatctatgtcttcttcagctctcagaagtttggtggtaaggatttgtaccattccaactgcaaagaaataaagttgcctacaatgaatgaagaagcaaatgtttacaaggcatgcactgattgacaggggtgctaactcaaggcagtgctgagtgccagcagttggcatgtgtcaaacaatttcaccaagccatcctgggttgaaaagtgattttaaaatgtttgctttttaataaagagatatggctgggtatggtggctcacacctgtaatctcagcactttgggaggccaaggtgggcggatcactggaggtcaggagttcaagaccagcctggccaacatggtgaaaccccatctctactaaaaatacaagaattagccaggtgtggtggtgcatgcctgtaatcccagatacttgggaggctgcggcaggagaatcacttgaacccaggaggtgtaggttgcagtgatccaagatcgcaccactgcactccagcctgggcaacagagcgagactgcatctcaaacaaaaaagaaagagagatactagtgttgagtagctgacactattcctatttctaattttaatcgtgttgctgccttccgagatgtaataaggaatatgaatagatggcaatctatagagaattttctcttaatgaatggttcaattttatccactgatactaatataaataagaatcacctcctctgtgaaacctcgtttcatgagtttccttgatactgccctatcactttgtgttcattccccagttagagaccccctccttctgttaaaaatgaccacataatccatggctctgcatttatgttcacacttgtgggcagaggaaagggatcatattctttgtacccaacacttcactcatcgatctacttgtgacaaactacaaactctttgaagactgggctcattcccagtcttctatctctctgatcttctaatatatccagcaaagatccttagtcactgtggggaatgataaggatgatggtgctgtatggttataaaatatcacgtgccccaaaataactaaaaatatttctccactagcaacctccacttaatcgatgaatatggtaagtcttgaaaggaaatttttagacacatttaaatcttagctggaaaaagggatggcctatctcaaagtggcacaaataaagagactttggtatttatttgcaatggtgtcttgccttgttcagccactgattgcccagtactttctccctgtagccatttctcaaattcttctttactgccatgcttagttatatgtctgcatgtaagctttagaaaattggaatctaattgatttacagttacacttctctaaatattagtagagaagtctttgggaagagcatttgggaaaatgaattgatggtcagtactatagttcatccagtctgtagagctcagtaatacaaactgataggaagggaaaataggcgtcatccccggtatgtggttgacaaggaggactgtttggttgctgatgtactgtgcctctctagaaactcctttgtacccagccaataacagtgactttggggggacattttaggtaacagtgactggatttaaaataaaagtttgaatttgtgggagtcaatttatctgaaaaagagaaatattttctcaagtcggtatattggacaagaggtggctgttacatgcaggccttaagaagaggctgggggaggatggtcggtttcctagatatggttaaccatacatcatcaggagagaaatgaactggtcattgacttcatctagccaaattcaactgactgatggaatttttccacttttcagtgtctttgaataattttcttctcttaaattcatgcatgccaataaatacaggcataaatataccttcacagtatatacagacacttagtaggtacataagtgagaattctgagaaaaatcagtgttctgcctatgacaatgagtcattcttaattcatattagaattaaataagcatgaaaatcaaagtccattgcatacatgattactgccagagcagaatggagtgtgaatcaaaatccagttgtacgtgtcttcgttctgagtgaagtacctgtttaaaatgattaaaagtgatttaagacaagttaatctgctccaacagcatggcagatgtaagcagcaggcttggaccgccaagccagagccctaatactccaacaggtcagttcttgccgagtgggctcaggcagtgttgttttaccagcctggcatccaagctctggcacaggtaatgctgtttccagaagaaaagtacttattggatgtttctttggtaaatactccaaagtgcctgttgtcttagaagcagattccattcaacccacagagatctctctgggtctcttcttaacccctctgttcattcttaaccatcagatatttactaagggcctattacatctcaggcactgtgcagcgtgctggggggatacagtggtaaacaagactcagttcctttgtcccctctttgtagacctcgctgcctattgggggcattcacattttcttgtaatatatactacaccagaggaggtatagtgccttggaccccttaggaggggcactgaacccccacatggactcccatgggggagtccatgaattcttcttacagaaagtgatgggagttggccagagaaggcattggcggatgctgttacagacagaggaaacagttcatgcaaaagcctgaaagtgaacacttaataggcatagcttttatttgatatttactcataattaaatatatatttcccatttgaatatcagattaaaaggcttttcctggtggtaattcttttttagctttcttgtgtctccccataggacctaacacagaaccgggtctatggtaagggattgacaactgtgaatttcctcctcccttcccttgagcagtcccatgggagggtgaatgctaccgtcacagcccttactgggagctgatgagtgagggctacaaagagcatggagccagtagatgctggaggcaggacaagcatgagatgaggaaaggctacagacagcaaagacccacttcagcggtttacagttttcttaagacccaacgttaacagacttgtcctaggtgagctcctttgaaatatgggtgttgttgagcttaaaaatctagagtcagtgagtgctattttaagcctccagacccttggcctaggagttcaggggcaaatgcagaaaaaggaaagcttgagagccagaaagcccacagatttgggccttcctggttagctctaggggaattctagatgcttcagtgtccattctatgtttagcttccaggtttgttcagttcaaaattgttgacccttgcccttaaacaatttatcattgatattttcttcacgtcactaaaatcctggattcttaggatctttttaatacagtgtcccgcacagtgagtgctccaggttttagtaatatgtttgatgtgttcttttattttgaagctggagtagaaacagctgtatagacttgtttatatatataaaagagagagcacgccctaaaccagcatctgatcctaacctctcagcttccagatgttcacagtcatggcaatattcatccagtagctaatttttgccccagccttctcttagggcatagaagcccactgcatttgtaatgctggtcatattgcacttgattacttttcacagtattggtctctgctatcaaccagtgctgtgcacttgtggggaacgtatgatggccagcagggcctctccacactgacttggatcttgagatagttctgagttggtaaatctttgacagtgagtggctgtcactgtgggcagcctgttaccattgaggatcaaggggtagactgtcctggaacttgggagtttggtcagagttctcagtagtatgcatagctctgcctaacttgcatggataaagaatttgctggaaagacatgagacagctcacagatacagtaggcaaactggaaaatcaatgggaaaatggacagggactggggctggaccacagctgtgtttctcagacatggccgtgggaaaacacagtgggtcagctcacagccagtttgccttcatgccactgcctcaaaagtcacaggagtatcaggaaggccaagccttggtgttccatgttcacacactgaggtacgccctttgtggcagacagagtctgctacagtgggcagtaaagataaaatgaaagcaagcaggtacagacaccaggttacaattcctggacaaattattccaatgatatcctctttctattccttacctggttccccctctagtttttgttattgtcatttgccattgtgttgttcccttccagcatcacttgtaatgtcatcagtcaacaaaaaaaaaagagtagatattcgaatctgtttacatgacagtgatttttttagtatgtgagaaaggggtaatgaactcatggtttaaatggtcaagtttggaaactgctcatgaagagcaattggagctaacatttgttaagcacccactctgtgccaggaactggtataaaccctttccatattacctcatttaggcatcacagtaagcctttgaaatgagtactgttatccccattttatgggttaggaacctgaacctaagtgagactaagacattgtattcacatagtgttaatactaaatcagagtaatcttcagacttaggcctgggagacgtcacgttctcctgctcaatctcaggcatctctgtcttgctattccttaagtagcatcataggagctccctgttttggtaaacgttccctaatctttatgtcttcgatcttttaatcagttttccagtggccccaaagatagatctgtggttgaccattaaaaataaggttgataagccaatgaagtgtcatcactgagaagtcagggctggataaccacacacctaaagaccttctgcactggaaatgttggtgatcctggggagagaccaccagagagtgaccaggcagtcagtatttctggtcctgctcgtgggcacttgactctggagcaggtgctttgaacttgaggaaaatatggatgccatagcagatgtgggtccttcttggaggagctcagggcttctcaggacctcctccaccacctagcctagacactgggtggttaagagtttgcctctgagtttcaaatcttagtttcccactcctatactagctgtgggcccctgagcaagacgtgcaccctctctaggtctcagatttgtcatctttaaaatgggagtgatgatagtacccatttcagagtttgggggagaattcgaggagctcctccacatgaggcgcactagtaaaggctcatcagcaccgtcagtgagcacagggtcttcatggttttctccttgtttcacatgtggatggcagaagccaagtctcagaatgatacctcccatccaaggaaggtgggggcccatggcaggtgctcagtacgtagctgttgatgagtggaaaagaaacaagggcatggaccagagttaatctcagcatgtacgttcacagcacttttactcctcaacgttattttattttttttatatgtgttgattgtcgctttccacactaggatataaatgccaagaggacagggaacgtgtttccatagtgccaagaacagcgcatgtcacgtggtagtcactccatgaatatttgaatacatgagtgtatgggtttttttctatgaaaaggagcaagctgatgaggagcctgtgggcagcctctgccctggaacctcctgagccctgggctgactgtctcattcttccatcgggcactccaggcagcctcgtgttcatgctggctgaaggctgcccacaggaagctgcctgtgcctgttccttgccccagcaaactacagggcccagggcagagccttgcagattggaagctgctgagttatgttgtaagactcgctgggaaatgctgccattccgatttattattttaattgttttatagtttatacttatgccctgcagtgattttccattaaatcagaacacttatgttttcaaaaaagagcaggtatggttgtgggtgtatatcttaacagctaatctctggcaataaaagctgtttgacagtcatcaacagattaggaaattagtatttgtttaattaacctcccttagggactattagcacatgaaaatagcgagttttttttaacctgataagatgacagattttgttcttgtgtattcttaaggtttcaggtataattgtttttgtggttgttttcatttttattagcataaaccattgggttggtaaaaataattacaaaattggaaagagacaaataacacaaagtataatctaataagttacaattaaacttttattaattttatgtcatatttacactatatgtatatattataccacataaaatataaatatgcatacatgaatatactattacatatattaatcatactgtatactttatcatacatactttgttatacattatatatactttgttatatataagtatatagtatgattaatataacatgacatagatatatagaaacgttgagagttacatgttgtctgcgtacagtctcacaacacatgttaattatctttttagttttcactgaagtttcaatttttgtcatagcacttgctaaaataaatttttaagtcatgatttctttatttcagaatagactgcttaaaggatttatttgtcatagatctgaaccaccaacaaattccacattcctttcttcagtttgttcaaagcacttgctttctggctgagaaatattccttccgcagacctcattgctctgtttccacttggtctggctcatttgctggccagctaacctacccacacgtagcttcattagaaaacacattaagatatgtcctgtacacaggtagaaagtgctgcttgttttggacccttagagtagcttgagaagagtaaaactgcaaatgccaaatgtgggtctgctgtacttcgtgtgcgcacccttgtgccatcaggatacttccatgacctgaatcataattgagagacttttgcttaaaaactgggggtcactttttcccaaagcagagataggttatcctttttgagcacctgtcttccttgaatgtaacttactaatatttcatccacatctatggccaaacaacctgctctagtgtgaggataaatccggctggtgaccaccagcaaagtcagggattgaacagcactctgaattttagctgaatggcctcaggaaaatccaaatcttgctccaagtagagtctttgggttaaagaaggtaaaaggaagcagttggctggggatggagtcagaggcaggggtgaggctgtggccttcaggagggccctggagagggaactctagactcttcctgccaggatttgagaagtggtcttgaagctgtgccccatgccttatcacctctgctgactctcctggatcttctgatacatctctgcaagttccctgggggaagttacatatcaagccataagggtccaccttagctcaatgacactgagcagatttgcaagtagttcagaagggatcacagtttagggaagggtgatttttaaaaaggaggaagtaaagaaatgtccagagtatgggcaccccttctgatgggcctggtggagtggggaggaaagagagggcccaggaacactgagctgatttgggctgggtcaccattgccccaactaacctgctcctcagggacagcctaggattggcaaaggagaagctgctggatccttcttggttggaagactggaaggcatgtggagaacatggaactctggtgggttttctctgaatagggttcttcccacatgcagactctactgccttgaaaaagggcatgtctcccagtgtcactccaagagttattgcttgctttctttttttccccaagtggaattctggaactctccttctttcccattggcaggtttgaggtttacagttactttctttactaaagctattcactgggcagaccctgatacacaatgcctctattagtctggaaagtcttttctcaaaagatacaaccaattattatttttattattattatttattatttctaaatcagagtctcaaagcataaaaagaaaaaataaacaaatataagtaagggcacgtgactttatctgcctgggcctcagctggataaaaagacctctgaaccacccaagttcagagcccttcactgactgaccacgctctttgtttgagattctctttttgggtttcccaaacaccaaagtcctcggtggttgctctgtctcaagtcccaaccatcaagcgttgtgcttgcttacagatcatttccagccttcttctcttgtcacactgtatgtgatccttttctcaaaaaatctcacccacattcattcttttcctccagcccaaaccttcacatatcacacctagtcagcatgtccagtgaggtgcttccaagggaccaataatgttcagcatgcacgagctgaactgctgctatcctcctgcctccctccaaagcctgggccttcctggtatgtcataagtgctcagtagatgtccatcacatggagaaatggaggctgtctttatctctaatcacctttgattttgtaaactctaccagattatgtcctccctgatgaagaggaggactcttcttaaccggcctcattcgcctgagcctgtgcagcctcgttgtccatcaaaccacaggtctaggcccataacagggcataagcacagccctgtaccccttcttattggcatatatgcatatatgcacacgtgcgcgcacaaacacatttcttagccgttggaaagcaccgcatggtcttaaagcaaataccttccatggccaaattaaacaaatacaaatgtaagacttcttttttaagaataataaaatctgttttctgtcccttcagaggtcagtccattttcagcctcctaaccttgaatgaggcctctgatatcctccaagtaacttgggtgacccccactttgcaggaagacgtgccttccctacatccccgtcaaattgtgtggagttacatttgtgtttcctcagctctttatctgggctggggtgacctaaaaggggctaaccaatctcctagcacgtggctccttatgtggctggacatggaagacatacgcctactagttttggcagcttctggtcctgacaaaggagcttgaagtgcggttttctggccttcctgtccgggaattctggacccggtattgggttctacggtccacttccgccaggctccaagaacgcccccagaaaggttactcttggtcctttagctggagtggccctttctgtgatgacagagtgctggctggacttggagctacaaatcactgggcccaaaagaggtgaaaccagcaatccttgccttctaaggcagtgatgatgtcctgtttctccctctggttttagaacttgccatcctagtactctggcctcatgtccatctctccttctagaccctagacctctccttgaaaacagggattgtgtctttcttccctctccctatcctgaaacagactctaagtagaaactcaataactattatagaattattacatagtaggggcaagtagtcaatgaatatatcagtgattgtaatcatgctgccaatttgatggacgctaaaatggacttcatagagaccctgcccatcatttcgttctgacattcagtgaacattgaatactgggtactttgcagggccctgaggaccaatcatcatttcgttctgacattcagtgaacattgaatactgggtactttgcagggccctgaggaccaatctgtgaacacgaaggcaccatgtctgttctcctggagttcatgtgaggaaaccaataatgctcaaggcaataagcaaaataatgacaagttgtcattgttgtagaggagctgaccaaagtgctgtgactgacattaaaggaagggttgggggtggtagtgaggggctgcttcaggtaaagtggccaagagaggcatctttgggataaaggcagagacctcacaacaagagggtgttgcttggttctcttcctgagtataatagggagaatgggttggagagtgcaagagaatgttggattcagctgcctctgatggttttggccttagttttaataattttcaataaaaatgttttactcattccatacattatctggaaatgtgtgttcacatcatctggctgcttggggccacgatctgtgaattcacttttctgctcttattccttcatccatttgaccagtaggtattgagacactgggatgcatcagacactgtgggaacttggagaccctgccctcatggaatggtcccttgtggaggatagacactcatagtggaacaggagacagggaccatctgaaggttcctctggccttctagccttttccatcatcatacactctcctgatccaaactggatggatgaggctagaaggccatgggggaccacaaagggcctctcacaccatgctaacaaccctgcttctggggtgccattgaagaatgcaagcagcaggggagcatcatctgatttacatttcgtgtaaaaatgcctgctggcaaaggtttgctccaaagtggaaagggaaaacatttggtgtgcaacagccaggactgcaagttcaagcaagttctttcacgggctccagctgccttcgcttcctggatcttagactggaaaggcccttggggattaactcatccagccgtcttatctcatatttgaggacagtaatgctcagaaaagtgacttgcttgtggtcactctgtcctgggctttgcccaaacagctgttttgatgaccaagttgattggcctggagagagataggggaactaggtgtaagtgtcacgacggatcgtcaggctagctcacccacatgctggaaacacaaggcaatgcctgcttcccctcagcagggatcaggattttatccatgaatattaaggataagaatgtactttcattattgtgggttaaaaaaagtaattggatgatcatgcaatcagataagcaattctgtagtgattccaaggcttaatgcccaggtacagccacaggctgtttattattattttttctattggcgggatcaaccaggtaccaggctatttattttggcttcaaaccgagatgttgtttgacacctcaggcttccagctgtcagtgtagtgtctaaaagtcttctctctccagttgagaggacatctatttgatcaaaatagcattgtctggcttatctgttacatcttataagcatgtttccatgagttagaaacaaccaccaccccaacaactacaactgtgttctctatcccatgaaagggcgggcgtgtggacacgatgtatatttttttctcctcaaacaacacagtgaagtgattcagagcatggaagtggggtcaggcagggtggactctgttgctcactcaccacctgtgtgtcctgggccagtcaagtaacccctcaaactctttttcctcatctagcaggtagggataataacagtcttaccagattcacagagcacttgtgggattaaatgaagtaagagatagaaaagatttaacactgagcttgggatacaaaagcatttggaagaagaaaagtagttaattgtgttgctcctaaatgattgaattttcctatgcaaagacttggagagattttccctggagattggcccagaatgaaatattatctttgactctcggttatcagcactgcaatggagaacttgaaaaaaatttaccttgggttcagaaacaaattatgctttttttttttttttttttttttttttaatgtaggggaagtagacacactttgcttgtctttgtgtttggcctctggtggtctttgagggacttgcttcctgagagtgatgggaggtgcctatgtagagaatgtcaggaagagggtgcctgccagtcatcaacatttgccacaatgttgatctggaaaaaacgtctttctctcaagtgtattgttaaatttatgaaggtgctggtaccatctgccagaagaaccaatattcccatctgattgaccacagtcattctcaagtctccactatttgtcccaaaacaagcaggatttcttcataatctccctcgagggcctgctctaggacatgaagtaatttttctaatctcttatcttcaagtaactggaggaatttgctgttatttctgcagcactcaggcctgagctttgtggaatttgcatgccagggaagtgagggcattggaaaacgagcgaagaataaaggagcattacagggctcttctgtggtgaattttcaagtcaagcataaaagaattgtttcctattctttctgatatgttaagggcctcacgcgtgctaacgctttgctagatgctgtatggtttacagaaggagagttttctggctgttattcttagggaatctaccatcaatatagaaaaatacaattttccaaatgggaaatgataaattcagatgagatagctgaggtgcagggtaaagaaaacaggattccaccaaacatctacagttcaggtcccagtcacctccctagccttgtttactcacccccaccccaccttaagttctttatctgcaaacctatgatgatacccgctgcccagggctgttgtgggaaggaaaggaatactgtctgtgatagcacacagtggcagccagtcctgagaagttgaagggtctggaagctgtcgcatgaatcctgttgatcaacatctgcacagcctcacccctacctgtgagccccactgtctttgctttcttccctgggaactttgtgtttccgtgcacagtgtcactccccagtcccggggaaaggaatcttgactttctcaccgggctatgctaaaagtctcagtcagtctcatctctgttccacatcatttgtccctttcccctaagttacagttgcatatacttcatatgtttcatcccacagcatctatctcagtgctttatacacataaaagaccttaagtatttttcaaaaataaaaggagttttagggatttagtgacttgcactggcagggaatgtgtattttaagaaatgagtgttagagacccctggaggaggcagaatttctgggatatcatggatcaggcactgtgctagcactttcgcagaggttacatcattccatcctggcaatcctatccccagttaacagataagaaaactgagtcttaaagatatgttggaccagcccaaccttatccagctggtaagtggcagagttgggatatagattcagaactgcctcacttcttgtctgacatcgggaagagaaaatatggggacccacccaacatctcagatcacatgtaggcacaaacaacttcttatacataaattactatacacagaattagatacatgcatagccaaacctgggaggcaattcttagaagccaaaatatgtgtttcaaattattctagacacattgctagagacatgaacagtcagtttgtttgctgggcacggtggctcatgcctgtaatcctagcacttcgggaggccaaggcgggtggatcatttgaggtcaggagttcgagaccagcctgaccaacatggtgaaaccctgtctctactaaaattacaaaaaaaaaaaaaaaaagatctggacagtagtggtgcatgcctgtaatcccagcaactcaggaggctgaggcaggagaatcgcttgatcctgggaggcagagggtgcaccgagatagtgccactgcactctagtctggacaacagagtgagaccctgtctcaaaaaaaaaaaaaaagtcagtttcttgtcaagttagaagtagaatttgacctaccactggtctcatcccatctccagcataccagcatatatcttgatacgacatcttctttgcataccagttctccctcagtcttagaccatttcttccccaccttgcagcaaaatcacattagggatctgtttgtactcactgatgcttttccattttcctaccctaataaattagttagtatagttagtcttagaagtcaaactttttgtttttcccctgagactattactgctaggacttatttctttcctgctcagataggttttatagaatattttaaaagtacattgtttagggaatttcctttcttgtcatgttgtgattttctggaagagatcttcactcctaccgcaggagagccttcattgtgccatcctgccttgaagtgggtctgccctggtagagtctgtgatcccttgtgctccatgttctcctcaccacaaagatttcttttcccagcccagaggaattttagtccaagcatcaaatagagatttccaactcatacgtctgtcattttatctaataggtggtcacgggcagttatgtagggtcagcccacgctgcctcttaccagccatgtgacctcagacaagttaccttttctgagcctcagtttcctcatacatttaaacatgtgggttgaggatgccaattagcagggttggtagagtcaggattcccatctcctaggaataaaatggcagaggatgtaccaggcgaatgcaccctttccttatagccaggatgtgctttccaaatctctgtctggcttagtgatccgggccaggccgtgttagagccctgatcactgcttaagactcagattagagcagtggtcgtcaaccagagggcctgcaagggacacttagcaatgtctggagacacagttggttgtcacagctggagagggggcatactaatagcacctaatgcatctaatgcataacatctcatagcatctaatgcgtagagaccagggtgctagtaaacatcctgtagtacacagcacagccccccacaacacaggattatccagtcccaaatgtcaatctcgtcccagcatgccaaggttaagacacactggactcaagggaagctgaagagcctggttcttatcaccttcctatagcccacatcccagttggctcttggcactgggggaggaagtggggttccatggaagttctcgtaagtcttcagtcgagtggagagtaaagtagccatctatccaggtgtcaggcaacaagggctatcgcaaaggcattcaggctgagggggaaatgctaggagtggccctcctaaaatcagggaccaccaaagatgctatcaccattattacttagcattgttcttgaggttgcagtcaacacaatcagacacaagaaatgaattagaagtataaatactaaaaaggaagaggtaaattaatcattaatagcagacaatttgaaaaatccaggagaatcaactggaaaactgttacaaaaatagagggttcggtataatggcagggcacagaatgataaacataaatcaatacctagcctatacatgtgtgagcagatagaagatataacggaagaaagcccccatttaccagaagaatttaaaatataaaataatagcctggattattttgaagtggattccattgcaattaacacataaacccaaaacaactgtgctctaaataagatacaagtttctttctttttcatatgaaagttatctgaaggctgatggtccagttaccattcctaggacttagtccttgtctttatggttgtaggtggctgctactactttaggcattatgtcctcattcatgcaatatacagaatatatagaggaacatatatatatatatgcgtatatatatgtgtgtgtatatatatacatatatacatatacatatatatctagagagagagagagagaatatatagaaggaggaaagaaaaagaagagtaaggctcttccttttaaggagacttccacatatctgattgcctagaacctagtcacataactacaccctgctccaagggcagcttttaattctagttcatggctgcgtagctatgtgcctggcttaaaaaatagaaagtaaatgttctcttacaaaggaagaaagtgagaatagatattgggacaaccagaaatctgccataaaatgtcataagaaatttataagatctatatgagagaattttaaaatgctcctaagggacacagatgacatgaaaatggaaagacacaaagtattattggataagaagggaagactcaacatcataaaaatatcaactctccctaagttaatttataactttaaacatattcacaataaagacatcaccaggattgttttttaactagacaaatgattctaaagttcatatggaaaaataaacaggaatggccaggaaattttgaaaaataataatatgtagactggtactaccaagtgttaaaaggcattataaacctgcaataattaaaagagtgtggtatagagtgacgttatagaataaaagatacaggaaaaatccaagtgcacatgaggatttagtactagtatttgataaaggtggtatttcaatcagtgaggaaaagatgacctattcaacgtaagggactgggacaacttactaagtttctgaaaacaagtgaagttggatatggatcacacatcttttatcagaacaagtcccagatatatcagagacttacatttaccaaatgaaaacataaaagtactgggagaaaccctgggagaatacttttataactttgaaatgggtaaagcctttcaaattaagacataaaatccaaacccatgatataaaacatcagttcaattacataaaaataaataatattggcatgacaaaaccaccataagcaatgccaaaagtcaaacaaaaaactgggataagtatttgcaattcttatcttcctgtatgccctttcatgcatgaagtttgtttcctaatatagaatgagctcctaaaaatcgataaaaaacaaacaccacaaaagaaaaatgggcaacaattcatggaaaaaaatacagatctcttttgaatacatgaaaacatgctcgaacttacagagaaacttaataatataatgagatactgttttcacctatcaaactaccaaatcttgataatataccatgttgggaaagatatcggaagcaggcactgtcatatattgctgatggacgtataaattgttcttccaccaagaagggctgtttggcaacatccatcaaaattcacattcttgtagtacctgattcagaaatttcttttctaggaaatgtgtatagttaccctcacatatgtgcaaaatgtcctatgcagatggttatccacagcagcactgtttgtaatagcatatactagaagcaccctaaatgtcccccaataaatacagtggattattatatagccacaataaagaatcagaaggctctttaagtgccaagacagaaagagcttcaatatattttaagtgaaaaagataaagtctaaaaaaatgtgtatggtaagctcccatttagttaaatgaggggaaatgaacatataatcatattttcttatttatatgtaaagtatgatcaagagaatacacagggcatgaataaaaagaaatcgcctgtagagagagaaaagggtgactagggaatggatgcaggagggagaatttttactgcatgccctttcatactttttggttttttgaacacatgaaagtattacctattgaagaaaaattgaatgaaactttaaatagataaatgagtataggctagtcacattggctcacatattgggaaagaaattttgctggattttcccccctctattaaaaaaagacccccctccttaaaatatgtcccattcctcaaaagtaccctggccttgtatttgaggaccaagtacacagggactaatatctgggcagttgtccctctttgcaaagccgtcagtctccagcaagtttgatgagcacttgctacacgcctggccatgtcctgaacactgaacaccatgggaactctcaggagaatagacagcctgcccggttctgccctgccagcaggaccccaaagtaggcaaggctgggaaaccattattcccagtcctcctgcccagtaaggtctacaggtccctagcaaagaggcagcactgaaaacatacaggcaggagactcctggggcaggaatgaggagtggaaattcagaggtcctggggtagcagtgctggtaagaaaaccatgaaggaatctcttagggaaggactagctctttctcttcctaccaccttccacctccactgcatcctgcccctacacccacccctgagccatcatggccctgggcttccctgagctatcccatccactgaaaccctactcgtgaactgcttgccactgagagcccagtgccaggcaagtttagtcccagaggtgtgagctcttttgtttataatggaaccgaagacccccagagaaatagaaagtcctaacaatcgcccttctggctcccggaagtctttggacccactcttaactttttctgtcattaaggaaaggaacttaagtccctaactcttcctggacttggttttatatggacagttagagttttcaggaaatacagagggggaattggaggaagtgaccaggggcgggcttcaggcctcagtggcaagacagcaggaagaagcattttggtcagggcctcccccagtcatagccaagggcagctgctgcatgctgcctgcagaccatgcttggctgtggcagccaccctggaccacctttcccctggggagaagaaagggtagaaagcaaagggagggtgagcatctggggccagtgcaggggcaggcaaagaagagcaggagctggggagcagtgaggacttcctccttctttgccccacctgaggcaatcctgggcagaagaaaaggcggagccttgcagcctgagtcagaaaaggggcaaggttcaagctggcttggaatcttctgaatccattcaatttatacaaaattagaagaagtccttcctcagacataacaaaggctttaaaaagagtgcttaggaggtggcatttggggtattttataaagttgggcttggtggctggcattggaggaagtcaaccaatgtgaaggcaggagggcagaggagcgcagcacacagggataagcacactggcttgcagagcagatccaccaagccttcaccacctgtaatcacctaccttcttccagcttcctttgacgtatttctgtaagggtagttgccacatgtgctcctcctaactcacagagctatgcaatggaactgtttaatggaattcacagtgctgagcgtggatcatgaactgggaggtgcttcccacacataaagaagcatcattgttgttccttttccaattagtatcaccattgtgctgatcgtgtgtgtcatgggggttggcagcactggatactacaaaatagggatagaggggcatgtgactcagtggggccccagctgtcagcttctcaaggactcagacatttgcaagtgggcagatagttcacccagttcccttgaacttggttccttcatgaagaaagtgagtgtgacaatgttaaagaccttctactttcacgcacatctcattagtccttcaaataagcctacaagcaggagcgtgtcattctgattcaccagataaggtcacagaccagcaaggtgactttaccaggacaaggctacaaccagtgctacaaactcaggccctgggtcctggcccagtgtttgtctcactgctccatcacccacagccagagctgggccttgaccacacacagtggccagggtgggggtgggagaaccctggtcccaggggctcagcttggttgggctcactgttctttctgtagttcatgagcatttgcttacagcagcatattttatatgctcttttttctcaagaagtcccagctgtaagtggaaacggggtcgtggctacaatgcaggctggtcctaaagtgcttcctgccccacctttgcactcaggcctggatccctggcgatggccggagttcacatcttgacgccagcagacccctcctgctttctgtgtgcagacaaatgggccttctttgcaagacccttcaccctgcatcccagcatggctgttgcggggagcccaaggtggataccaccacccagtctgggttcttctaccgtgtcagggctgtgggttccaggcatggtggcaaggaatttttacccagaaccccaaagtgtaaaacaggccccaagggagctgcactgtttgagactggcatgcccctatggctcttgcttgctgcacagaaccacgtgggctctgtgggtccaggtgattataagcaatgtgccttccttgctgcctccagacctttcccccacccagcctgcttgcccctaggaaagtgatcttacaaatgcattgtgctcatgcaggcaggatgcttattgctgttagcatgcatttcaaattctttttcctagcattccaggctctttgagcaaaacattcctgtcttgcttcaccattcactagggcccaattctctggcctcctcactaccttttgcatcagctatattggccttctcctctctcccatcttctctcctcacagtgtatcgaacccttatcttctaaccatgtttctcttgaggggcgctgtttcctggaagccctcactgcctgcactagctgtttgtggtctcccgctctgatgcacattagctctcatagtgttctataaagtagtgcctgactcttaggtggttttaaccgtttcgttgatgtccctatgtgtcatgctgggaaccccagctgatccccatggttagttcatgagggacaggggtagatgcttctttctttcatagcaggatctcattaatatgaatgtgggtgcatagcagggcttctatatatacctactgacttagctctattaaaccacagcagtcttgatatattcctggggttacagaagttcctccctcttgctgaagaaagtggaggtgccgttaggggctgactaacatgagagagagcccctggactgagatgggtttcaagaaacacaagcttctttcaggacttttttgctggagatttccctaagataggcacatacctccaactcaggaagactatattggggtgagtgacgtattgacattatggtcctggcctatcttgcagggatttgaaactggacaacatccttctggatgcagaaggtcactgcaagctggctgacttcgggatgtgcaaggaagggattctgaatggtgtgacgaccaccacgttctgtgggactcctgactacatagctcctgaggtaagacctgtgtgcaaaggttcacctcctcctggtgccaggaccgaggcaggggtccaaacccatgcactggggtcatctagtggtgctgggggaaggctctggaaatccaggatggattctaggaaggagggagaaaaggaaaggaaaaaagtttgctgattgatgtctgtcaagaagtcctagtgttggggagatgatgagtgaaatgagagtaacaggctatttcccaaacccgggcaagttcacactgaacatctctttcccatcctagtccagaaccaccaataaatctaggaccaagaaaaacgtgttgacttttattattgttttcatgtctttaaaatcagaacagggtgggcacagtgactcacatctgtaatcccagcactttgggaggccaaggcaggtagatcgcttgagcccaggagttcaagaccagccggggcaacatggtgaaaccctgtctatataaaaaatacaaaaattagccaggcatagtggtgcaaacctgtagtcccagctacttgggaggctgaggtgaaaggatcaattgagcccagaaggttgaggctatagtgagccataattgcaccattgcactccagcctgggtgacagagcaagaccctgtctcaataaaaaaaaaagtaaaaaataaaatcagaataaaggagcatcattgatcatgggagcacttcactttatcagctacaatttgctaacagtaaaactaggaactgtttgctatttcctgcatagtggcagttctatgctgtgagtacacaggatggagcaggaagaggagagtgactgtgcctcattatatacagatatcagagatgttcactgtgaaccactccaataggttgcctttcctgaaagttgtttgggatgttttgctcagcatgaagtgtttgtttgccttattcctgcccaaactgagagataactagtgtgatgtgattcagatttaagacatggcctgtcatagacaatcaaaatgatcttcatggttctgagacatgtaagataggaaagaagtaccaatccccactaaacatcgcccatggcggataggtattagcacattcagagctcatttctttcagtgggcattgtttgagcacgtgctaggcacaaagcaatgtggagataaagaactgactgagacacttgtccctattctaaagaagcttttggtctaaagggagtgatagataagtaaacaactaattaagcagaataaataggcacataaaagaagatggtatcctcagggatcaggaaaggcttcttggagcacctggtggatgaattgagttgtaaagaatgaggatttcctttgacggaaggggtggggagggtattcctgaaaacaacaggattggaacgggggcaggacaggaaaggaggttcagtgtccctgggccctggatcctttgagggcagggtctgtgtttctaatctgggtactgccaggatccggcacacaaatcaggatcttagaaaggtttgttaaaaaatgacaacttatgacattccaacatgagcaaaggccaagggacaaaaacatcttggtcttttccaggacagttaaaaagtgtagctagatcatagggtttcctggtgctcatagtaatgaatgagattgggataaagacccagtgaatgtggctttgatcctgtaggatctgtggacccactcagggtttcagtggaggagagtcctagtcagatccatcccaggaagaaggaaggccacagctgtgcagatcagaaggcagggagtgagggactgatggtcaggaggcttcacagaccacacaagacaggggaggcctgaggaacatctcgaagtgaaggtgatgagtaataggtagtttccctttagaacctttatcttctaagagatctaaagagtagggatttcagtctttctgcaaatgtatttccttagcaagaacactaggaattcagccttcaaggagcaacaaatgaaagcaagagctttcgacagggaactgcttttctcgtgttcttcgttcattcttcattgtcagaatacttagttccagttcctctctaagttgatgccatcattcattcttcattgtcagaatactcagttccagttcctctgtaagttgatgccagagcctaacagttgacagcccatgttatagttaaggacccaacccaagacagaacattcactttataatgaacaaaatagccactcagctttcatgaaaagcagtccattggtgagactcacaatgaacaactctgatctctgttcacaatgaagcacagacactcttccttcctgctctggccttcgtgcccaccgtgcagaaacatctctgcactggcaatgacaatccctggtcttgctgtaggcaaattacagctgataaaggtattgctgccttcatcgagggctactgggaagattaaatgagattatgcctctaaagcattagcccagtgcccagcccacagggagtgctggctaaatggtggcttcatggttatcatcattgttgggttgtgtgatgggataggaaacgcaatcctgagaattgagtcttgagtccagatttgaccacaaatgtacacatgagcatttgatgacttgatgaagtcacaaaatgtttttgagtctcaggtttctcatctttcacatgggagccataactccttccctacctacctcatcaagctgctttgagaatctaatgagattagagcatggaaatgcttgagaaagcagaagcctccattcaaatgggagaggtggtaaggtgctgagctaacctcaaaaccagagacagctttggaggcatgaggtctgccccaaggcttatcttcctgccacatgatatgccccatggcaccccctctgctttcccactcccagcccctgcttcccaggaagtggccaccagcctttggtaatagcatcatcagggccaatgccttctcccttctcccttctcccgagctctgacgcacttgaggggttggctccaggtgacttcccgtgacatggaagccttgcccttctgcccagatccactgccgacagttaattaggaagcagataattagagccaagcctaaaaggaatcttacaaaagatgccacccaaaatgagaaggctgtggaaggggcctggagtggggtggcagggcggctctgtggtttccacagcaccatccagtctcagcacacacaagccaccttctccccaccccctgaaggcacagaacccagctgcctccttccgagaagctggagggcagccactgtagcacccagtgtgccctgaggctagaagagaagggagcatgcccagtagatacacacagtggccatgcatgctagccagtcacaagatgttgactgtctcctggatgatagaacaggctggccacagcactgggctcagtagcatgttacagctcctaccctctggtaccttatagttgcactggggagaccgctggccatgaaaaaataactaacgacgtagtggtatgtggaaagtgagaaagtgcctgcaactcgtaggaacaggcaggggtcttaagttgggcgctgtgtcttttgaggttgagggaggagttggcattggctttggagcatagcagaatcactggctcctcaggacagtggagcccatagctttgaccttacagctcaaggaacactaaccactgggcttagaccaaaggtattagctaaacagattaccagccccaagtaatgtagagttggctgcattttctcaaattccttttcattccaaattcagaagattctaaactgtgagtgttttaactgtttctaaatgcttcttctatccaaatctttctagttcatcctaagcaatttgtaacctctagaagggtattttgagcagaccacagaaagtccagatacttgaattcagcctcctcttccctggccaccatgaaatctgagaactaaattggagccttgtccccagcctgagatattatctgcccaaggtgtcccatgggctggaatgactaggcatgaactttgcctttttttttcagggtcctcaaagtgttcccccttgcaggatatgcactccaaccttgtttctccttccctttttaaaattctttatagaattatggacctggataggtcatctcatccaccctcctgtttctgggcagagccatgcctaatcccactctaataagaagagaaaataattgtggaatgggaatgtcacctcatgatctcttccttgtagagtggacagctcagcatttatttttcctctgagccaaacacatcattgatctgctacatatttattttatttatatatgttatattttaaaggcatactgtaaaatacaaagctctatacagctgaaaggtgatattaaattctagtcttttctattggatgtcatctccatatatatatatatgtatttttatatatatgtatttatatatatgtatttatatatatatgtcattgacatgctacatatttatatgtgcgtgtgtgtgtatcatgtatttatgacatatgtgtatggagagcagatcaaatagaatagccaatcagaaaagatccttttttttttttttgagatagggtctcactctgttacccaggttgaagtgcagtcgcatgattatgactcactacagcctcaaactcccgggctcaagtgatttttccacctcagccttctgagaaggtgagactacagacacgtaccaccatgcccagctaattttttttaagagacagggtcttaccatgttgcccaggctggtctcgaagtcctggactcaagtgatcctcccacctcagcctcccaaagtgctaggattacaggtgtgagccattgcgcccagccagaaaagatgtcttgtattcagtagcatcatgtcatacatgcatttaatctaagtgaatttgactctacatatttggctagaggaaaaagagagacagcatagataagacaagtgaccattgtcaaagacaaaatgcaccagacaatcaaggagatggttcgattctggctattgcaatagggggttcattagtgaaggtggccccaaaggaagggggcctacggttttgtagaggcaggcaaagtgggggattcttcagtggatcttatgggaatcatgatgaacaatagagatgggttttttcttagaatatgcaagagtatagtggtcctttatagggagaccattacagggtgggggagacttattcattgcagtttcctctccaggagcacagggctcaggtaaattgagtgttgcaccatttaaagaagacctctgctcacctttccactcaggcagtgagctgtgccctggactgtgtgagatgggagacctgacctcgctgcactctgagtcacttacagcttgttctctcagtatgcatcgtgctcccctgaccctgattttagtgtcaaaatatgcagttttttaaaatgtggccctcatgccagtcaggaactttatctggtgctcaaagaaataggaatttgttcccactggaagacagactgtcgatgttgactttggaaagatgatagctggcccccagcatagtgcctccaaactcaactgtcactgaatttgctgatttagaacttctaggactaggactcaactgtagggaggagcaagttggaattgaagtccttcccatgggcgttcgtagcacgggtgtcactggggtgggagcctttgatggtgcctgacattgctggtttcctgaacagatcctgcaggagttggagtatggcccctccgtggactggtgggccctgggggtgctgatgtacgagatgatggctggacagcctccctttgaggccgacaatgaggacgacctatttgagtccatcctccatgacgacgtgctgtacccagtctggctcagcaaggaggctgtcagcatcttgaaagctgtgagtcactgcccctcacccatggctgtgctctcctgggctcctccccctacacacacacacacacacacacacacacacacacacacacacactcccttctccctttctctgtccagctttctccctcccacctctgctcatcaccacggaatgggaaggattaagggcagttgccactgggagttcaggcacagtgcagaggactgctgccaagagaatggggcctgagatgacttgctcttctggtgggaagaggagcgcatgtctgtgcttcctgagatgaggcactgtgtacatctgtgtcctccagcatttcagagggaacagaagcaactcaactgtgctgacatcacctctgccacttccataccttccttacctgtggcctgtcttcatcagggacctgtgatggagaacagagaggaggggagggagggtgggcaccgcccacctgtgtccacgacagcatcactgtggctcaagagccaatcagaaaagatctggtacactggaaattcatgcagtcctgctggatttagatacataatacagagactgaccctgccctaggaatcatccctcacatgggaaaaccccttatgctttctcagcacagccatctctacgatgtaacaatgcttgtactgtgtcaagcaagtgatgttacctgtccccttttgaaatccgtgaaagctgaggtacagggaagttaagcaagcagtctgcccagggtcacccctctgagctaagataggatgagggtgacaacccagggaccatgacttctagacttggcttcttccactcatctgaatgccccaaaattcaatcatttgcacattatagtcacaaaatttgccatcttcaagtgtcttctgcactattactagcttttcttgttcttttaatcaacttccaatatttacctgattatatgtattttacaaagaaattttttttttttttttagacagagtctcactgcaatggccaggctggagtgcaatggtgctatcttggctcactgcaatctcctcctcccaggttcaagtgattctcctgcctcagcctcctgagtagctgggattacaggcacccgccatcatgcctggctaatttttgtatttttagtagtgacaagatttcaccatgttggccaggctggccttgaactcttgacctcaggtgatccgcccacctcagcctcccaaagtgctgggattacagacatgagccactgcgcccagcctgtattttacaaagaaattttataccattatcgtaggtagaaaatcagtatcacttgccataatgaattaatgtaattttttttcaagatggagtgttgctttgttacccaggctggagtgcagtggcgtgatctcggctcactgcaacctctgcctctcgggttcaagagattctcctgcctcagcctcccgagtagctaggattacaggcgcccaccaccatgctcagctaatttttgtatttttagtagagatggggtttcgccatgttggccaggctggttccgaactcctgacctcatgatccacccacctcggcttcccaaagtgctgggattacaggtgtgagccactacaccctacctaatgtaaattattgtataaaaatttttgaaagatctaaaaccattttgtaggtatctgagggtgcatgtaccatgttttagaaaactccacatcagaacatgttacccttttctgtagtttttttttcctccttcctttcctctttccctcacctcattccttctctcccctctgcccttactctcctccctctctctttcattcattcattcaatgaactactatctattgagcacttccaacatgctaggcatggtgctagatgctgaataagtattggtgagacctggtctctgccttgtgaagtttccaatcctgtggaattatttattatttttaataaattaaaaatatatcaataggtagccacaattgggataagagaagtgaaggaggcaaatagagtatgttcattcatgcattcatttattaaacaaatatttattgagcatctagtaaagactatttattcatttattctataaatatttattggcaggcactatgccaggcgctggtgatacaaacaacacagtccctgcttacagactagtgaataaatgaacagacaaatgactgtatattgtactaaatggtaacaagtgcaaaaagacacatgcagaggctcaggaaatgaggagcaacaggctgcatggggtgctcttgagtctggaaatgcctgtcccatgaggggacactaaggcgaggtttcagtcaggtggctactgggggaaagggcgtctgttcagaaggaagagcaagtgcacaggccttggactagaaaacatctgccagggtggacaacccaaaaggagctcagggagagtgggcacgaggagggtgacgggatggcggtgtctgagtatgcagggctgcttcttcttcttcgtcctcctcttcctcttcttcctcctcttcctcttcttcttcttctttttttttttttttttttttttgagaccaagtctcgctctgtcacccaggctggagtgcagcggcacgatctctgctcactgcaacttccgcctcccgggttcaagagattctcctgcctcagcctcccgagtagctgggattacaggcgcccaccaccatgcctggctaatttttgtatttttagtagaggcagggtttcaccgtgttagccaggatggtctccatctcctgacctcgtgatccgcccgcctcagcctcacaaagtgctgggattacaggcgtgagcctccacgcccggcctgggtatgcagggcttcttatgccacgagagcttccattcgattcccagtgcagggctaaccctcggaggaccagacaggggagggacctggctggtacacctagaaggtagctctggctgctggggagagcgtggtctggagggtgcctctcctgccagcctccaaaagtcctccacccttgccccaagccagtgaggaggcctcgggggtactagtcttatttagggatactagtttatccaactttccaaattcaatgtgtgttctgggctgggcctctcactccgagaatggttcttgctactcgtggaaattacttctgttgcacttctctgccttgatgtcctcacggccctccccaccccgccccaccccccccaacccccccgcccgccgccgcatttctcctcggccccctgtggctctttgaagctttcaggacccctgccttggagcctcccagccacattcactggctcagccaagcccctccgtgttaaagtcctccttgtcctcgccctctgggactgggtctcctctggcattgggcggctgcttctccatctcctttgctacccctttctcctgctgccctcttagtgccaacattttcataggttgactcagtagcattttctcagtgaggcttttttttttttttttacaaaaaactaaaccttgtccccttccctatccacctttatcctgctcagttgatacctgatagcagtttccactttctaacccactatatatattatgtattatgtttattgtctatttccttccacaagactgagcttcgtgagggcaggaacgttttccagcttatttctcagacgcgtcccaagggctgagaacagtgccaagcacattgtaggagctatgtaactgtttgataaaaaacagaaacagctcttagctctctgttctttccattttatcacatatttcaaagttaaatgcctgcaagagcccagcaggagctgtggaaggtgaacaggactgggtggggcagggtaaacggagacccctcatgatcccccagcagcaacgaggacttcacctcaccagatctggctttccaagagaagcacgaaatccagatttttatgtaaaaatctcgaaacattaaatgattataactagttcaattaaatgattacaactagttcaactgagagccaaggaaaactttgacctgggtgcctcttgggtgaatctttgatggaccccttcaaggagctcttctcagctccttgctggtgtcactcgcgggcccctgttcggctccttcatgaatggattctggtcaccgcctctcttgttcctcaggcctgggccccgggtcctctgggtaccctgtgctctcccctgcacagcactctcccacttcccaccctgcactcagggaggggtatccccagccagacccatcttccagcctccaggcctgtgtttccagttccctactcactttctcccttcagctggccaggggtccctcacattcagtatactcccaaacagctctggatggtccccctcaaatctgctcactctcaaattccttggttcagtaaatggcaccctgtcttcctttctaaacagaccagaaatggggtgcaatccctctctccccatcacagctagtcatcaagtccgttccccctgctaaccttttccatttgagttacctttctccatccttctccccactatccccattggagccaccaccgcctctcccttggtgaactgcaggacctcctaacgggcagcccttcttgtgtccttctcatctctgtacgtctatcagagtgatctcttagtgggtgcagcgcaccagcatggcacatgtatacatatgtaactaacctgcacaatgtgcacatgtaccctaaaacttaaagtatataaaaaaaaaaaaaacttcatgtacaaaaaaaaataataaaatgtttgttacgtggaaaaaaaaaaaaaaagaatgcaaatctagccatttcgcgcctcatcccctacttaaaactcatcacattgtgattagataaagaccttctcttccacatagcctccagggttctgcatcaggccccgcctccccctcagcccttccccgtcatctgctgggctctggccatattggaccactctcccctgtgccctttttgcctaggtacattcctccttcaggtctcagcctaggtgttgcctctcagggaatgctttgccaagttccttgcccatcacactgtcagagcctgctgtgcttctctcagggagttcatcacagtctcagctaattgattctctggcagttacgtgtttcttctcagcctcctttactcttctacatgccccgtgagggcagggaccgtgtctcatcactcaccacagcacttggtacagaatggagactcatgtgtgtgcaaaggaaggagagaagggattttcaccgatgagtacagggcacctgctaggcaaggcattcagcgagactgtctgcatccaaaaatggctcccagcctcttccatcctgaccttcctacaggaaagcactttaggaagggcacgtcacccagtgggaaggagccttgcttagggggactctgttgtccaacttttcaaattctgttttgttcagtttatatatttaggccttaaatatttcattatttgcttgctggtttgatcacatgctatttttttaaaaaacacaaagcataaaatcagatacagtgaaaggtctctgtctcatccttgcttccatctgcccacctcccacacactctctacttatgttttgaggcttttatatatccttctggaatttctttaggtatatacaagcaatacaaatataacttcttatttctttttctgtgttatacaatggtaggaatgctgtacacgtatctcattttcctgtcgatggtgtatcttgctttttctactcagtgagatcttgcaacaggcatatcttcattggttctgcctctacttacactttggagctgcaactctgaatcactgcagaggactctcttgggtaattaacttggggtggacatgggagcttttgtctcctgattcccggagccccatctcttcccaagtcagatgagtaactaaaggaaaacctcagccgcacccgagtccaccagaacaccatgcccagcagagctggccaccatcccaggccccaacaccagcccatcacacctccctgtgagtcccctgccagcataccagctgagcccttttattttggaggccttagagcagtggcctttaactaggggcaattttgtcctgttcccttagacattcagtaatgtctggagatatttttggtgctgctggcatgtagcaggtagaggccatggaggctgctaaactgcctgcaatgcacaggacagctccccccacccaccctgcaaagaagtatccagtcaaaaatgttaatagcatgaaggctgagaaaccttaacctacagagatccagaagttagaagtcgtgcctaaccggttaaccagttcgtgagggtgagacgttcatgagaagagcatcttccaactgagaagagcctctggctcaggggcagcttcttaagatgcccaaacctctatgtgtatccctgaccctgatacttcccctcccagaaaagggaggacgggaggagctgaggaagtgaggaatctactacacccttggcctcaaaacacttcatttcctcacactgtcacttgactgcagggccaggccaggatttccatgactctagccactgagctgtgtctccgagggctactgcctatgtgaaggtgatgcagaactttagagaaggccatttgtatcatagaagtatgcagtgcacaacctgtgcaacaataagcggctgtgccacagtctccctccctcagtgctatgccctgaggcccagcctttagcccctcactccatcatcacaatttgctgagtgtacagtgggaaccaggcactgagccaggtttggggcagataagacagattcctaaatcatagagctcaccaaggggaagagatgtttagacaaatcataatttaaataaaccagaagcctggggtctaagatatcaacagaggagggaatgtggggaggcttcacagaggaggtagcattttgactagttcctagaggaggcctagggactggagagggacattcaaccagagggaagaaagaatgcaaaaggacagcaaggtagacagggttcaggctgaggagctcctgtgtgccaaactaaggagtatggacttcatggtgggggccatccaaggtgttaaagtgggggtcaccttgctgacttgtagatgagaaagatgaggtgcactggtaccattcctgactcacacctactctccacccctttcactctttatctggggctgccccctccaatcgcattgaactcgaggccaggtgctttggttccaagggcatcaggcaagaaatagttagaggctctctcccttgctgatgaagcctgaaattctaccaaagatgtattcctttggattacagtttattctctcaagttcctctgtttagatagatattcagccttcacactatgaaatgtgacattttgtctctaacactcatgcacatacaatacatacatgccattatttcgggtagctatcagaaatatttccacctactggcactttttttccccaaggttttattggtatacgtatgctcaattaaattaacgtttaccctcaggactgactcatttaataggaataacaagttcacctgggtgtgtagggatcgccagacaccacccagaaaatataaaacacatcaatgtgattttcacctacaagcattgaaaaggaataagcctttctttttcttgttttttatcttttgaccttcatgggcattttgtgtcaagattgcaaattcaaacataaaaacagtggagaggggctgggtccaggaacaggaaaggagctggaggaggcattagtacatttgatcatttacctggtccttattccttatctcaaaaaggaccgttgacccctccatgtaaatgagtttatcagacctcagtctccctgatgagaagacctgagaatctgagggggatcacagagtcagtaagagccagagtgcataatcccagcttggtcccttactagctgggtgactttggccaaattagctgacctctgtgtgcttctagtgcctcgtttataatatagagacaatgatagtacctcgtagggcattaggatgaaatgagttgatacatgtaccatgtctagaatggtgtctgggacatagtcaattctatgtaagagttaaagaaaacccaacagatgtggcccttgaaagtgcaaagaacagacttgggaggcgatgctgaagatgctgctttggctgacctccatctgtcccttatagcctgtgctggccaggcctttgtcactaattccgactctgtcctcatccctgcagttcatgacgaagaatccccacaagcgcctgggctgtgtggcatcgcagaatggcgaggacgccatcaagcagcacccattcttcaaagagattgactgggtgctcctggagcagaagaagatcaagccacccttcaaaccacgcattgtaagttggtccccgtgcacgttcagcaccatgggtcgggcccaggtacttgcaggacaggctgcgtgcacccaggaagagttggtcaggggatgcgtattacagtaaaaatgacaaagaccagaggtggctgaggctctccctaagacaatgtctttaggccccaagtgtttactattgaaaacatgtaacctactacagcagcacccaagatgatgatttacgtgggccacagaacaccttttgtctttacagagattcaatttatttattttgattgaaaatgacaaatgatactagttttccatgtatggtagagacataaggtttctttatgaagaactgggtttgttttctaaatgggtcagtttaaaggaaaatattaactaaataatagccgtggtcattccgtggaactagcacagagcatgaagctgggattcactgactggcagcaggaaggatggtgctggggggagcttctgggaggcccactgcgtaaaagtgcatttctgtgagataccctctcccttctctgccgcactctcccttctgccttccagattctcaggcctgctgtgatgccagttggagggggcatgtaacacagggcagttgaagctcagagctttcagtctgggctcgactcacaaaataaagaccacgtcctggcagtggccttctgctggaatggggcgagggtcatgttgcagtccttaaagttacagcgtgtgttatcttaattctgttgtgttgtagcccgttgaagcaatcaatcattcagactgaaaattgaggtagccggctggcaggcttgctgggaggtgaaggggggtgtgcaatgtaagagtttattaggcaggagccccagtgctgtggggctgtggaactggggtcccaggcagggaggatttgccatcaggcagtcagccctcagtcacccagcatactgtcagatgagctcctgctccccttctccaagtgcagaaaagaccttcctgtgccttgtgaaccatcagagaggaattccgttctattcaaggagattttctggggagccgttattgacaatgttgtgattctcagaaatcttccacggtgggagtgggagtgggggtgggggatagtgtcagtggacgggtgtggtccaggcctcaaccagactcgagcacgtggggttgaacatccccggatgcttggtcccgttaccactcctcattcgcttcctcctttggttttcatgttttcactggatagcacaagcttgggacagcccagatttaggttcaccttctttctttgtaaatatcacttcctcttcagcccatctccaccacagctccaggcccaccattccaagccaggagggcgtagactctaagctccctgggttaactgtcccctgctgccacagggctccctgcacatgccagcctgccccattgctgggggctgagggcctctgccagtcacctttaaggaaaggattaactgtgcccctggtaaaataggggaagtaggaccccagaggcctaaaaaaggaggaggagaaactaaaggctcagatggtagggtgaattttaacttctatttaatctaagttaatcaacccaaagaaaaattagaagtagtgctaagtgaagaatcgaggcccaactaacagaaacacaggatgagactgaagctgaggggattatcagtgcagggctacaagatgacttaaactcgagtctccaggtctcagcaaaaccacattaaaccaggcttatggagcaccaggccccagctgtactggcagaggcggaggagcagccccttcctgcttggggaagagtggggaggacaagtgaagcccagggggaaccatcagcaaggggtgtgaggagagagagggtctggggtgtggcagaggaagccagggggtttttattgagaggccacgaggtgggaaggaagtagggaagaaccttaatcataaaaggcacagaggaggttttagagtgtggattcatgaagaatcgtctctccctgaggtatagcagattccagaacactgccaaagcccttcccttcacaggaatccctcactgggactcccaacttttagtttgagactttgagccaatgaaagtgcaggccttctgagaggcatccctctttgagcagcacatggcaggaagggtatgaagaacaggggtgaggtgaacaggtgtgggtctgagggatggggaaaaacctagacagaaaggaagagagggaaggacaaaccgggagggaggcaggcacgtgacttactccactaacacgcaggcattgccttgcctcagacaggcagggagccccttaaagctctccctggccagaagtgaaggtgttcctgtgggcaggggtatgagggggtctgggagccagcaggaggaaatatatccctgggtcaggggtcaggcaggagtccacctctgcctggatgtctagagcaaaagggacctgtgctttctgtccttgggcctcttgggagctcccccttgggactaaagagccagaaagaccctgtttgctttcttttgcctggagggtcaaggaagctttcagggtccttatcaccccctgagaggatggcaaagagaaaggatggggctgtccaggagctcccaccgatttcaaaactgcctcagtcagacttcttaaagactgacttcatcgttgccttgaagtgatctcctgtgcatgttcccactctccctgcctccccagaccttcagagttaacctcaatgctcagtgctgtggaggggggcggggtcaggggagagggtattgattaggtaggtttgaattcagttgggaggagagaattagaacatctggaaaaaggaaggctaaaacggaaagctgacgttgtgtaagaggtgtttctggccacactttgagctgagtaatgttgatccttagagagttctcagctgcaggtctttcaagacttcttcaagttatttaaatgtctgacatttacaaccttggcactagagatttctctcaggagaaataccaaaattggggaaaaaaaataaacgagagtggtccacatctagttagcaggttggaaaagtgacccaaatctgtccctaaatcaaaagctcttttctgaaaaatgtcaatggcaccagcccgagtcatccgtgggcttgtgtagaaaaagcagaaataaataaagcccaaggattaaagcccatggcagtgatgcacatactgcatttctcatctcagaaagcctcaaaagactagtgggaaaactcacttgaggttttcatacgccatcgcgcccctgtaaccaactcagggttgaccccggggatgtgggtgcctgcctagctcaggtaccagcagtgaggacaactctgtgctgcataagcagagtcagccttaccacaggcaaaacagatggccacccacagaggccactggagagccatggggaagtggaggggcaccccacagagggcactgagagacacagggaagctgaggtgcatccccatagaggccactgagagccatggggaagctgaggtgcaccccacagaggccactgagagccacggggaagttgagcttcatccccacagaggccactgagagacacggggaagctgaggcactccccacagaggccactaagagacacagggaagctgaggcacaccccacagaggccactgagagacacggggaagctgagcttcatccccacagaggccactgagagacacggggaagctgaggcactccccacagaggccactaagagacacagggaagctgaggcacaccccacagaggccactgagagacacggggaagctgagcttcatccccacagaggccactgagagacacagggaagctgaggcacaccccacagaggccactgagagacacggggaagctgaggcacaccccaaagaggccactgagagacatggggaagctgaggcgtaccccacagaggccacgggaaaggtgaggtgcacaccacagaggccactgagagacatggggaagctgaggcacaccccacggaggccactgagagacacagggaagctgaggtgcaccccacagaggccacgggaaaggtgaggtgcaccccacagaggccactgagagacacagggaagctgaggcgcaccccacagaggccactgagagacacggggaagctgaggtgcaccccacagaggttgtggtgaggtggcttctattcagggggcagattgccatcacaagacaggatttccttgggcttaaggtatcaaataacttgaggacatgtgagatgccttcctagcagagctgggaaagaaagggctttgacagagggaagagggaaaactggtttagatcccgacattgggaaaaaacctccaagttactggatcacaagcagccagggacaatgtgcagttgttggtcctgggtctttgacagactccaggtcaaaggcaagacaccgtgagaagggaaaggatcaagtctgtgagcaaacaccatcagccttgcaatttgatggtggcctcaaggagacattgggcgtgtgtttaaacaagcaaggaaggcagctgtacaagtgccctaatctggtaaaactgaatacctccaaggtgactcagtcaagtgcctgaagcccctgagggagctccaggtttcctctgtcgtgtgttacctccacttgcttccaagccatgcccttttggcatcatactagaatgacaccagtctccagaaacctgaattaccccactcctcagctggccatactgaatctgggtgacccggggcggggggtgccctgcctgtctgatacaaggaggacctggttttgtcaggtggttggtgctggaggtgaggctgggagaggtcatgtcacttacaagagccaggatgcagtggcatatttttgcagagctcctgaccctctccactctcactacaaggacagagccccttcgtggaagaacctgccaggcacaacaaggctgtactctgcccaggctggctcgctagaggctggggacccctgggtcaccaccacagaggccgaggatgcaacagcacaacagctttcaggcctgacttccattcctgcacaggaagcctcgcccctctgaagctatcaccaaggagattgtccagattcatagctggaatttggcctctggtcaggttccatcacatacctcagttggcttctattccccccaggcttttgccttcttgagatgtctgctaagctgagatttctgctcccccggctcctaagcctcccttgtctaacccctgccctgactcaccagctgtcactagtccaactgggtttcctgactacaggccaacatccctttgtactaacccccacccagtgcagttttcagtggcctctgcttcagcgtggagactttcctgtctttcgttctctcagctctcttacgtactctccctcctccactttcccttttgtattcctcttgttcaccctctgtccacccacataatgaactgagtttgtgcaagtgatgtgccatcaacaccaaaccaaagactttgcaccatcatgtactcaagtcaattttccgggggtggcttgcttcagagcaaggacacacagtggggggctgtttggtggcaaatactccagcactgaggggttggggagacaggaaagccagcaaggctggagccaaagccttcgatgctggagaaaatctccaaccctagaattcactggtctatcccattggggatttcatcccaagatgatggccttgtctaattgccaataacagtagcacatttcgcttttgtgttactgatgggcttgccttctctggggactggaggggcagagcgatgtgtttggtgtggttgaagggcatcatctgaccttgcagatcttggggatgttctgctcactcctggcttctccgctgtgtacccattccttcccctcaaaagcgttcagctctgagactctggctcccagggcttcagcactggaatggggggaagccagcgtaggagggagagatttgcctccccagaaacctagttgtcctcagtgaaagccagaggcaatgagggaaatgctggccaagtaaacttctctttgtgtacatgttctcttttttcaagtttgcttcagtgtgaatgtccctctttaaggtaaggcctccagagtggggagtctctccaggtaggtgagccctcaggcccggtgacatagaggcccctctcaacctcatgatccgtttccatccagccatccgcgctgcatggcgggacccccgagggaggcctctcctgcatgctcctgcatgactgggctgtgctgagagaaaacctgggaagtgggctcgagacccgcacacttcaccaacttagcgacctgaggaggagccctgttgaacaggcagccccttcccctgaagccagcccacctgcctagggaccacctgataacatgggttgtgatgatggaggccagtcatgacaccatcctcatcctctgttctggcagagctggggcaggagcaaggctgagttctgcagcccctcacgaggacatccccctggactgtgtccaccacatccaagcggcttaccatccaagaggctacaagagccctccaagagccaggactctgatccagggctggagggcatgggaaaagtccagaaacctgtttttggtggttgacccagcgggtggcatggtacagtggacaggatactggctttgacttctgagagacttgggttggaagaaaattgctctcacaggaaagccatgtgacactcagaattcacctcacccctggacctctggcttccttgagcctccttatctgtaaaattgggatactatgataattcttcactcatggaattattaacaggaatagctgggtactgtggttcatacctataattccagcactttgggaggccaaggcaggcagatcacttgcactcaggagttcgagacaagcctgggcaacacggtaaaaccctgtctctacaaaaaatgcaaaaagtagccaggcgtggtggcatgcacttgtagtcccagctacttgggaggctggggtgggaggatcgcttgagctcaggaggttgaggctgtagtgagccatgttcatgccactgcactccagcctgggagacaaagggagatcctgtctcaaaaagaattataaacaggaatagaataagtctaagctactttgtgcactgtagattctcaatgaattttaattcctctctctccattcaccacccctaccctggcctttgaacttcttctcatccccaaactccaagaatcaagagttaagaattgcaggaggttggtgtgatgtttggaggctgggctttggaatcagatgcaaccaggttctaatttgggctgtgggatattgggaaagtcaccacttctctctgagcctcggtctgctgatcatagcatgggggttataaatatctaccacctggggttgctgtgaagcatcaacaaacctaattgcctgaaatgagtagcacagtgcctgatacaggtgaacacttggatggtgttgatggtgttgatgctgttggtgaggaggacaacaggagcctgaggccaagggaggctggactggacaacactcctgtcccaaaggggctgacgggccaggagttcagatgaggggatggcaccatctagcaaggcaccagccattacagggcagaaagcatctgaaggcagggaaggagcacagttcagaatgctgaggcgcctgcaggggcgtcattccagcacagccactggtatgagctggggagtgccaaggggagggaggtactgcgagggtgactcaccccaggtgccagcattcccagccctttttgcctcttaggatggcaccccaagttctgccacattttctcagcaccccccaccccgccccccggtcccctgcttttactctgtgaccatgcttaccacgttgacgttcgttgacgttccctgccttcattctcagtagtgtttttgctgggtacagctgtgcggccctcagcaccccagccctgaagtggtagcagtcaccagtgagaccctgttccagcacagcaggctcccaaatatttctaagcgaaacagcctcagtggagcatctttgactctggacaagtgatttcgccattttagaattctgattgcaggaattttgccatttgagaattctgatggcaggaacaatgatttcaccattagagaattctgatggcaggaacgttcctgtggcctgggattgggagggccatcattttcatcccctacccccactccagggaagagtgtgaggcctgggctggcctgggctttgctgggcactttcataagctcctaagcttttctttgtgtcttaatggctgttactttggtatatgccttcctgggttcatcagactagtgtttcttgaacttaatctcctcccagacccacctgcacttgaagtaacacacatacaactcacctgggagcatgggaggacttcctaggccacgcctgatcaaaccagaggacagcaggaggaatcagggaatgtttcctagaggagctggaacttgacagaaagctgggagggatcaggaagaaagaactatctgcgaaaggcataaaaggagaaagggaaaggcaagattcaggtcagttatattcaacaagtgtttgttgaacatgtcctttgagccctctgtgaagccctgaagccctagagggagaagcttgacaaaggcaaggaaagaatcttctgccatcaccctaacattgccaccttgaaaagcttcgatggcagaagacttgataatgcaaaatacttaagggataacaggcagtagggtaaaatccggcacctgactcctaacaggatgctcatttggaagaggaatttggagctctgcctttcaaggtttgaggacagagagaagagggcctctggggaggctgggagccagcgtttctgtgggtcctgagagcctatgtcagcccccttctcatcttgggtcttgcagaagatcctatccaagtgggtctgcactgctggataagcaatgccctcctgcctatctctgcggagaggactaaaggatggtctggctgccaggagggacaggggtcagagcctggttcgtgtgtattgaagtgaaggcagacagagcctcaaccctccctcacagaggggctcagccctccagccagaatttgttccctgaagggtacaggcaccaaggggcactttgcaagctgactgggggggtgtgttctgcccacatcaagtggaggacctttgatctccagaggcatatatgtcatggagaagagacactctggggaatccagttttgcacttgggggatcagtgccttcttaccttcccattgtttgtgctggggagggggatggtaacagaattaggtttggcctaaacttaacattccattgttattctggaattctgggatttgactaatacacagtgggtttgtgaaggttcattaagtttccacatcaacctcagtctcctcactgtgagaaggcctggccacatagcagcagcccttcaccctccatgttcctctggctactcctttctggacctatttcgccttaacagcagctttcttggagcacagagcttggagatcaatggagtatttcaggtgtgagagcccagctaggcgtggaagagggtggcaaatggctaggccagggaactatgaaatatatttgccttaagtaaggagatggaaagataagccctccagagtagggcttatcaactgagatgacttcgaaaataaaccagaccctgacctaggactttagccgcactccgtcccccctagcgcagcagctgacatatcagctagtgttggcagtaacaggatttgcagacttcctgggaggcgtggcagactcagactatagggacctggggtgtgggtgttcaaccaaataattgagaagacagtcaccccaaaatgtggcacttcagattgaagcacccaccttgtatcacaggcagtgagctaaggggaagtgttagacagaactgggtgctagtccccactgttactgtctgtgagatgctgagaaattcactcaatctctctgctcctttcctgtaaaatgagggacttaagtaatccctaagatttcttccagccccagccatgtgagagcagggatttgcagggttttttaatcaattgtattgcaacaaaatttacatagaataaatgcacccatttcaagtccacattctgatgcatttgaaaaatgtcatacacccatgtgaccaccagcacaataagtatatagaacacctccatcctcccaagaagtttcctgcccatagccccaggcaaccctggtctgctttctgtcactggagattagattcgtcttttctagagtttcttataaatggagccacatagcatgtactttttttgtgtctgccttctttcactcagcatcatgtttttgagatttgggacttataattttaactttagtacggaaatttccaaacatatataaaagtagagcaaatcattgaatgagtccccatgtgttcatcacccagcgtcaacaattagcaatgcacagtaattagcaattagcaatcaagggagagagttacatctgttttgttcacaaatgcatccccagcagttagaacaattcctggcacatagtaggtattcaatctatatttgtggaatgaacaaatgaattccccagatatacagtgtttttttcagctctatctcaaaattctcttctcaccttttatggctcaagatcagttccagtatatgcccgggaatttggggtcataagatcctgcattaggaaacttgaaattattgttgaatggtgagagaaggtgggtgacctcgtcttgacttgagaggcacatattagaatgtttacagttcccatttcacaggcagtgcaataataaatcctgggccaagagaactgatctctatctagaacattttcctaaataagtgggggagagattggtaagtggaggaactgggcctttgccagggccagattggaaagtttcttctttggataccaaaaatgtccctggaatggtaaacccaacagctgtcagcaataagacggctttaaaaagtagatgataaatgaaaaaggtcccccagttagaagcagaatgagtccaagttgccaccgttttcttacccacttccagctggagacacaggctcctgctgcatcgccaggctcgggtcctgccactgcacatcctgctgcggggggccagctcactgcagggcctggctcagcaagctcaggccccaggcaagccagggcaggcagggtactgtctcctcctaaggctctttattcctggatagccacacagcattttctacatcgtgttctgtcccaggcatctcctggggtgcccctaatgtctacgaaataaccccaaaagacttggtggtgatggtggcctcttgcactgtgaggggtacacggcagaatgcagttgtttgtttgatgttaacacagcaacaccgctattgacagaaaccattgaactggcagcttatgctgggcacagtgctgcgtgtctttgtgcagatggctgcattgatgcctcccggcagttcatcatgggaggcaggatagtacatgccaggggcacagcctcggggtcagaacaagctgattccaagtcctgaccccacctcttgcccagcctgcctgttagacaagacgtctaatgcctccgagcccatttccccatctttacaatggagatgtgatcacagcactctcctccctgtggagtgggtgtgaggttacaagagccgggtgttgaaggcatcaaagcactggcaaagtctccatctgcagctttgttatgttttcctcctaaagaagctaaggctgtcccaggcactgagctggtgctaaaaacacaaggcagatgcgcatgtggagctccggtccagtggaaaagacacctcagactgagtcatcatttagctccagttatgaggagtaccaggaaacagaaccccagcacaagggtcaaggtatatataggaggggactagcctggtttggggatcattcccccaggaagaggcatttcctttgctgtacagcagcagcagacacgtcccttgagtggcctcaggaatggtttcagagctcacgtgcagcatcctctcagttcgactcttggagggccagtgggctcaacggtggagagaatggctgtggctctctgccgtcctccagagactctgcagcgttcattccattagctgggagcctgcaaagccaggctgagctgggccctgctagtgtcagaagcgccaggccctctttccccccaggcactgccagcctcttgcgggagccaagactcctggggcacttagcgacatatccaggccattcctcaatcccagactggatgtcatctggggccagtgtgcactggatggacaatgtggactcatccataatcaggtggccccatgtggctggaatgtatactttatatttttgttaccaaatttcagaatcaacgtgtcacagccaaaggagtgtataggtgtgggcctgggcaggcctgggcgggcctgggcgtgcctgggcggccctgggagggtttgaggagcaggaataagcgccatccctcagaactgcccagaaatgcctccttcactaacaagaatggagacataatgtgtttggagctaacgctttgagactattgacttcacctgcacttagaagacacctctggaaagaggcttagatacacagtctacatccgggggagtgttctcagccatttttacatgagacagccttccccacagagcactgtatagtcactaagtccagaggggatgccctgtgctggggacccttgtggtctgaaagacttaagcaaaaggggacacttcaggtcctgaaaatacttctcagggctttctcctttatgtggattcctcagagacagttattgtaccacttagaaagccaggctttttataatggaaatgtttaaatcagtggttcttaacttagtggtatcactacccccttggagaatctgatacagtaaactctgtctccaggaaaaccccaaggtgtcacaaacacagtacactgttctatattctaccaggctcatggaaaccctgaagccatcctttgaggcaggggtctgcgaactgcagcccagggccaaatccagcccaccacctgcttttgtgcagccctagaataagaatggtttcaacatttttttaatggttgaagaatactatttcatgacacatgaacactgtatgaaattcaaacatcagtgcccataaagttttatcggaacacagccaccgtcattcatttacacaagttcatgctgcttttgggctacagtggcagagcggagtggttatgacagagaccatatggctcaccacatctaaaatatttactacctggcctttcacagaaaaaaatggcaacccttgctccaggggtgggaaccccatttaagaagcttactttatattccttacttttgcttacaaatgattgagccgtggaatttagacatagaagcagcattgaaagtctccttgaaaagcttctcactttaccaatagcagacaaggaacatgttcctcagtttcgcaggagcaagagccaggaaggggctctgtcctgggccctccctttcttctgtaggtttctgaattggcactgccttccaaaggaaccttcgggtagttgccctgaagttttgtttcaaagcatcataacacatgttagaagtttggtggcaacttctttataacagggacacctgcttgcctctgtgatggcaatccctgaaagctgtgtctatagaccccagctaattcccagacaaacgatagttggctgaactcctttgatctctatttgctgagtgtaggggaggaggtttgctgttagctaatacctgaagtagagttttcttttttcctaaagtaacttctcacatggaatttgtaaacaaatttttttttatagtttagcaaacaataatgagactggagatgggaaatagttgaattccgtcaaacagcagacctgatagaattcagctgtggttgattgttcagaatgcctggcggtctgagagaatttggtccatttagaaaatagatatgtgtgtctactgactgcctccaaaggaatgaagcaactttccctcagaagtgttttagcgaggaaaccaatgagattgtggggaaggggcctgtgaggcccagcctgaggcttgggcagcttgtccctacgactacaggggccacctagctgccaggaccctttccgttgggctggggaatggtgggccaagtggcctcccattttaactgccatctgtgccatcgtgcttaaaaagcaagtgggtcttcattttcttctcccttaaaaggtggaagcagcaatcttttcaatgatgtaaaggtcgcaaactggaggattgtgagacccattcagccaggagataacttttttaaaatcgaattagtaggcaacatttaaaaagagatgtaagtgaaaatgtagattggggcatttcgtggcaactccaaagacctgggacccctgggtcggtgtccccgacaggtggcatcagctggtgaggcatgcagccctcagcttgctgggctcctcagttcccggtgcgcccaggctcccccatgccacacacaacacacacagacacccaaagacacacacatgccccactcattagagagaaaaggagatatgatgctttttaattttttttgagataagatctggcactgtcacccaggctggagggcagtgatatgatcttggctctcttgcaacctctacctcctggactcaagccaacctcacacctccgcctcctgagtagctgggactacaggcacgtgccaccgtgtctggctaatttttgtatttttttgtaaaggcagggtctcactatgtggcccaggctggtctcaaactcctgggctcgagctatccacctaccttgtccaccagaagtgctgggattacaggcatgaaccaccacgcccagccgagatctggtgttacagcctgcaattttagccagcagggctaaaattgcttccttccttccttgtttttctaaaatccttccttccttgtttttcctttcttattccagaaagtttaaagatgtcccaccagtatatataaagtttactatgaatgtaatgtcagcgaaaagaaagaaagagaaaacagcacaggaaggcaaaaaagcatcagaaatgttcttttgggtgggtcacatatttggctatttgcctccagtgaaaactaattggttctagatttcatgtgcaggggagataaatgcacacaggtggcctaggtgaaacaatgattattctgtgaactgagaccaaatagaaagttctctcctggatcatcccaaagacaattctgtttgttctaaccatacagttgtgatcttagatatattgaggaaggaacaatgccaataatttactcgatgtcacctactgttctcgccacttgattgtattctttcatttaatcctcataacaaatatatgggaaggcctactaatgtccccattttatggatgagaaaatggcggcacagagattacataattggcccaaggccacaaagttagtaactggagaagcaggcatggaattcaggcagtctggctgtagagcatgaaggctaagccactaagctacctctcacagatcggcatttaaagaaaccagtctgattccatgagagttctcagatgtcctgattttataaataccaatataaaatagaccaagaagtcatgaagctgagaaggaatgccagtatatagcatgaacttgctatgtgttggaggaggccaaatctagtatggtcttaggctcctgaaaaagcctttggacaacaatgaaaacaggccttttgaaattgttaaaagaagaaagaaagagacccacggcctttatatggagggactccaccaggctgcccaccagaatcacttatggagctttaaaaactcaccgtctggagattccaattcatcaggtctaggatgactctcaggtgtctaaatggctgtgtttggtttttatgcacagccaggattgagaaccactgtgttaaaaaatggcaaaaagcagacctgttattttgcctccaattttccccaaagagaaatagctccaaagtacaaagataagggtgaaaaccactaagaggaaattgaaacccaagagaggcaaattacatttaataaagctcacctggggagccctattattccatgcccagaccagatcccaaagcagttcaacagaatccctagagtgggacgagcagctccgtgcgttgaagctcccccaggtgactccagtgtaggcccaggtgaattacattccaggttacggaagaatctgctctgcctactgcttggtaaattggaaatgatgggatagagtaatgataccaagtgataggagaaaggcaaaccgtctcccagtattcagaaactgggaaaatgtgaacttaggacactttgaaattgatattattaaaggaagtttctataaattcttaatgagaagatagtttgtggacatttagggggcagtagtaatcacttgaagcaattaacttcatttccagcagagaaatgctcagccatttgtatctttattccagcaaagcaactgagcaaaatgaaaacagtgaccatggctggttgcttctcaatgaatttcacaaccacaccccaaagagtgctggtgggacttgatgtcacctatgtgagagggctgtttcaggggccaggtcaaagggctctggtcctgatcctgtgctaaacaatatttgcatgagtgtcccaacagagagataggaggcatgccaatcaaattttaggatgacataaagctggaggatacagcagataagatggatgatagaattaaaatggcatttgcattgtattttagggtttatctgagctttacctataaccctcagaaagctaggtatgtctgttatctctacttcctaggtaaatacactgagattcagagaggtaagttgcagaatcatggtgatcttgacaggctagaaatatgtcccaaaataagaagaaatcaagtgtaaaggattacgtttggattttaaaaaccaatttcaggccgagtatggtagctcacacctgtaatcccagcagtttggaaggctgaggtgggaggatcacttgagcccaggaattcaagaccagccaggacaacacagcgagatttcatctctctactttatatacttaaaaaaatttttttaaatcaatttcagaaaaataagattggagtttgtattagttgcccagggctaccataacaaagtaccaaaacctgggtggcttatctaacaacagaaatttatgatctcatggtttgaggctagaagtctgaaatcaaggtgttggcagggtcttgctccctctgaaacctacagaggaatctttccttgcctctttcagctctggtagccacagactttcactggctcgtgccacacagcttcagtcttcacacatatgtccctgtgtctcttccctctgtgcatgtctgtctctgtgtccaatttcccctcttataaggacaccagtcatattggatcagggcccactctaatgacctcatcttcgtttgattacgtctgcaaagaacttatttccaaataagaccacatcctgtggtactgggggttaaaacttcacatatctttttggggagacacaattcaactcataacatggtaaaattggattgatacaactaagatagtgtcaatgttttctcatagctacttaagaaattataaaacattgatactatcttagacaatgttaatgtaatttaagggttcacgccaagtagaaagtaacaccactgcacttggcactgttcagaccgcagaggcaggaactgagcagtcacttctggccactaccaaggatatggatttaaaaaaaaatggctgggcatggtggctcacacctgtgatcccagcactttgggaggctgaggcaggtgggtcaccagaggtcaggagttcgagaccagcctgaccaacagggagataccccatctctactaaaaatacaaaagctagccaggcgtggtggcacatgcctgtaatcccagctactcaggaggctgaggcagaagaattgcttgaacccgggaggcggaggttgcagtgagccaagattgtgctattgcactccagcctgggcaacaagagcgaaactctgtctcaaaaaaaaatagagcactgccatggactcccagtagaaagttccatgggcagtccagtgccagatgacccctctatacattttgacctgtttactgtaaagaaaatccaaaagtatgaacatttcttggctaacaaaattataaagaggaagaagggatgacagatgattatgtttagagaaatttttaacttgagagttagattctcatttttgccaggcagggcactatgcagtgataccttccttatttcatttaacttcacacatcagtatgtgtgtgtaaacatatacacatatattcttttaattcgaatgtatggctatgaagaatatatgtatctatatgaggatctagttaatggtgaggaagtgttctaattgtttaaattctttttcttttagaatatttaaaagagaaaagtggagcatagacaagaatatggacatttcaaagctaggacggacttgggatttggctgttatagtgactaaaattatttccggccaatgaacgttaagtatctgctgtgtgccctgccttgcagtaggtaccttgaggggtatgatggggaatataatacacatgaaatagcagaaggggctaaatgcatgatccagacagtgccataggagccgggaggagggcagggtggaaggagactggagttacggaagtcataagaaggagcctcacgtgggacctagaaggatgctggcatttaggagaccacgtagagacagcatgtctcagttcaggtcacaccccatgaggcagaggacctctgggttggggtcactatgctacttgtgctgttgctgtcacgccaagcagagttaagggggaaggcagggaccaataaggcagccacatgaaagctagccctatgccccagcctgtaagatcagggagttttctcagtgctttaaaacaaagtcatctgttgatctcctgggaatcagatgaagacagaagcagacactgctggctcctccgaaagctcaagtttatgacgtcagcacagtgagggctgtgagagattgtgctggccagacaggaagtaagcattgacgctgcctgcctacctctgccctgggctcccaacaccaccacagccgctgagtctctaggcctcagagctgcctgagctctgaggcaggcccagtctctgagagggatctggactgacctgaaactcttatttcctcccttcctgactacagacaccaaaaatgtgcccttcccccagagtcagtcccagatttctcaaatctaagaccttatttctgaaatgatgccagagggaatcggaatgttgttttcctctaacatcagccacaggggtcagacatacccacaaagtccctaaacatatctgtcttgatggaattttcccaaaccctggtcgaacctgtttgtttctatcttgtgtcagcaattagaaaactctagtgccccaagtcctgggagaagaaatttcattaattgggcctaagcctacctgttttgcagaccccatgggcctagtgatggtctgggatgcctggctctaggcccttcatgaatcagactacagccatcccccccaactccctgcctccacttcccaaaatcaaaacaccccctgacagcacagcagcccctgaccctgaacccagatcacgttactggctctagataaagtagcagcaagagaggtgcatttattaattttttctagcagatatctatggagtatgcagtatgtgccaggcattgtgctaggctggggatagaatggtgagttcaacccagtctctgcctgcaaggagctcatagattagttgaaaagaagaggcctcctcagtgtggtgagtactaagttaggagagatggtgagggcacccacaagaagctttgctcaagcagccctggagggatgaggagggttcctgaagaaagggcatgtacatggaggtggggaaattgcatggatgtggggcagaaggcagggataggggagggcattccaggtagagggctagctatgcaaggctggaggcaagagaaagcaggaggaagccccatggttgggcagtgccagggagatgaacctgggggatgaggcaaggacaagctcctgaagggcctcagaagcaggtgagcgaaagaactcaggactttaccccaaaagccgtgatgtgcaatgaagcatctcaattgctggaggaagcactaggatgttcaggcaggcccaggctcagtcctagttcaggatttggaggcacagaaagaaaggtaagactcagcccctaacttcaggaaactcactgatgggcagataccatgcactgtgttgggaaacaaccaagctgtgcatgatgcatgcccatggcacacgaatgctaagatttgaaggcatgatgggagctatcatttattgagtgcactctgtatgccaggttctgcagaaggaacctaatatcacatctcactcagtcctcaaggaaacctatagtgtgcctgttaccacccccgtgtgacagatggaaagaccacggcttaaagaggttaacttcacagcgtcaataaccaggaaaggatggcaccagaatgagctcagccggtgatcttcctcctactctattcagccttccctaagtgtgggccaaaggttgtagaaaaggcttcacggattaggaagggactggcgagttagaatgttgttccctgtgtcccactgtcatctctcaggctctgcagtgggggccaggagcctgacatttaggcattaggggaggcagggatgactgaggatcaggataaacaagtgtctctgagagcctgcccctcagaatctttaagtcgagtccagtgcctgctctgtgcgggaggtagcagcttttcaaagaataaaatcagcgagtaaagaatataatctgcagttctttgcaaatttgacgatgctgtgctgcctacataccattaataggggatgggttttcccagagatgtttgctttggaaaactcccaagcctctactgttaacagttagagattgcacatagtggggatggttatttgaattagaaatgggtaactcacatgcacctgaaatgtctccaagtaaagtagggtaggggccaagttgtataaggagatgggtgagccaagtctgtaacgatcatgaagaatggcatactctctcaaatgccacagatgattctggaacctcaagaatctcagagctgagctaaatggctctccaagatagcccaccatggagctaaggtcctctggaatgacaccactagcagtattgactgagcctggttccctgattcacaacagcaagtcgtgaaattcagacatcctgtaggatctagctttaccactatgctcagttgacctcaagaaatgaaaccagcttccatgattaacagacactaatgaccaacaggtgaaacacaatcaggtaaatggggagagccagtgccagagggcttacagattttctgaagttcttcatacacaggttcccctcattagcagccatctgggagggagctggggatgattctgaaacctggagaatcccggtcactatatcatacattagttgaaaagagggagcctcctcagtgtggtgagtgccaagttaggagagatggtgaaggcatctcctgcctacacgccttgtacagccagccctctgcctggattataccggtctaccacatacctgggcaaggctcgtccttagtgacgttacaaatggaatattcttcttgccctattccttgactctctttttctccttactgccacccctactactccattatccccttcggctccagctcccccggcgtggatgctcctggcttgccttctgggatgatacccagggcttccctaattgttgccacagcctacccagcccgctcctccctctggactgactcacttcgccaggcacagagggcccatagcctgcaatcctccccagtcagtgaatccctcccccttccacagagatcttcagaagaggtgtcgccacaccctttgcccaggcgccaccctcccgcgtcagtgtgcgtcaccgtggggatggtctttgttgtttccctctcaagcagggccctccttttcctcttgttctgtacacactggagagggagaacagatggtcctcctgccgggggccagccctcctggcagaggtgaccaaaccacccggctttcccatctcaggggcatcatggacacccctcagctataggttctgtttctggggatcccttgggttttctgtgtgtcccccccttcccccttccaaggtctctgagacctgctgacctatgcagctcaagcccagagagaagacaccaggcaggactggtggtgctaaaagatggtagaaatcagtttgtccctcctccgtgctgtttgtgattttgatttcaacctgggacgagttgaaaacagtcccccgcgcagctcacccggcccacgttacccactatcttcccggactcacagctgtctccacccatgcttgcctactggcaggcctttccggctttattttgcctagtggtgttaccaaaatgtctcctggttgaacttgactcttgttatatcttccaatttctcccgtgtccagatttccagaccttacccactgtggaaggcatcacactgaagcccagacatgagttctgggtctgctcttacccagtccagtgaccctgggaaagtcaacaaacctctctgagccagtttcctcatctgcaggatcaggatgttaccagcctgttctgaggatcaaatgagcgaataaatgcaaagattctttgtaaactgtaaaccaacattctccaaactgcattctgcagaccctgctctcaggagaggtgttcataaactatttaggaaaacaaaaaagttttaggtcaagtttgaggaaggctagcctaaacaaagcaaactagatttcctcactctagaatttctcagagactaacttgccaatgtgcatagcaaatctccaagagcagggtagaaaacatggctttatgtcaaaactgcttttttcatggactacttattaacttctttaggttagtggtttccacagagcatagcatatattaatattatttctcctacaaataataatgtgaatctttccacaagatttattccatcatccaagtcactaatcctgggtaataccagttaatcagtgtctgaaaaaagtattgctggagtccctgcctttaatcttctgggcattgtgctctgtgctgtgggggagaggggacctgctattgaaggcctctgccattggactccagccctaactcccgccatccccatgccgcactctgcccctgcagcttagtgaacccgctgccctgtgtatgcatcttttgtcttcctgttccctgcctttgttccatccttctccctgccaaggtgcctccctcccatttctaccagtacagttgtcacccattcctcaagtcttagcccaaatcccaacttctccatggaaatttttctaactaaagcgatgtgttctacacaggactactgaccccttgaactcaactctaagcccctaaaggcagagagcattacttatacttcctgattttctccaaaaaccagcattcatttgtgggttgattgattgctcccttccaccccaccccccaagaaccataaggcacacagttgtaccttgggaacttcaacccagaggtatgggtccttcagagctggggagtcagtggtgagtttacttatttcattcagtagacacttattgctggggaactgctgggaactcaaagttgaacaagacaaggtctctgcctttaagaagctcttggtctagacaaaagcataaaaacgtcattgcaagtcaatgtgctgagtttaataattgaaaaaatactggagcacaaaattgggttcgtggtgagagtaagtggaaatcgaggcaggcttgtggagaggatgtcacctggagcagatgtggccgggttatggggaagaaggacctctgagaggggattcagatctgttccctgggtcacagggaggaatgttgtaatggagccagtaggttacagcagttgctgaaagagggtgtgagatgggacctttgcatcatacacacacaaacacacacacacacacacacacacacacgtctgtgggaatcccacttccctgcttttccatcataccctctcaccccttcttccttctcaccttgactcattcttcctctcctcgtctctcacctccgggtcctggggccatccatcgttacctcatcgggacagccccgtgtctgctgtctgttggtagctagaggcctgctttggtgacaggctggtcagtgcggtgcccactccccatggggggccctcaggagggagagcagcctcaactcaccactttctcttttcttcccacagaaaaccaaaagagacgtcaataattttgaccaagactttacccgggaagagccggtactcacccttgtggacgaagcaattgtaaagcagatcaaccaggaggaattcaaaggtttctcctactttggtgaagacctgatgccctgagagcccactgcagttggactttgccgatgctgcaagaaggggtgcagagaagactcctgtgttggagacactcagcaggtcttgaactacttctcctcctcggagccccagtcccatgtccactgtctatttattgcattcccttgccccaggccacctcctccccctcccacctggtgaccagaaggcgctctcggttcttgtctcaccagtaatgcagactcattgggtcagcaattagctgtatacactgccgtgtttggaccattggcaagcctggttccactcctcaggggctcctggcagtgaagcaacttcagttcttttactgcaaagaacagaaaaaagaaagaaagcaaacaagaagactccggctctgctatcggacacagatcctgatccctcttgcttcttttccctcctgcaccgcagcttgccatccctgcccttctgtcctggagaagagactggtgcttctccgcacacacgagggagggcgcccttgaggcatgccctctgagggagggagaccagagatgcagggattggccagctgggttggtttgctctggaatggctaactcttgcctgctttggttttagcttttcagcatgccaaagtcatgtaagtttgtgtcttgtggaagaaatcctctttgtggaaaaagaaacagggttttgaactctgttaacatttgaaaaatatattttcaaattcactttctaattggccaaaagagatgagttccagtctgaatacaggtagatattaaagggctaataaaaaatgagaaaccggtcgtccaaggtggatgctgtcaatgcccgagtgacacatgagagctgtatgaattgagagaaaaggcaacaagtagcattcttcatcattcaagttctacctggacacaaaggcgaggaccctggggttccaacaaagctcagctcccagattctctttccagtttcatcctaagttcctagcataaacactatttattttctgcagcagtgtgttatttttgcgcacttatacaaaatggtagtactactgtgttgtggtttttaaacattaaacatgtaaagttatatacgaaatatctgcttttggaataagcagaatgaggctaaacatgggttatacaaagggtatctggaaactgaagagcaacttgttagaaaactgacaatgtcgcaagatgtactcagttttgtttctgtgtgacatgcaatggcaactcatgtggacactattgaagggatgtgacattacctcctgtagatatgctaacagtgttattctttcatttccaagggttctctgtggctttgtgtatatgtttcccagaggtcatttgattacctaatttactgaactgatttagcagggaatggaatccattccaactattgcacgtggatttcccagctgcccctaaatatatatacttgtgagtggcaaagtggcactaatgaagcttttgccttttgtacatttgagatttttgtatatagtgtttgctgcaaggcctgtggaattaattcgttgcatatagaggtatcaactgctgcatgttcaggcatattataaaactttagtctatgaaagaataattataataatgtccaggtgcaatactctgtaagtctattggttcaagttaccgagagataggtgtgttcctttatgggggatgggggggtgtgttggggattctttgtattgtttatttcattttggtttattttaaaagatgtaaacatatattaagctatattaaatctcacatacagttcttctgtgctctattataccctgatagagatgggggagagaaaggaatgtttttgatggtggtttcaaagctcggacagtaactatcttgagcccattagagagtctgtgtccatatttgcatctggctggtcatagcctttgttactaatgatgacattcagttctcttttgtttttattttttaaaaactcaggtgtaattattatctgttcttaagataattgcaaatattaaatattatgatatatcaattcatgtgtttggcataccagtgaatgatgaagaacatgagattaatttaatttatcttcggtaacttgacattctggagagagactatcttctggagttgagtacaagcacagaaacatctttacggtggcatcatctcattttttaggaagacatgataatactgcccatcatattcatgtgtaactactgttctttcttctgctttcttcaccataataaactttggacaaccaagcaagctctaaccgcaatgccagatggccttgtccgagggcctagtgtttgcacggcagtgggaactgggcctttcctacaggacaactggcaagtttgctgggaagtcaaataatacattccacctggcagctgaaggcagccagtcagtctgtcccagaaagggcccttttcagcacccaaagctgggctggctgggatgcctctggctggtgaagttctcacataggctgatttaaatccagcaaaggtctatagaaaaaggcttgcgtgttcgttgagtaatcattgtttcattttcatttttacgagagtttgaaaatagacacactgttaacacttctgccagttttttctgatctttccagccccaccccctttctctttctctctctctctcaaagaaaaaaaaaatgggagtgcaaaaaaaacaaagccaaaaaatatatgaaggatagctgttcttctgtgttctctcattatggactttgtgaagtagaaacataattttttttcctccaaaggtgaaaaaacaatgcattcttgctttaaaaaaaaaaaagaaggctaaaaaattacctctttttaaattatgtgcaaaataattctggctaactgtaaaatgtattcaattttaggattttttttttttgtattgtgatgctttatttgtacatttttttcctttctggatgtaattttaatctcttgccattcattagtgttatttcattgtaaacgttattgtgccaaatgtactgtattcaaaaggatgtgaatgtgtattgtttcagaacctaataaatacaatgacgttaagtcttattttcagtgccaataagaatttttcatctccgttgtgagtggcaaagtggcactaatgaagctttttgccatttatatgttagagattcaaaaatttccaaacctaaacgtggtttcagctttcctttctccttggaagatgcacaaaagctgcaaatgaccatatttgcacattccccctgcctctgtgcttctgggctgtcagaaggaataagggggacccgtgccaactggacatggctctcagctgccttggcctgtctgccttgaggtgctgggtgataggaaagaaagcaggcggcacctgcatttttgtctttccagagaagcaaatgctggaccaccttgcaaacaatgcccacttgagcctcctcatgactcagttttgagcctgatgcttggaactataggccttggggttccagggactcctcctagggtgagagttccttgcaggctggcctggagcacagactggccagcggggctccatgcttagctcttgcccgcctcccccatgcagcccatgtctgtgcccatcctgccgactcccgggctctccaggttcctccttcactctgggactccttttctgccattccaagcatgttgccctggtactgcaagactcctcctctttctccagcacaaacttttcaagaatgtttgaaactcaaaagcaccctcttgagtacaccagaaatttccattggccaaaacttcctgttccttaaaagttacagaaatggggccgggcactgtggctcacgcctgtaatcccagcactttgggaggccgaggtgggtggatcacccgaggttggaagttcgagaccagcctgaccaacacggagaaaccccacctctataaaaatacaaaattagctgggcagggtggcacatgcctataatcccagctactcgggaggctgaggcaagagacttgcttgaactcgggaggcggaggttgcgttgagccgacatcgcaccattgcactccagcctgggcaacaagagcaaaactccgtctcaaaaaaaaagaaaaaaaagttacagcaatgattgcagttctactatttcttatcctaaggtaaggggatggactaccttgtcaccctctcgacttcctcataagccctccagtgactggcgtatctgcctgcaaggcctcttctctcacagtttttcctctctcagcaacatctcctgcccacctggagatcgaagcatgaatttccagacccaccccaagaaggatgtgtttagcacatagttttctctctgattcaagagttgtttctaggtaagtgaccacccaaggagaagcaaccgtcctaccagcttgtctgtcttatcacgaacttaaaattaggagaatcatcaaactcatagaggcagagagtataatggcggttgccagggtctggggtgggggtggaaatggggagatgttggtcaaactacaaagtttcaattaggacaaatacattccgaagctcga

SEQ ID NO: 484 - DNA, 366411 bp, Homo sapiens
  source 1..366411: mol_type = genomic DNA
aaatcacctaccaagttgccagtccctctcccttactttccaggagagcatctgatagcttctcttcttttttttctccttctccacccccacttccttctcctctttgtcatcctcctctttttccttcttcttccctgtctccaaattaatcttagcagggagtcctgaagcaaattatcatgttacaagcctaaatgtgatagcttgtcatctttcattatttttgacataaacaaaactgtcagaattctctgagacctgtctttggttcagggtgttctctttgaggccaggggatatataaggattacaaaaaggagagttgctccaacataatgaaaagaatgtaatggaaggttggcaatgatctccaattccagactagtgtgcacttttagaccattgcatttgaaggggctactgattaaggctgtaaaatgtttgcataattgtggtttattttatagagtagaggtccagggtcacttcattacccagattcattattttgtgtattcccacccccaccccaccccactgcaatttccttgaatacttagatttgataagcaattaaaaaataactgtctggcttgttttctgaagattggtgctttccacggactgagttgccgaagaccgggagagtgtgttttcatatggaaggtcacatctatgcatcagaggctatttatctttttctggccattcatttagagcagccgcagttttctgaagaagccacatgcaccacactccaacagcagagaatgattcggttcagagtgggtaatggcagggccatggtcttggtttagggatatttcagaactttaatattttggtaacccatgctctataaatcattgaattacatcaagtctatttaaaacccctctgggcagctgtttaaaatgctgtcactgcagtaagcaatgtccttagagtcacatggcaggttggggccaagaaggggatgggttttgtttgtgtttctttaactccagttaggtttaccctttgactctccacttctgtgaatagtccctccatttccagttattttaaagtcagaatatgaaggccgcttagtccatcggggttaagccttcccatcaaatcaaattcttcttccttgcattcttctcttcaagccatttagtgaaacaagcacaaattgttaacttcagattaatatgtttaataagtgaaatctggactatttcaggaaggcaggcaggccagcagtctggaggattggttgcagctgagggttcccgtgggcttctcctgggtcattgctgggagctgagaccacctgtggagcacctgtgggcaaggcgggcctaattaccccagagatcctggctttgctggtcttgctctctggcctccagatttgctctgattctgacaatgcagtgggtatcagagctcaggtccagaggaaaagcctggagtgagtgaggctgcgagcttcctcttcagaactctgcatgcttatcggggtgtaatgcctgcctcctgctgctgctccaagctcctccaggagaaggacgctgcttctgcctggtccaggatcgtatcagggtctgggtaagcatgtgcttgagtgcacaaaaagaaaaatgtagcgtcagcaatcttgttcagagtttttcgatccgaaaaaaatacaaattaagaatggaatgtgctactttaattttagcagacataaatattgtaaccttaacaaaatcaaatttcattttgaattccacactgcatgcggggtgggaagaggacatccttatcttttcagagccttgggccccacagtggtctttatccttctctggcacatagtgggcacttaataaattatccaatcagttcatgaatactacaaactaaaaacaggggctttgaagtcaagatctgagtctgactcttagcatcccactaactcgctgtatgaccttggacagataggacaacccttttgagtttcaggttaatttgttgggaggattaggtgagataacgcatgctatatattatatatgtggtctctattaataaggaatggtatatatctagcataaagtatgccctccattggatgtgcccccggggcacccataactgtcctgtcttgagagacaagtgctggctttacctctgcctttgcaggttaaggaaagagggcagaggggaggggaggcggcccaactttctgtgcctgtcaaggcagggttgggtagctgcgggctaggaggaggatgcaggctcagcttctgcccccgcccacagcctgcaaaccgaggaaggctggcccgcggctctcaggcagttctggctccggctctggctccggctccggctccgggtcgggctcccaggcagcggctcgggcaggcggccttgtggctccgcaacccaacctcttcccctccgggcgcctcccggctccggggtcctgctgcctctgggacctcctcacccccagacgttgctgtagtgtgtgtgtgtgtcgggggggtgggggggtggtgtggtgtgtgtgtgtgtgtgtgtgtgtgtgtgtgtgtgtgtgtgtgtccggggtcctgctgcctctgggacctcctcacccccagacgttgctgtagtgtgtgtgtgtgtgtgtgtgtgtgtgtgtgtgtgatggagttttgctcttgttgcccaggctggagtgcagtggcagcaatctcgactcactgcaacctccgcctccgggttcaagcgattctcctgcctcagcctcccgagcaactgagattacaggcgcctgccaccacgcccggctaatttttgtatttttagtggggacgggatttcaccatgttgatcaggctggtctcgaactactgacctcagatgatccacccgcctcgggctcccaaagtgctgagattacagtcgtgagccaccgcgccagcccgttgctgtatttgaacagaaaaaagcaatagtacataaaacaaaaggacagcactgggatcgaaagacgatctgctccttcggaagaaaacacagggtgcggcggtgactcgcagagctcccagcgccccagcgcccccgcgaggcccgggcagcgtccgcgctccctacagggggaagcccgccggtgtttgggaatcccagcggggtccccagcttgccgatctcccagccctgaccttactgagatttctcactaggtcactgtttgttaagaaaacagagtaacagaaacgaggcaaagtccataattttcttcttgcaaaattctcaagtttagggcaaaggcaaaggggggatggaagtgtgccccgactctgtaagatattccccttctcggagttgtctccagtgcagggcctttcccttgtctgcctgccttgagatgcttcctttattgctaacagactgcactgaaatgttatctctctctctctctctctccccttcctctctctcttgcttctgtttcttcctgagagtaggggaggcacattttcctctcccctccgtccctccctccttcccttcccttcctttcttcctccctttctctctgtcttcctaccttcctttctttttggttgagtgtatgttacttgatttttttttttctgataatgaccacactttttaacctgttgctttcttttaggaagtttgaccttttttttttcctctctcatcactcgcactctgccaaaatgtaaagcaaatgttcagaattaatttctaatatatgggtagagtcctcctcccaagccaggtcagtgaaacccctgagatattttttatatggtctttgttgtaatggtactaccagttttctacctgatagccctgtttctttctctctccctttcattttctccttccttctctctctctttttctttctgggacagcacaaggacttgttcaatttcatcttcatcaattgctagctttgtgaccttggataaatcatttagccattctatgcctccacttctttatctgcaaaacagagttaataatgtccaacctatagggtcattgggctgataaaatatattacatatcataatgtactctccacatagaatacactcaatggggactgttataataataagttatggtgctgctcttctgaataaaacaatttttctcatcctcaccacccacctctgcccccaaccctttaagaaaagtttggttaatgggttccaggctctgggatcttaggttagtcaggtcttcacagtccttcgacttaaatattcatatcattgtccccaaaagagagaccagtagttgcttcccacccgaacatctgtatcaaccttctagtctctctgcctctactcatgccctatttagtccattctctaaacagcagtcagtatggtcttttaaaagcaaaaattcaagagaaaacaagcaaacaaaaaccccaggaattccagattatgtcattccctttctggaaatccttcagtggtttttctcttgtacttaatgtgaaatctaaaccgtgttctccaagacgaaggcttgcccgtgtggtcccactccagcctgtctcccaccaccctgcctcttgctgtgtttccactctaggaccactctcccacctttctattctcttgaaggcaggacgctccccgctctgaggctctgcactcactgttcctggcctgaaactctcttccccgatggactcccagctcatatgtcacttcctcagagatgccatcccactacctgatctaaagtagcacccacaccccacccccagttacttgctatttactttaccttatttccatagcactgaaattatttattcatctattgatcaaatgaatgaacccacaatttagggtgaaaaaaataacttgtaaacaaccagctcaagccaaaagaccacagaaacaaatgcaataatagctttcaatgaaaggagagtcacaggattaactaatttctaaaatcaaaacaatgaaaaagattattattaataagaaatctgattctgtggcctgtggtcaggacttgggtgaatataattctgcacaaaagagagaaaatctgacttctctcagcctgaagaaggtggaaaaattttctccaagcagcttccgtgaaagtgagaggagggaatgggtttgttattgtagctatgacaatctcctatgtattctacacttacactgactgagtttgttaaggtaaccagattttgctcacctatttttttctcaggctctcccgaaaggcctgttttcttgacttaaaataaatgtttggcttctgtggagaaaattccaggctgggtacagtggctaacgcctgtaatcccagcattttaggaggctgaggtgggcggatcacttgaggccaggggttggagaccagcctggccaacatggcaaaaccccatctctactaaagatacaaaagttagctgggtatggtggtgcacacctgtaatcccagctactcaggaggctgaggcaggggaatctcttgaagctgggaggcggaggttgcggtaagctgagatggagccactgcactgcagccctgtctcaaaaaaaaaaaaaattctagaaacaacatatactaagcaattgggtcagaatttttcacgtctcaacttactccttctgaattgcctggcttgtattgtttagagcctttggctttgatggctttgggagtttgttgaactattgcagattttgtatgctttttccttgagtaatttggttttgatcaaatccccaaataaactttttcctaagttctttcccccttagtttacaagctcatacgtattccagaagaatgtaatccacatgcttaaattcatgtacactcagctcatcccagggtcattggcagggagatggatattcaaagcatatgaagaataagaaatgtttcctaaaacattgtgtgtgtgtgtgtgtgtgtgtgtgtgcctgaaataaagacatattggctcagaaccctaagtaggcaactccaccagttaggtgttactctgatgtgtgaaataggaaggttttaagcagtagatgatacaggtacatattattcaaatttaatttttaaaaagattatttctattttcctgttgtcatttctggattttccctctctattcaattcctgagcagatactcccagactagattaattttcctatgtgaaaagccaggtcagaaagataaaatagccatgtgatttggggcaagttaacagttaacaactctgagcctaggtttcttcatctgttaaatacagataaaggtgttcattctgaaaagttattgcaagaattagagatggtgtaggtaaatctcctagaataacatatgatctgtactagaatgttaacaaatagtaaatggtctgaaaactccaggcttagtaacattttatgaagttttatgctattatcaccaaagtcggttatcaggtaggtgtgtgtagaggagtgtgcaaaaaggaaacggctgcagtgtggccaggtggtcagggtagtgcccttggtagggtgctttcagaagggcttcttcaggagcagcagagctttctgacctaaatgttcaggcaacaagacactactgagcttagcatctatagtagatggtcaattggccatttggctaaggccaaccaaatgttgataagggtaacaatgggtttggggccacactttggaagacattgtcataaataatgttggacttgatgacttttggacttcaccttcccttccttttaaaatattggctttctgcagtgcagttctgtgaacagagcaaccacttctaaactgggatgtgaagagtctctttgtcccagcatgcatctaaaatgtgcatgaagtcaccatgaacatgaggtgtctccaggttctaggatctgcagaccacaggttatgttttttctgttaagagggagtatttagagggaataattaaaggcaagggaagccatcctaggcaatcatgggaaagatggtgtcagatggcagggcaaaccactgtggtaacctctagaagtaattatggacatctggattgatgaaaagacctaaagggtggcaggcattctgcatttgggactaggctttcccaaaggaagataaatggaaaaaacatgtttgccttaactgctgactcatggtacaaagttttaattcagagactttaattgaaaatgcagcaagaatgtaacagatttacattaaaaatattttagtatattggcaagacattaattacaaaaccagatggtcatggtagaaaaatcaaccaagaggcctttgtttttcttttgctttcttagcatgaaaaatttttactttgcaaatttcaatctcctgttaattataaacaacatcacctttgtattaagattaatgtaaagagtgattatctgttgttttagaatattaaaaaaaaaacagaaatcatcctgatcaaaacctagaatatgaaagcattcttgtgataaatgtttcatgaccaagacactagttctttctccccagaggctggactaatgagaccatatttcttggctcttattgaccatgaccactgtctcagtcaggggtcatttgtttacaacagaaggttggaacagaacagcctgaaatctgctcaaaaaggagggtttattgtagggatacaagagactttcagagaatccatattcaggggatatattgggccagaaagctcgcctgataatacatccctccctgtttctcttaaggcacaaagtatcttctttctgtcttcctctgcacacctgctctaggataaacacattgctttcccaggctggcttttcctgcttttctgaaattagtgctctgaacaataggcccaccatggctgtctatttgggtttagatctaccactgttcttttcatttactatgtgtcccatctgtcttttatccctctttctctcctttcttgtcttctgtcctttcttaaattaatttagttttttaaaaggtgttccatttcctactctctatttgcttgttgttatatattctttagttattcttttgtggttaccacagagattataaatatgcatccttgatgtattagagtctactataaattagtaccattaatacttctaggacaatgaaagaaacttccagcatttaagcccattgctatggtttgaatatatgaatatttacatcaccttcaaattcatatgttgaaatcctcatcttcaagggcatgacatttggagatgggacttttggggggcaattaggtcagggtgatagcactctcatgagtgggattaacgctcttataaaagagacccctggagagatcctgcacccgttctaccatgtgaagacacagcaagaaggtatcatctataagccagaaagcaggccctcaccagacaccaaatttgccttcatcttggacatcccaatctctagaactgtgagaaataaatttttattgtttataagccacccagtttatgatatattgttatagcagcccaaacagactaagacatccatttaccctattttggctattgttattgttgtcatatattttgtttctacatagttgtattctcacaaaacatcgtcattatcattttatttatttatttatttagagatggagtcttgctctcatcgcccaggcttgagtgcaatggggcgacctcggctcactgcaacctccgcctcccaggttcaagtgattctcctgcctcaccctcctgagtagctgggatcacaggcatgtgccaccatgcccggataatttttgtatttctagtcgagacagggtttcaccatgtcggccaggctggtctcgaactcctgacctcaggtgatccgcctgcctttgcctctcaaagtgctgagattacaggcgtgagccactgcgcctggccatcattatcattttaaacagtcaatattcattatgttttacctgcatatttactttttccatttctctatattcttcctggtattaccatgtttccatttaggatcatttttcttttgcctaaataacttgctttagtatatcttttacatagatatcctatcaacacattctgtttttattttgaactctactctgtggtctctcaatgagtttatcttctatctgtggtactttctgtgcccaaatttatgcaaataaattgttttcccaccttcaaggatagattaccataattatgataagtttttatagtgtatggtttaaaaatgtatcttttaccaaaaagagaggattcaaagtgcattttataactgaagacctatcacatgttaggttttgaaggcctactctgtgtcaggcaatgtgctagtcactggaactgtaaaattaaatgaggcatgttcttcataaaatcaaatgggcatatactattggagaagacagatgagtaaatggttacattaaatgtgataagaattatgcataggatattttaggaaccaaaggaagaacatccaaattagaattaagaatcagggcatatctcccgggaagacaccttggactgaattttaaaggagtaggagttgttgaagacccacgtgtcagttaagagtttggtgaggggttgcttcctggcttgtagatggccaccttcttactatgttgtcacatggacttccctcagtggacatggaggagagagagagagcaaacttctggtgtctcttcttataaggacactaatcctataggatcaaggccccacccttacgaccatatttaatcttaattacttctgtagaagcaccctgggggttagggcttcggcatataaattttggggggcatggaaacattcagtcctttatagatagatgggttttatgaaaaagacagaaaagctatttttgtgctgaagtagaagaggcagtaagaagggcaatattaaagatacaggagagagagacaacatgggttgttgaaatgatggccaccaaaagccaatgcataaagtccttaaaatagcctattaaaaaaagatgctaaagcataacattggatcctggagggaaggagaaaggaattggtgccagtgacgacatctatagatgttttgggaggaaattgccacctagtgttaagaagcaaagccatctgagaatgtggtgatggtcaggagtaaggagcttagggtaaaaggtggaaatatgattgctgaagggacagctgtaccaagagacaatggattgataatggcccagtttccgcctttggatgatgatactagtttaggtaattgctttacatatatttgaggttgctaatctgctcagccgtcactaccattttgcaacagctctcatctgaagacggcaaattgaaacttgagtttaaaatcctacctttgagtccagaagtacaggatagggaacaatacagtagcagattacattaaaactaaaagtaattttagttgacaggactataaaagttagtgctgctaaatgactttttggctgcataaatacaatatctataccaaagaaggtgaaagcccctttccaatctgtgcctgtcaggacataactggagaattctgaccagtacacgttaagaacacagataaactatgttatagttacacagaacaacagacaggactcatgctttgctatgtgacacgtgaacatagactcccagggacatttaaactggaaaaaagaagattcagcaataagaagatcattgtccatttaatcagtctattcatcttttttattaagtgctatcacttcaaaagatctttcacacctgcaggcttattgcatccctatgacttctctcagacatagggacattattgcccagacttcacggacagggagactaggacacctagaggataaatacaggagacagtttgggcaactgacattcaacaacttgctcagccgtctcacttctgactttcatgataaatgttttcttttctgttctcctttcgtagcaatcctcccatccttcagagctcagcttaaggtccctatacaaaggcttcctctgcctcattgagccctcactgattttcatctcctttgaaatttgacaatgttcaaaacaatataaataaaaggacatattttgccatgggaatgtaatacttgctgatatattattttttgttgtttgctctagttttagatgtgtttgtcacctctccctacatatagtgagagttggggttatgttttattcttttttcttatgtcccatagggcttagcccagtactaatttgtttcttacagttatgaaggctgagaagtccaaggttgaggagccatgtctggtgagggccttctggctgatgaggactctctgcagagtcccaaggcagtgcagggcatcacatggtgagcgggctgagtgtgctagcatgtactcaggtctctcttcctctgcttctagagccaccagttcccctcccatgataactcattaaactattaacccattagtccattcatccatgaatgaattaatccattcatgagagcagagccctcatgaccgtatcatctcttaaaggccccatctctcaatattgccacgttggggattaagtttcaacatgagtgttggaggggagaaacacaaaccaacactatatctccaaggctgttcactatgcacacttgcttgaaaaggtgatcggaaacaaaagacagtgcctccacttgtgaggtgcgtagagatgtgagagacccatggagaattgtcttccaactgtagataattctcatatattcccatgttaacattttagtagctaatcagaattgccaatcaaatccttgacattcttctgatcaatagagtaggtcatcaaaactggaatcccgtgaggtttaaagtaattgttttgtttgtaaaatacatcctgcaaatatttttatttttctgaattgatccttaaaaaaaaaagttattcttgactggtctgaagcatctattgtccattttaagctttacatctggacaactagtttccgagacttcatgtatttaagtgtatttaagggcaatgctttttattttctctgcattagccatccactggctatttatttaacaacaatcccattgcactgaatacattgtccttcatgatgtagcctcagccttcttcaaactcattcacccatgtatgctctgccccagcctaattactggaagctccccaaacatgaccggttcttccatcctccatgccttatgtacactgtttcctctgttggaaagcctgactcgtcaagcaaactcctacttgtccttcaaaactagacttgtgctttacctcccctccttccctatgtcccctaagtggaattattgacctcttcgttcgtgacatttgttcatttctataatagtgtatattatattgcattgtaattatttgtttacataatgatctccccacagttagcgtgtgggcagaaactatgtctctatattcccagtgtgaaacatagtagatgttcaacaaacctttttctttgaatgaaggagtacattagtcagacttcctagttaggagttactgaaacagactcaaatggtctcaggaaaaagtaaaggatttgctaagtagctactgcagacagatcaaaaggctggaaggctatgtttggaaaatgggcaggatgtaaggaaactaaggaggccaatcagcagaaataaacagattttcactatcatcttatatttgtgcatcattcccatgagatcctcaggctggggagggtgttttattgactgagcctgtgtcactcatggacaaactgggataaggttgacctacccccttaagcttgcaaggctgagggatgggggaagacgctacttcccaccaagcttacacacaatgggggaaaagcaattatctgaaaggaaactggaatgtcatcagtaggggaaagaaatgtgtctaactccaaaaaatgaccaatatgtactactaataactgaaactttccaaaaaaaagagactatgatttaaaaatcaatttaacattgaatggtttgattatcagcaaaatcaccatgacatttagcacctttcttttccttgatgaactaagaactcttgcatagatttaataatgtgttatgtaccccctgggtgtctgatttactgacttgagctgaatgattggactcaatacaaataaaaagagcttgcaaacttcgcccatggtttcccagacatcaaggaactaagctcttttgctccctggagaggctaaaaattctaaaatgaagtgccctctgctctggtttctgcttttcagcatttctcttctgttttcacatacttttgctgctttaaaattaaatctaagaaactcattccatatttttcatcatctgcttttgaaagtgaatgttatggatttatggtttgggattctttgatgttagagcagcaactatgcttgcttcacttgtttttgtttcatttttttttttacatttatgaggctttgataatttgatttattaaaatgccacagtcaatgtaggggaactgacaccattcgcattgttggaaagcgtcatgaaacatcaggcgctagttccccatggagcgcttacctctattattatatctccccctcccctttggtcttcaggaaagtttggcattaaacttaagctgcacgcaaagaatattcattcctagaacatttcagtatttttggattggattccatcccccaattttgattttgtatctgccaagatgtacagagtggtacatctaaagctagttatgatacacaagctagctttccttatcaaggaacagaaatattccttcctcttaccctgtaatcattgcatatctggtatattaaaaattgaatttcatatcgtatccctttaaatgtattaacaagtgcaggttggaactttacattatgaatccctaaggatgagtaatgactaaaggacaagactgaccctttctgcaagtggagggtgtttttttcttttccatttctataggaagagacagatgaagagagagggagagaaaacaggacaagtttacccagaatgaaaacctggataagaagattaccataagagcttaaaaccatagaaaaaaatgtcagggttggaaaagtccctagactcttcattcattataattccctctaccagtccactgggtttcaggaaaacaggaacactcatatgctactgtttaagtgagtgagtgagtgtgtgtgtgtgtgtgtgtgtttgtgtgttacaggatattataagaatagaatagggaatcttccaggtatctgaggaatagaaaaaagccaggtcacatgggaaccaggactggaaagtcagaaaccaacaggattctatctctttccatttgtcagggactacacagtctctttcttctcctcaaaattgaccattcagctcacagtggaatatagccttattacagtagtcaatccttatccaaggcttaatttttttgtggttttagttacccacgattaaccatggtctgaaaatattacatacaataagatattttgagagagagagagagagactatatttatacaactttcattacaatatattgttaagtgttctattttattattattattgttaatctcttactgtgactaatttataaattaaacttcatcataggtatgtatgtacaggagaaaacatagtaaatgtaggattcaatactaccggaggtttcgggcatccattgaatgtcatgaaacatatttcccacttataagaggggactagtgtatattttttcattcaacaagaaaataggcaattagaaaagtcagaaaatacaaaaaatcatggtttaaacatgaagcaaactaatctatgggattattttgaactgatgaagtgtcaagagagagaatccgtttaactgtggtactcggaatattcttagcgtgatgcaagtttgataacaagaattacaacaccttcctaatggattcattcacgtgacctaataataataacaataatgaacacttattgacattttactatgtgtcaggtactgtgctaatgctttatagattatttaatcttcaaacaattatttgagggtaggtattattatctcatttttttcagatgaaaaattgaggcatagagagattgagtaactctaccaagtcacacggctcttcagtggcagagctattctaagccgcatgatttacttctatgatatattgcttctggctaagctatgttatccaatcagcaataaattatttacacaatcattattataaacgcttttttgattttttaaagaattattctataaataaagcatgtgacttgattataataacaagagaatataaacattatcaaccttgatcacataaaaatagtaatataaagttaggggaaagagaggggaacaaaaggaaaagaacactgacttcctcatatttctcagtaaaagatattatttaacattactacatcaaaaagctgtgtttttaaagttataaacatagccaatagaactaaaaataaaaacaggttaacaaaagttggaagggtggttaatatatgtgagtcaaattcgtaattttttaaagcactattcaagaaatccttgaagttgataagcaaagaaacagtataaacatgttatttgaattatgtagatgactaccaggaaaaaaaaactataagcaagtgaaaaccagttacctacaaaaagtgagcctggggtgctgattatggagtgagatttttactctttattttatttctttccatttaagtgattatttccatgtgcacacattactttttataataagaaccatgcccatattattcacttcggtaaatctacatctaggtttccatcccagagaaatgcacatcatatacatgtaagtggcaccaagtgggatgaggggcttcttccaaaggctggaaccacagccccccagggggctctgggtaaacattcctagccccagtggtcttgggttcttttgtacctatctgaatgctattacacgcccacccatcccaaggttcagcccagagatgggagaaaacaaggacacttctgaacttttcactcactcttctcttttacatagtcccaggtgggagttccacttcctcttccggtctgtgtcttaccattctaatcccagggcacaaaaagcctcaaggtttcgccttaagggtggatggggtacatgaaggaaaagtagcttacagaaatgggtacacaattttgggaggtatttgaaaggtattgtctcctgtacatatatagatgcatggaaaatggtctgcaaggatacaggccacttcaaaagcagttggcacctctagggagagcagtgggggaggggaggatgcattcatgtaggacacaggtaattgtgggtttttttggtgctatggacatttatttagtgcttttgtatgttttacccattttaatcatcacaatagccaagtgaggttagtttttatctccacttacaaaaaaattaatagactattctttgaaaagttttaggtttacagaaaaatcgtatgggaagtatagagagttcctatatacttatcctcacgccctcctccccaatttcgcctattattaatatcttgcattagtgtcatacatttgttatattgatgagccaatatgaatacattatcatgaaccaaagttcatggcttacaccaggtttcactcttggtgtacatcctatgggttttgacaaatgcacaatgtcatgcgtccaccatgacagtatcatacagaatagtttcaccaccctaagactccctgcgctccacctgttcatctctccccctaattgatttttttaaaatccctgattatcctgcttgccctgcatgcatttccctcttacccacgaagtgaaacctggtccactgcacctgttccttcagttactgactgctgcctgtgataatagtagcatgagtggtcttcaagcacctcatatcctgccactaccgccacttgtcaggggaaaacccagacaggatgagatccacattcccagctgtccctgtcttccaaggaagagaaaccctaaaccagaagctaaagagtgaaaccagatatcccagggaaggggtgggggacgttaggtccccagtggtctgcgaaagaggtgccaagccagaagccccaaagtgctgggaaagccagcacagagaagcagataatgccaggaaacatctcaggcatggtggaggggcttggggggtactcaaatgacaggactgaagatttgtgaggatttgtgaggcactcaaaaattgcagagcgattatgaacactagggagctctcctgcttcctggaaaaaatcaaagcctgactcccaaggttggcattgggggcatctcttgtggagacagctcagagtgaggttgggagatacttttctaggaagtgtttttcaaatattttttaccgtgacctacggtaagaacatatttcaggttgagcacggtggctcacatacgtaatcccagcactttggaaggctgaggcgggagaatcacttgatcccaggaggttgaggctgcagtaaaccatgttcacaccactgcactccagcctgggagacaaagagagaccccgtctcaaaataataataataataatatatttcatattggcatctagtgcacacatgtggtgcacacacaaatacccacacactttcagcattagctgggaacttactagaaatgctagcaataatcagaatctgcattttaataagattcccaagtaattatgatgcatagaaaagtttaagaaactgcttcggggtccccaagctaaagatgagtaaattataatgtatttaactaatgttaaatacattagttaatctcactccttaagtttcctcccttggcaaccagagccctttataaattgtctaaatactgcaggctgggattctgttttccatccctctaaaaacctcaccacataataactaaaactaataacttacttgtattatcaagctaaccatgtgccaagacctgttctaatgctttacttctattaactcttaatcctctttgttactttagtaaggtaaattccattattttgcattttatgtatgaggaaattgagggatagaaagtttaaataactttcccaggtcacgtaactaataaatggagaaataaaagtataaaaatacaaaagggaaagagtaagagcaggaagtgtataagggatagaaaatggtcaacaggccaggtgcagtggctcacacctgtaaacccagaactttgggaggccaaggcaggaggattgcttgcactcaggagttagagaccagtctgggcaatatagggagaccacatctctacaaaaataagaaacaaaaatattagtcaaacgtgctggcacatgtctgtggccgcagccactcaggaggctgagatgggaggatcacttgagcacaggaggtcaaggctgcagtgagccatgttcatgccactgcactctagcctggacaatagagtgagaccctttctcaagaaaaaaaaaaaaaaagaaaagaaataaatagaggtatagggcattctatctagaattatggaggttaccaccaaaagaactaaaaacaagtttaaatgaattatttctagagaatgaaactgagtaagctcttccatactattttatttgttaccatgtattatttgttactgagtaagctcttccatacttagtaagttcttccatactattttatttcttaccatatgctttgtattattttgatgacattttaattctaatttaagcttaatatagtatttaaaaagtcctgggttctccttgggaccagaactttaaaagataagaaacactcatgaccagtgtcaccaacattggagcaacagtgaagtctaagcacatgatcttcaagaggaaagcaactcgtccgtgagcctggaggtcctcctgcacctggaataattatttccatggccaacagtgacagatgggcttcattgtgtttaaagagcccatgggtttccttatagaggaccaaaggccttcaagagagccctggccctgccccactctgtcagtcaggattctgacaggaaacagaagtagttgagattctgaaggcaattccataaagtgatgagttactgaggcatgggaagggtagacaagccacaggggatgctgagcaaccagggactagcaaccttggaagccccattaccactcctgggcttccaggggagaggcaaggaagcccagtgggagctgtagatgtgattgttgctttatcctgaattcccttagcccacatctgagttgacctgtgtgaggtgagcacttcctgccgtgctgacagcttcccacctcctcttcccacctttcccaggtgtctctcctctctgcttccctacctgagggctttccccagttcaaggaaactggttcggcccttgcacaggacagagctaaaatacaggtaaaacacccccagaggcaacaagctaactaggaatggtagtcggtggtgaatatgcaacattccttggtcgggagattctgagaggaattccgtactgttcctcaaagcccagtaggactgatcctctgatgcccacagtggcaaatgttcatcaaagctccctcttttgggttttcttccttctctgtcccatttctccttttcctcacatgtgcttcctggcatcacctctctaatacatcatcttcagccagcacttttctcagcatccacttttggggaaaaggtaccaaacaatgacaccatggaaaggaggctgcccattagagtctgtaattggagggagaagggaggagttaagataggaaggtcaagttcagtttattggtttatttctatagttaagataggaaggccaagttcagtttatttctatagctgctgtaacaaattatgaaaaacttgggggcttagcttaaagcaactgaatttatcttctcacagttctagaagccagaagtctgaaatcaaggtgtcatccgggctgcagttcctctgaaggctctagggaagaaggcttccttgcctcttcctagctcccagcagttcttggcttctagctgcatcactctaatccctgcctccatcttgacattgcctttttctctgtgtgccctctcctcttcttataggaaaccaatcattggatttggggcctgcccaaattcactgtgacttcgtcttaactaattactttcacaagaccctatctccaaataaggtcacattttgagtttccaggtagatatgaattttaggggacactaatgaacccactataggggggaacatggagaaagataggggagtactcagacttccatgtctttccatccaacaatctctttcaagagaacaaacccaattagaagcaagagggcaaatgagattgggatatgcaatatgcagattcagcatcctggggtccagagaaaggtgaaggtgacctggagacaggaggggagcaatggggagtaatctgcctcttttgcaaaggctttatttctcctgtgattagaaaaagaaaaaaaaaagatgttggtggggcacggtggctcatgcctgcaatcccagcactttaggaggccaaggcagatggatcacctgaggtcaggagttcaagactagcctgaccaacatgaagaaaccccgtctctactaaaaatacaaaattagccagacgtggtggtgcatgcctttaatcccagctactcgggaggccgaggcaggagaatcgcttgaacccagcaggtgcaggttgcagtgagccgagatcatgccattgcactccagcctgggcaaccagagtgaaactccatctcaaaaaaaaaaaaaaaaaaaaaaaaaaaagatgtactgacatcccctaagggcccatgagattctgcatcttcctggggtagcactacctgcccacaatagaaaggatgcttatatggcagggtgggagggaggggcaacaactgccctggcatctgaggtctgactgggtttgcacatcatgtggaaccctgtccctgtccaagatggagcatactgctttctacttcctgtccctgctctggtttctccttgtttccttgtgcatgtctggattggcacaccccaatacattcggaagactcaatccacttgcacatgagctcctggacattaagtcccctttggtttatgcttttgatgttttctgcccataccacccaattccctaggcccaggttcttagctgcagttttttattttgcctaactcaggaattcttacagcagatagatgttttcaatttactagtgatgaacataaacctctcttttaacataataattatggatccattaagagctactatttattgggtacctagtgtctgctaagggctatgctaagttttctttataatattactttattcatgcatcaacatgatctaacttaatcctctctacacttgaaaaagtaggcattatcaatacagataaggaaggtgagatgaagctatttgctccaggtcacatagctggtttagtggcagagccagaattcaaattcagtggtgacagactaaagacatgctcttctcactcatgtttcttcccatgaaactgcctggcccggcagcgaaggcagctccagcctttgatttctgtgttgtccccagcctgacatggacattagtccggtaaagaacaagcaaataccaaatgtatggctgtttgaatgtgaaatggggtttacattagaagcacagaaaccaagcgcaaatcaaatgtgattatgaagtgacaactgattttttttttgaaatgtcccttctttgaaatgttacctggagagatgaaatgtttgatttaatcagtgtttaattacaaagtatttactgaattctcttatttaaaagaattgcctttaaatactgtgatccctttcatttattttttaattttaaaaccatttttaagtgtatggttcagtagtggcaggtatttatttatttttttattcagtgaatatttattgacattttccagatttgtggcactggggaaagtactataagggacaaaaaaaattataagacagtcttcacattcagtcagttctcagtgactttgtaataattgtttaattttgaaagtgtgcttaactttttgtaagcaactaaaaattattcagcaacatgtttgagtaaatgaggtgagaatccaagctggatattaccattttctatcaaaggtgagacataatccccaagttatgagattgaattccttgactagttctgaatataattttaaaggtgaaagtcttaagattctcaatgattccaaaaatcatagagtcctgaagagcgcgtctttaagcgaaccaggcattttctatagcttaaataaggtttcacacacatatatacccatatttttaacaacgattgataaagtaaacaataatcttaaagcactattgactttatagcagccttttgttcattaagaatacacaaagttcaattaccattgctatgatctgaattgtgtccctacaaaattcacttgttgaagacctaaccccaatatgatggtatttgtagttgtggcctttgggggataattaggtcgttagatgggattagtacctgctatggtttgaatgtgtcccctaaagttcataagttggaaacttaattcccaatgcagcggtgttgagaggtgggatcgttaagagttgattaaatcatgcatgctccaccttcatgaacggattaatgccattatcaagggaatggctttgctattgagagagtgggtttgttataaaaccctcctcttgctctctcatgctctcttgcccttccatcttccgccatgggatgatgtagcccaaaggcccttgccagataccggtgctatgctcttggacttctcagcctcaaaaactgtaagaaatgaattttttttctttataaattacccagcctgtggtattctgttacaacaatacaaaatggactaagacagtgcctttatttaaaaaaaaaaaaaaaaaaaaaaaagctactcatccacccaggaagaaggccctcatcagcaactcaactatactggcaccaagatcttggattccagcttccagaacggtaagaaataaatgtctgttctttaagtcacccagtctatcgtattttatcatagcatcccgagctgactgagacaaccaccaagagtaactatcatgaagcaatgagtagggacaagcctcattttaggatcattaaaggatccttatacagcttcaaattacagaatgtcagacatagactggaccatagtgatcatatgatccaacagtttccaaactcagggtgccataagcctttgtgcaaacttttcattttttcttttagatgcaggggatttgttacatgggtatatagcttaatggtggggattgggtttctaccgtacccatcacccaaatgttgaacattgtacccaacaggtaatttttgagccatcatccccctgcttccctccctccttttgaactccctggtgtctattatttccatctttatgtccatgtgcacccattgtttagcacccacttataaatgagaacatgcagtatttgattttctgagttagttcactgcaaatgtttaaaatgcatcttagggccaggtgtggtggctcacgcttataatcccagcactttgggaggccgaggagggtggatcacgaggtcaggagttcaagaccagcctggccaacaccgtgaaaccctgtctctactaaaacaaaaacaaaaaacaaaacaaacaaacaaacaaatatatatatatatatatatatatatatatatatatatatatatatatataaattagcttggcatagtggcaggcacctgtaatcccagcttttcaggaggctgaggcaggagaactgcttgaacccgggaggcggaggttacagtaagccgagatcgtgccactgcactccagcctgagtgacagagctagactcggtctcagaaaaaataaataaataaaatgcctcttggacaccaggacgtacagcttggtgagtaaagcacatgttgcattccagcttccacttgccctcttgggcaccaactacccacccatatctatcagcctttccccaactttacctgatgatacaaattacctggggccctggtgtaaaacaaagatttgctgatcactcccctgaagattttgattcagtaagtctgaactgtgactttgggattctgtacttatcatgataaccttcgtgatttaataaccagacaaaatgaaaaacattgatttagacccagccctcattttacagatgaggtcaagggggatgaagtgactttccaagtcccataatgagtcagtgaacatcattggaataaatgtataggggtcccaagtgatcacattaaataggccaagagtcctttctctctctctctctctctctctctctctctctctctgtgtgtgtgtgtgtgtgtgtgtgcgtgcacgcgtgcattccatattgcctgggttgaattagagaagcagaagcactatgaatgatatggaaggaggcattgcatatagggattagaccacatgcaattgtgggagtgagaggaggaatctagcgttaacccaaaagtccaagtaaatgccatgctgctgtctctgcatcttgtgttggggcagcagttgggaatgaaagctgaacatggaggaaggcaaactggagcccacctggacaactggaacccatgaggacaaactggaacctgtctttgtctctaaacacttccaggcttgatactgaattgccctgcagaagaagctggtgccctttgccagggagtggccatgatacatggcccaggacttggagaagctgaaggaagagctcgaggaactgtgggttgcagtgatatgcccctgtgtgaggtaagctagaagaacagtgacagcgtgcacagtgccgcagtgcatggcacctacgccaaccttcggagcctcaacatggacactccatcacttccacaaacttctctcgtgaccatccctatcccagaaacaagaagagaaagaaatccttagaaaggcagttccagcctggctaaatgaacacagtacaaaaccaccacgtgttcttgtatagcttttactggattgaaagtgccaagaaagttctgttaattgttataattctacacaacatctagtaggatgctttgcatatagtaggtactctgtaaatatgctccatttggatgaaataacctaaatattagtcttgttggtttgcagtcacacatgagtaggcaagccaaacacagctgtgcagccatcagagtgcagaagtgatctctaatgactgcagcccgctcctcacccgcttaattgcttctccgctgtggctcctaaactgccaagtgcaccatgcatttaatatccctccacacttaagattgctcatgatctgaaatcgtgtcaagaagacttgaacaaaagtgggaaattaagatccacagtaaaatcccttgaaactcagagtggaaaaaatgacaaaaaataacctgccacagtcctagccaagagggcagttattataactggagaggcgggagtgaagcgattcagcccaggtgaagaggccgccagcagcccccatatccacagcaccagagattttttccaaatcccacttcaaatctcataatccctccatccttaactgctgaggatgaagtcaccctttccttcgtttcagacagaggctcaccacttctgctttagggcactgctgtggtctagcaagcctgtggctttcaggctggcttagaaaatccaatcgcacatggaaaaacacaatataaagaattatggtctcttttcctcctttataaatagatgtcattaactttggatcaagcaagggcataactgttctagatcactgaaagaattgcagagtgtttttcaatactgtcgaatggatggactttcctgttgcagagcggttgtaactatgctatcattggaaggctgagaagtatcaattttcagagatttgtcactctaaaaaacctacagaaaatggaacagaaaatagaatcagtaatacatagacatgctcacatctgcatattgctgatacttgcctgagttatctaaaattctctggttccactcaaaggattttcaagaaataggaggtttttcttttctatgtttcttcttcattctgtcttatgtctgtctgtctccttatatccatctaagtatttatctttctgtatctatgtggtgatacagtcatctgaaagccctggttaatgtagaggtagtaagtcattcattcattcatcagacattttatgagcaaccactatttggcaggcactgtgctaagtgctgagtatacaagggtaaataagttgcaactcctgtccttggatcttaccagtctattggtgggaacaggcttttaaacagataaattgcaagatgctaagagtaaaggcagcactgagtgctccgtgagcagaggagggagcaactcactgcactgaaataacattttccagttgtctcagagaatcaccctcatgcacacatttcctgggccataaaatatccttacagatcattttgagttagtttttcagggttgagctaattcagtggaatgaggggttgtctttctctgccaaggcctacccttatgtcagggagagaggggtgggtagagaaaaacacagggacaggcaggaggggaggagggcccttgtctctttgcctgccgtgggaccagcacatttaaattccttggtgctgttagtgaatcattaagttgttacgaattttggatgtgcgtgtttgtctgcccttctgaaactcccgccttaccctctcttctgtctcccacttctttttaaaaaggtcagcagaaatcacaaagtcaaggaagagtcttggtttttgtccttttggtggattaacccaatcacattgtgacatttgtctgagtcattaggaaatctacattccaaggtctataaaatcccatccatgcctcagcagggagaggagaatgcagagttgccaaacttcacactctcccaatccttgctgagtctaaatttggacccaaatgcaaagaactggggttttgtattcatttatagctggcaaaaggcaactgcctagtttgtgaaaaaggacttcatggccatcaaaagctgttatggtgtcacgtggtgatgcgtttaatgtaaatgaatctggaacatctggatcaaatttcctctcaaataaacagggctatgaaaactagtgggcaaaaatatcttctggccaaaggcattctgggttattcctgaaccccaactgtctacagcagtgatttaagaaggggcccagcagctgctctgctatttctccctgcacctgggtctatggcaaatgaatctgaaacaaaatggactgaccatgtaaccatcattgttggaattgaaaaactggagaaatgtattcatttaacaatggtttactgagcacctactataagccagctattatgctataatctggggatactacaggaaacaagccagacccagaccctgctctctgggaacttatagtttagagacaacttagaggcacacattaaacaagttagcatataatccatatagtcaggaattctaggaattctttaggcacacattagacagcatagaatatgatggttggcgtaggtgctgtgggagctcaaagcagcccacgtgagtcacactgtggggggtgtactgagagggtgtttctgaggaagtggcctttgggctgaaagcttgagtatgtctgtttaaccatcgtatttctcatcacccatctcaatgtcttgtacctggcagggccttaagaaatgtgtgttaagtgaatggcttctccaaacaatgcggagagttaggtggggagggagtgggagagtagaagaagtgaagggcccattcccaaggtcagggttaagagtttggaaattgctggatcatatgatcatcacggtccagtctatgtctgtcattctataatttgaagctgtatgaggaccctctacaatctcctaaaattaggtttgcccatacccattgcttcatgatagttaatcttggtggttgtctgtcagctcgggatgctatggtaaaataccatagactaggtgacttaaacaacagacatttatttctcaagttctggaggctggaatctaagatcttggtgtcagtatagtcaggtacctggtgaggactcttcctggggggtagttttctccagcctcctcccaacctcacccttccccatctgacccctctttctctcctggtagtgagctttctcttctatctcacgtcctgataagtcattgcagtgagagcccaaggtcactagggtttgatagatagcttcctagaattcctgctttcaatgcatttttggcctgtgcagattcattactttctttttgtccagcaaatcatttaaaaatcattgtttaaatcatttatgttatactttatcagaaggtgttttcagatgttctagttgagcatatttctggaaagagaaaggaaagcatttatatcttctctacattactaggtgaaaagctttctgaggagggattattaatctctgtgccaattaaagatcgattgcatttatcttattaatccttgtttcttattttccctgggcattatccacagaccctagcacagtgattaaacagttagatgccgtgatggttcattgcatctctcagctttagctaggctgtggtgccaagttctttgctccaacaacagtctagatgttgttgtgaaggtcttttttttagatgtgaggaacattcacaaccagtagactttaagtaaaggagagtactcttcatcatgtaggtgggtctgggtcacatccaactgaccaaaggccttagagcaaagactgaggcttcccaaagaaagaatcctgccttaagattgcatcagagaaaccctgcctaagtttccagactgctggcctgccctgtggatttcagactcaagactgcaacatcaactcttacctaaatttctggtctgccagccagccctgtaaccttcaaatttgccacccacagttatgactcagtttcttaaaataaatctctctctctccctcttgacatataaaaatatccaattggtctgtttccttagaaaaccctaactaatacagatgctcaataaatatttatatttattggttaaataaaatatttatgaacaataggtatttgataagtgcttgttatttaattgtgtgactttttgaagcctctgccctgaggtctgcctccctttcagggcttgccatgtttcgatagaagagtacgaccctgctatagctatgttccactttctatgttgcaataaagcgttggcagatatttagaagtatgtgccaaagctttctaaatatctgccaaagaatgggtcccattcttcaagctgtatccaattttgtgtaatatagaatacccttgtgccagtcgcagaattgagactgctgcttagaactggtaagggttttaagacgcatccaggagaacaacaagggcttctgggattccacaatctactctgcccaactttgcagcataaaaattgttagcaaattttatacaccctgctggctaataaaatgtgtggcttggggtttgcagcatttctggggcatttctctttacatttattttgttattcagatcctagccaccttttgctgtcaggttggtgaaaagcctggggataaaaaaattaaaaaattggggccgggcacagtggctcatgcctgtaaatcccagcactttgggaggccgaggagggcggatcacctaaggtcgggagttcaagaccagccttgccaacatggtgaaattctgtctctactaaaaatacaaaattagctggatgtggtggtgcatgcctgtaattccagctactcaggaggctgaggcacgagaatcatttgaaccagggtggggttggtggggttgcagtcagctgagattgggccactgcactccggcctgtgtgatagagcaagactctgtctcaaaaaaaaaacaaaaattaaaaaaaattaaaaaaccagaaaagtcaaaggttgcaaagaaataagaagcagctgtggacagaaggacagagatgtttgcagaacttctgaaggatggggagcccagcaaatttcacctctacttttccaagtttacacttcacacttacttcactcccctggcaaccccttcacagctttctaggcttaagagaagctgggctgccgaagggctggttcttgagatgttgtcatgtggatggttttgactcggctcgaacatgagagaaagagctttcagttactctgtgtagcctggtgtacaaaagtaaggtaatttttaaaaaattatagttaatctaatatggctgtttctttatgagaaaaacttggagccaggtcagggaacaaagttattctggcgtttaaaaatgtaaaacggttgcatactgtggaatattatggccagggctgtgtctttctggaactctttctggagcccttgatctataccttaatctggaggtagctagatcggcatatacatttgtaaaaattcatcaagctctacactttagatttgcaccctttactaaaagtgagctgtgtttccatttttaaaagagagagcgagagacagactgggcgtggtggctcacatctgtaatcccaacactttgggagatcgagtcatgaagatcacttgagccaggagtttgagaccagcctggacaagatggtgagtctctcccatctctaaaaaagattttaaaaattagcttggtttggtggcccatgcctgtagtcccagctacaggggaggctaaggcaggaggatcagttgggcccgggaggttgaggctgcagtgagaggttgaggctgcagtgagccatgttcatgccactacactccagcctaggtgacggagcaagaccctgtctcaaaaactaaataaataagataaaaaataaaagagaaacgaaaaaaggaactcatagtgtagagggcagattagtgctagttcttcttctgagtctccactcgcacttagaggagcagctctgtgtctgcttagtccggcctcctctatttcctgtttccacatcttcccaacctctccataggatcacctcagcctcaacaggaacatcatcagcttcttcctcctcactaactaatgggaatgccaccagaaccttcctgatgtgtaccagaagaagttggggccaggccagggaggaaggttattctggcatttgaaagaatgaaaacattgtcctgtgatacacagatgtgcactcagtatccacagggctggctcagatgtcagccgggatatttgacaagcaacttctgctctttgaaaacccctcttctactttttaaaagaattcctgttcttttaaacttctttcaggctagaacagatatgctaaatctcatgcaaagacaaatacagggcctgtcttggaaccatatgaagattgagttttgattttatcttctgtttatttctctggcagagctgatgttatgttcatggtcagtagacatgaatgtggaactactcggacccggcgcgtttcgttccccagcatgcttaccttgacttctctttcatttctattctctagttcaaccaaattcatagaagcattatctactggaaaatgaagttaaaacaagctgggttctctccaaaaaaagcaaaacttgaaatatttcttaaagggagggaaaatacatctgccccactcatcacaatcttcttcccatgctgtcggcctttcttcctctctccctctctctgtctctgtctcgttacctttcaaccctataccctcttcaacactgtgccgtgcaggtaagcttctgggaagaaagcaaacaagaaacggaagcatgactgagctaccccctttctcaccttataggtttagtaaaacatccgccttcattgttgggataagaagctttggtaaggaaatgaatatgctttgctaagtaaatgaaccagatttatgggcacaaatgtatgcttttgtacattccacactggccaggttcaccaaaataaaatgttctcctgccccaccgccccccaatttcaagggaaaaagagcttaagtggaagcaaagcatatacagacagagagtttggcagcttaaaaaaaaagtctttaaaatttttagttgaaccttggcttttgtctctaagccctcagggggaaaatgtgagcttgtttcctcattgaaaaaatatcatggcatttgacaggctgaattctttgatcgtcaaatgtttcagtgatttctccagtgctcccccgatgctctgtccctcttcaccccccacctaactgaggctttgtaacccgatgctctataaagagcttttccacaggagcatcaagagatgtccttgctcaatattaaacctatcccccgactgccctccttcgaaatacagtcccctcctgaggcttccaccgcagccttggctggcaggagaagctgacccagctgttttgaattaggggcaatgggaggcttccttgtaatatatgacttaatcagtgtccctgaagtaaacagtccaagctgtggctggaaatgacccgacattggacttcaacaacctcctttggctctgaagctgagaatgaatttggatctccataggtgtgttataggggctcattagcagatagatagctgtccttggacctctggaggagtgaagtattcatgtggtagttgtgtattattagggttaccagataaaacacaagatgcccagttaaatttgagtttcatataaataagaaatcttttagtataaatgttccaaatatggaatggcaaccatattgtaaatgatgcttcagaagtgaaagagccattctgttctttgtgttacctccttcccacggaggcaaggggtgtcagctcctgtaaggctccatctgtaagccttgagtcatctctgtttctgttggttcatgatttctctttaataccagttttctgtcactttgaccaggtgaggagttagttagcctcatgagtaagctgggtgatggctgtcagtgtgtaccatcctataagccagaggctgaatgcttaaaatgttgtcattatatagatcagttcctttatatcttagggttttgttaacctactagttatattacccatcattaaataaaaaacagaaacatacaaaacataaaacatttgagttgttataattttccctaactgtaatcattaagagcattgtgtcaagtttttcagctttataacgaagcttctttataaatcttatttcattgttattgtttaaggcctgcatggaaaatgactcatgaaaaatgaggtggagatggcagagctgctttggtgtaatattgagaaaggagtcagaaggctcaaggaggttgcaatgctcagatgaatttagtatgtaagactagagaacctgcaacctgactacattccttgggaggcctctggtatattcctttcactaaaggactaaagaatgcattggtgtagggtcccaatatcttccagctcagcggttcatgggagacgctgccacagtactggagaagccctgggaaggcagacagtcccagggcctcaccatccctgctttctcccaaaccaaatctgctcctacaacaaattccaattcctaccaaatgtaccacactcctgaaatggttgtgagaggtgaaggctcctgatcgccttcatccaaggacatctcctctgtcagggagcacagtcttcctagcaggtgtacacccaagaggggaacttttttgatcacctcggccagagctatagctattggacaaaatgggaggaaaaaacaacagtagaagcctattagattggatgaaggaaaggaagccccaaatcatccctcatgctagttaggaaagacagggcatttgaggattaaagagatttctcaagaaacacaacaggaaatgcagagaggccttacaatcggtgaccagaaggatacactgggacagtgaaaaaccagataagatttgcaagagccaacaagaagaccaagaatcatggcactggacataaaggacagtgaagagcttagctaggatggaccaactccacacaggaggatatagtaagaaacgacgagaggaaaattgttagcatggtgcataaggcagtctagtctgctcacctagaaattcataaggaaagagcagatatattcacatcatcaacacgggaggcaaaagcagagttagctaaaaattaacatgatgataagagaaaagggggaaaggaaaggattaaaagaaaaaggaagaaaatgaaacaggcaaagatacagaatttaaagtttaatttttatttattcctgttctcacattttattatatttccctggcagacagcccacgttctggtaagtctcgggaaaggggaagggttggcagaataatgtcactgtagggatttgaatcttattacttggtgccgctagtgttgggcagacatttataaaaattacatgctgtggtggcaggtcattttttaaaaaaatgaatctggagctgaaaatttaggacaaaggtgggggtttcagattagtttaaaagaaatgaaagaaaatgggacaaagtcgttgagaaggtggggaaccctccaacagcgatcggctcagagggagctggagagcccacgggttaccgagaatgagaagaacccagctgccagatccctgatgagccagagacatttgcttcatggaacttgtctttggaggcttgcttctctagggatttcccattaaattaacattatgggttacaagtatagacaaaatcattggaattgtgtttggatggtggatatatctattagccctgctttttcttctctctcatcttcatctccctttttccttcttggtttgctctcattttctgcttgggaaaatattgacgtgtgcccccttcatgtgcttccctccatgtgccccctccccattcttttctctcctttgctcctctttgtcgtgacagcgatgggggcatattaaagtgatgcctgcccgagaaccgctgctgcctatattcttcctgcacagattctgtagctggcactctgttccccggggataggaccttggtccccacttagagaatctccctagcccatgcctagtggccttcatagcagcttctaagattctttggaagggtgacatcctccacccaagtcaggccctccagaccccccagtgtcacccctgtgtcctcagcctctggagcatcttcccttcctcttccttcctgctgcagctttgtcagatcattttctaaaacacttgcccaatgggagaaggaagggtttcaggtgcatatttccctaagtgactttttgctaaaaggcagcctgggagaatatttataatccaaacggtccacagagattgccatcccatgtgaccctcatcacctaagggttctctcgggtctgagatggggggaagtagaaggcagcctgcagtgccccctcccacacactgcctgctcttgcctggtctccaaagagtgctgacgcctgccttctgaaaaaacagagtctgtaaagtgatatttgcccctttctaatcacagaaaagttgtcagactggttctgagcctcccagaggcattgctttttgctgcacaatttgatgtgtgttattgtgttttaatcatgaaattagtgcatccaggatcattaaaaatgattttcataaggaaatctttcaaaattattcttggttgctcagtgtcttactttagttctgttatccctacttgatagtgtgtgtttttgttatttatttggtgttgtgtagatcagagaagcatttttattggtagtatcctcatttgcatctctttatgtttttaagacaataaatggcattttacttcaaaactccctcatatccatggacttagaaagatacagactagactcatatttcctgtattaaaatatttgcacaaaaacactgtactttctggcgtgtcaaacaagctaatgtgtctcctgagaattgtgtgttcagacatgaacaactccatgaacttttttgtgtgtgaatcatttgagctttgaatgggtttcctcatggggagatatgattgcataaaatattcgacttctacctgaaatgtatcatgaggtagtctttcaacaaagactgttagttcgacaatggataagcagtgtttgagaaaataaactctgcatggacaaaaagctttcagtttcttgcttatattctgtcttcttgggagaccaaagagctctcatgaactcatgaaatttgaacctcaaagattcgtctaattgagctatttctgtttccacattttattcccagtggccagtttcacacctataacatttaagagacttggaaaacctgggagatattttcagcctgtcaggacgcctttttttttcccctcttcctttgacttttaaaaaggagctattcactctcactctaatttttgcaccaagcagcccatctcttagttttttcagatcctcacaggggatttaaatgatgaaatccaattctccataagcaaagatatttcttaggcttttagaagtggaagagacttggaggacattcagtctttcccatttaaacggcttcaacccaggaaaggatccaggtagagggagaaggaatcccacaacactgggagagacttcacacagaaagaaaagatcatttccaccttcagactccagacatctttcaccatcgactcctgacatcaaagtgacaagatgtgggggtgggacctaaaggtttgacttttggtttgggtttaaaatgaagtgacagtgtttccctataatcaagttctttagcttctaggtagactaaagtgtctttcctttgagaccatagctgagatgagcccagcacaatttccactgcctgcaacccacaacctcatctttggctcctaccatttggcttaaggtcaacttctctctaacccctgccctcctccctgggaagattctgttgcctgatctttcttttcccacactccattagacagcatgatatctgcctctgcatttatttattaggactcagatctgtaatatacaatggtacccttcctgtatgatgctgtatctgtataacagagagaataagaggctctgcttgccatggaactgtcatggccagaggcttgcaaaagagctaaccctcaggaggcccctcagagccaaatggctttctcaaaacttcaccctcatgatccagcagtccagacaggcagccataaacagcaccttgtgagggacttcatttgcaactggcaaccttacacccacatgtctggccctcatttagtatgctagctatattttttaaaaattaacattttgcctaataagtctcctctttgtcattgttgctctcattcaacatgtccaagcaggctacagagccagggtgtatttttctttaagcagataatacagtcatatgtttcataactcaaaatgacattttaacagtgtgcactgagaagtctcgatcccacccctgaccctgggcacccagtcccactcccctgtatgtaagcacttttataagtttcttatctatccttgcagtgcatctttttatttttacttttccacctgttttttaataaaattttttattttagaatgtttttagatttacagaaacactgtaaagacagtagagaaagttcttgtatgccctcatcccatctcctctattgttattatcttatatggtcattgtgcatttgtcacaactaagaaggaagcactgactagtatgttactattaactctgcgctttattcatatttcactagtttttccatggatgtcctttttctggtctaggaccccatctgagatcatgcattggttgtcttgtcttctttggctcctttttgctgtgacagttgctcacattttgcctggttttgatgaccttgacagtcctgaggagtgctgtgttgggtgtttcgaagaatgtccctccgttggggtttatctgatgattttctcatgatgagactggggttatggatttggtaggggaaaccacagaggtatattgctactcccatcacatcatatccggagatccatgtgtccacatgacttattatccttgttgtgaaccttaatcacctggctaacgtagtgtctgccaggtttctccatcatgaagctacttcccccaccctctcttttcatgttccactctttggaagcaagtttctgacagcagctgcactcaagagtgtctacggtgtttcttcatctgtgtgtggtaaattggcagggcccttaggagtgccaaacctatgctaagactgttcctccaagtggtactttcctagcaggatctcacctctcaacaggactcacacattgtcagaagaagttcatgcacttcccaggttactgggcttttgctctgtcattttaattatgtctcctacctaagccctctgtatcaaaagcagctttggccggggtgagcaccataccctctagtctacactaggacaatgctctctccattaagtttcagtggctttgtgttggaatttgttttgatctgagccctgaaaaagagtgtgtggctcacagcatggttatttggatacatgcacacaggcttaaaattaaacatgtctgttttttagttctagctctggaactttctgtggggaaatagaaatcttttaacctatttctatgttatcacggactcctgcactgtaggcttgggaaattcattttgcctcccagagtttcagagttccttcctgccaaggggagatgacagtgtgaggcctgggctgcatatcctcctaagcactctgtgctggactggatggacccaagcaggcagctcccgatggtaaaggcggtgtgctgtgaagacactgagcgcagaacacccactctgtcctctgtgaagggctcacaggccacgcagcatggagtgcatggtaatacgcataagttctccatggttctgggagaaatagctccacccacatatgagtaagtgtcgtctgctctgttattgcagcagtaacaccaaatttcttccactttcagtcagtttataaaaataagagagaaaacaacctattctgatgaaagagtataaacattcttggaagatatactttttttttttttaacagacagggtcttgctctgttgtgcaggctggagtgcagtggcacaatcttggctcactgcaacctctgcttcgtaggctcaagtgattctccagcctcatcctcccatatagctggaactacaggtgtgtgccaccaacactcggctaattttttaatgttttgtaaagccggggttttgtcatgttgcccaggctgggaagacataaatataatctcaggggtgggaatgtttttaatgagaagtaaaaatatcaggtcaactgataagacttgtagaactgacaaaatgaaaattcattttaccgaaatctggcagccccttcaagactctgctgaagactcacctcctaagttatagcacagtcttaaccgtaggcaaatcataccatgttaaattctcagtactcactcattctttcaaccagtaagcatttattggcctccactctgagccaggcactgtgttagttattcatcttaaagagcatgaaaaatattgttctaagtgtcagcactaccttcatgactcattaaaatcttttaaatacatttatccaggaccaaaatatacatcttcaagccaacgattatattattccttggccacaccttccagcaagtcatcatttctctaacacaaactaccctggccccagagaaagtcaagagaggaaagtatgtgtgggatgttgtgggtcgattacattaaaagaatgtgacaacttgatgtgggtttgtgatatttcaattggcttataccaggcgagggtgacagatagatttatgtggggcaactgtgtcctgctccttttggtttccttaatcacaaaaatgtggcagaaaactggatgttgtggatagaccatggaattatgtggtttccacaaagcattgtatttggcagtggttgggagacaatggtcgttctctaaagattctgggttctcttaatcatgaaggcaaacatttgagcattcagtcgttcctaacaaaggcctaaatattattatatccagggcttgtcttgtcctatgtgctgagtgaaccactggctgatgatagaataggctcccccacccaaaaatattctacccaccacccccttccacttcccattaccaccatcattccttgccttcccttcccactaccaaatctctctcagatctccttggctgccactcctaggcttttcacagtgaaagtcctggtgtacaatacatctactgagatgggcaatgccttggtccattgtcgccattaaccacctaaatttgtttatcagattaacttagccactttgcaaggcccggagagaataagaggacaagtgatttattgatttttggtggcagagaagaagaacctagaacaaaagaatctaaataaattggcagtatagaacagcagttaatcatgtggttctcaaagtcagactgctttcctcgcttactcactctgtcatctccaagaagtttcttaactgtttttcctgcattggtacaacaggaatgacaataataagagtacctgcctcataagattgctgttgtggctgggcgcggtggctcacgcctgtaatcccagccctttgggaggccaaggcaggggatcacgaggtcaggagatcgggaccatcctggctaacacggtgaaaccccgtctctactaaaaaatataaaaaattagccaggcgtggtggcgagcgcccgtagtcccagcgactcgggaggctgaggcaggagaatggcctgaacctgggaggcagagcttgtagtgagcagagatgcgccactgcactccagcctgggcaaaagagcgagactctgtctcaaaaaatagataaataaataaataaataaagattgcagttgtgagggttaaatgcgaacatttttatgtccatgcataggaatgcctggcatatattaggttggtgcaaaagtaatcgcggtttttgccattacttttaaatggcaaaaaccgtgattatttttgcagcaacctaatagtaagtgcttgataaatatgccgtcttgaagagagacctgagcagccagatgttagcatgagggccctggggattttaatcatgtgcagagggtagagaaacattcctgagtaaaatatatttgaaaacaaaggctcataatcgttttgctagcaatttgcttctaccctaagtgtggcaccacaaacttttcttaaccctccctaaataccttccaggtttccatcagtaataaacaaagggattgtctgctccaatttctgcagggagtatccatttacattgtcccaaaggaaggaggactcttgcattttctgagtcatgggtcaaatgttgtcaagtttttcattcattatacagtagagaagaggctaggatcatgtccaccctgggtcactatagtagcttgggtgaaaagtaacttggccattgaatcccgaggagagaagaaatgcttgagtccagtcatttttacaaatacaaggacagaaacaaggtcgaaagttgaagtgtagaagacagagagaaaagcaatttttaaagtctagacagcatattaacaacaagggcttaatgtgttgcgctctgtttataggagctttttgctgacagcacggaacctgagccctcctccctcctcatagcaagttcccttctgctgtgtcaatagaagccacctcttctcaatccttggaggattggcgatcagagtttgtacttggtgtccacagaacaaagggaaacagaaaaaggaagcacatcttgaggacttgcaatattggatagaagatgaatctatcataccagtctgatagcagctcacagttgtattttagcctcccaagattttttttctagtaacaaatgaaaggatagatgaataagagttcatcaaaccttttctatatgtattttgctttcctaaggaaagcagttcgggaaagagtttttctttcctttttagtcatttttctaaagttacaaaatgtgtcaggtaccgtggctcatgccgctaatcctagcactttgggaggccaaagcaggaggattgcttgggcccagtagttcaagaccagccggggcaacatagtgagatcctctccctttaaaaaaaattttttttaatataaaaaatatataaataaaattataaatgactttaattagagtattggggcagtggctggtgggaatgtaatacatttcacctttctggaaagcaattttacagtatgtaacaacaagccatcaaaataggcatatcctcaacccagaaattccactggtaggaatttatactatggggacagtagcataaatatttagataagagaacattctcatagtataatttataataactccccaaatggaaataatctaaatactccaaaataggggatgtgttaaatagaatacagtgagagtgccaagcagccactaaacaccttctttagagaagtttttcatagtattgatatacaaggcagtgtttaagattcattgagggttggtgggcaggcgctaagtatactgtacaatgggctcctgaacttggagatagattgcaggaaggactgacctcttggggtaaaaaaggcaagaaggcttttagctgcctgaataaaattctgccaacgagaccaaagctagctgtggaatctgcctgccattgttcacctgaggcacctgaatgaatgaacagatttctcataatttgtgcactgagctctggttacataagccactagctgtttgtgtaaatggctgttttaccctttgctgaattggaaggagcctgtttgattagaacagcttatataactgaaacctgagaccgaagggaagatttggcggggactgttgattgcattggagggtggattggaaaggaaacttttccagagtgagaggctcttattttgaggcactgatgtggaacaaattgtccccgacaccccacctaaccacattaacacacagtgggatctaacccatcgatagaaatgggctctattccttcttccagggggagaacaggtctgcttctttccaaggatcaagccaggttaacacacatgtgcacagaagccagtcagaatgcaatgtcgacggcatgggctccatcaacattccaaccccctctgctttttaaagctcaaaaacattttcataaaggttttttggggtgggattttatttttgtaagagtgggtgtgtttgttgtcttttttcctctttaaaaacttttttccccttttttccttcctgaattttaatgggcccttaagtaggagtctgctaggattttaacattcagtgaaaaaaggtacaggatcttcctctctccaaagcaagcctagagtgcattttccaggcctttctcccacacccactcagcttaaaccttagaggctgtgtgggtgctggccaaagcctcctgcttccaatgcatacgcttcctgttttgtctttcacctcattcggacccgggggtagattcagttctcatctttagactctgttatttcagtttttggtctcgatgtcacttaatcaggaaaattctaattcctcaggagggagaataaagtcatgactctcttcttaggtttatattaaaatctcctaggagcccctcagcaagtagcccaactccttacctttgattttccatctgtaaagggaaaaactgtaatgtgcatttagtcctcaaatgcaataatacctgaaagccatttgggagcaacttaggtcgtgtctcattctctgaaaaggtgtagataatgtatcagatcatttaaattgcatgcatcttcagatgtacaaatcaaatgtgtttccatctatatgtatgacagaaatgtttactcacaaacacacacattacagagaagctgtatgcaaactctgaccactgtcccccaacacatacaatggttttctgtgggatcccctctcacttcagctacttgccaatccctgccctcactaagaaggcccccttctaattcagaactctgccctcaggaagaattttgttgtccaaatttcataccagaggagctacagtcttgttaaaatagtcacaaaggtgtgaattacttagtatggttgatcctggagaggagaggtgcttatttcttctaccccagggtgtcctctattataaggtccaccatcaatttaatttagtaatagctttgcctttcctagaggaagggaaaactactacattgattatattcattaacagggagatacattccaagttcaagggcaggaaaatggacattatcatttgtttactgtggttaagaaagcacagactctggaacagattgactggatgagatctctccaacactgaacagctagctgtgtgaccttgggcaagtgtcaacttctctgtgcctcatttcttcaaccgtaaagccaagataatagtatttctcttacaaggttattgcaaggactaaacaattcaatacacacagggttattgcaaggactaaacaattcaatacacaaagtgcttagaacagtgcttggtaactgatcaatacatttaagaattgctaatccagatgaattttttttttttttttttgagacagagtctcactctgtcacccaggctggagtgcagtggcgcgatctcggctcactgcaagctctgcctcccgggttcacgccattctcctgcctcagacttctgagtagctgggactataggcacccgccaccacgcctggctaattttaattttgtttttgtatttttagtagagacagggtttcaccgtgttagccaggatggtctcgatctcctgaccttgtgatccgcccacctcggcctcccatagtgctgggattgcaggtgtgagccaccgtggccggctgaatctttatttttcttattcccgaaacttggcagtgtgtgaaaaatatttttttctaattccaaactaatctgatgaaatgtagagatcttctctcccctcctcctgcaaaatacaaatctgtttagacgcacaaaatgggttcatgggtgtgatgatgttgaaaaaaacagactccccttcttcctgctatactctcaccacacagtcacacaacactgctaacaccagctgtgtttccccacacaccaagcaagtaatcctccagcaacagacgccagctggatgtcctctaattcatttcaacttgacactctctacctggacacagcgtcagatcccacaagttgagggttcagtcctcaagacagccacctccccaactgcccaacttcagatgccaatcacaagccacaggttgtttcgcttttgcttctgacccatctgctataaatgggggttcccacaatcccccactacggtttgagtaatttgttagaatggctcacagaacacagggaaacacttatgtttaccagttcgttataaaggatattttattttatttttttgagaccgagtcttgccctgttgcccaggctggaatgcagtagaatgatctcggctcactgcaacctacgcctcctgagttcaaacaattcttgtgcctcagcctactgagtagctgggattacaggcttgcgccaccatgcccatttttttatttttaatagagacagggtttcaccacattgtccaggctggtctcagactcctgggctcaagccatccacccgctttggcctcccaaagtggtgggattacaggcgtgagccaccgtgcccggccaggatattttaaatgatacaaatgaacagccagatgaagagatacaaatggtaaggtctggaagtgtccctaatgctagagcttctgtccccttagagttggggaatgaatccccagtatgtagaagtgttctgttccccttctttgatgctccccctccccaacccagtccttttgggcttttctgaaagcttcattacataggcctaattgattaaatcattgaccattggtgatcaacttaactttaagccctctcccttcccttgaggttaggggatggggctgaaagtcccaaccctctaatcaggccttggtgttcatgtgaccgtaccccatcctgacactacgcaggggttgccaaccgtcagtcaactcattagcacagaaaaagacattggcaattccaaggattttaaaagttatatgtgccaggaaacagagaccaaatatatatttcatagtatcattgtccacccctactcttcagacaccgatctcttacatcaaaaggatataaaaactcaaaagatcctgccttattaccagaaaccaattcaattattaacagttggtccagtccaccatatggtatgaatatgtctcccagagtgaggccactcaggtttgcagacttccatttgatcttatcaggttccaaaagccagagtgtcagcctgggcaacatagtgagaccttgtctctacaaataattttaaaattagctaagcatagtggtgcacacctgtaaccccagctactcaggaggctgaggcaggaagactgcttgagcccaagagattgaggctgcagtgagccataatcaagccactgcactctgctctgggtgatagagagagaccttgtctcaaaaaaaaagaaaaaaagaaaaagaaaaaaaagccagagtggcctcagcaaacatacagttttaccctttaaggatctgatagaattgagctaagagacaatgtcatctctttctctgagcctctctcaaggaattaatacaatattgaaggatacggtttggctgtgtctccacacaaacctcatcttgaattgtagttcccataatcctcatgtgtggtgggagacacctgctgggaagtaatttaatcatgagggtggttaccctcatgctgttcttataatagtgagttagttatcacgagatctgatggttttataaggggcttttccccttgagcttgacacttccccttgctgctgtcatgccatgtaaagtttcaccatgattgtaagtttcctgaggcctctccagccatgctgaactgtgagtcaattaagcctctttcctttataaattacccagtctcaggtatgtcttttttagcagcatgagaatggatgaatacattggttttcccttattccataacccatttatttattcttttaccctcggatactatttctctttctctgcatttatcatcgaacttctccacctttggaaggtacactgtcctggtctacaccacaggtgtagcactggcctagcaaatacctctccctcaatccactcctatttagataaggtaatattatgcaggtgcagaattagtgagctctttttaccactaggcaatatagctgcattcactgttaaccccaattttgccagatgggatgaagacataacccacccctattaggtctttagaaattttgacataaggttgaaaaacacagttaccatttcttgcttaggaaccatccctgtttccagtacttgttattacagccctggtcctgtgactactgcattaggtaagggggggaaattgagctgatgtggggaagagatgaaaacaaaatatagtcattatactagtgtgctgctcccttggtaagaattgcatagtcatcccggcatccctccttaaccagtcatccccacctccaccagaaagcaggggaaactctaggggggacaatcctttagtcttactcatgttgagcatgagcacacactcatgaaggtgtgcaagccagcccttcctgcatttatctctcccatcttagacaaccaatattttaattgcatgttccacttctctgttaaactattactctgagaaggataactctctgcccattgctgtacagtgtgttccttggtctaaagaaatgaaggtcagctgtccaaattcatgcaatatcatctgttctggttttttatagcactctgagcatttgcatcttctactgtgtaagcaaagccaaatccagagtcagtatctatttctgtcaagacccattcgtagcccctcagggccatcagcatcagtctcacttgccagctatgttcagggccatcccatcagggaatctgccacatagccataggcagtctctgtctcttttgctgacaaacagagcagtttttattggcattttgtgtcccagaagacgctggaggaatatgtttagattagctcatctctgcactgctgcatgacccccgtatccactcatgttatggacccaaatggcccccttaagcaagcacatggggatatctacttgttgatcccagacacctttagaacctggagggagttcttctgatgggcattgagatgcctaccttaaggcaccccttaaatttccatagtaatttccaaaggaccatgctccatatgggcatccctttaataggccaggtttccattgcctttggtcactgactgtgagtcagtagaaacccaaacctagaggcttttagccctgttcaattctttccatcaccgctaggcaaacagcatgcaattcagctcaccatgctaatttgtttttaccttcttcagtcagagagtggcatcattcccaacggtatgttatccattcaccgtgaaactgccatccacaaaccataagccctagtctgtgtttcatttaggactatcaaacaaagaatttgcccctaccagcgcttgagctgtgcgggctcaggcaatcttactagttcccaattaacctgcccaattaatagtgattgaagggcagattttcccttctgttttacagtactaggtatgggaaacatttcccagtcagatacaatggccatctccaaaatacaatcaggcaaaagagatgcaaccactttacataaagcatgtttaaatacactaaccctcctataaacttttatctttgttaaaagaaaaacttcagacaaattaaatttaatagtctaattgagcaaagaatgattcacaaatcgggcagccccagaatgagattaggttcagatgactctggggctgccacatggtcagataacatgtatggacagaaaaaagaaagtgacatacagcaaacaggagtgtaaactaaaaataaaattctaagcacccccaaccagctgaatggacccttcctctcagctaaggatattccaaagttaagtagttcaggccatgatgggaagcaggggtcagacttgccttgtgataccctcctttttttggaattcaggcataattgaccagcattaatattaaaacagagatcttaagactttgtagcaataagactccaaattccggtggctcacgcctgtaactcccagcactttggaaggccgaggcgggcagatgacgtgaggtcaggagtttgagaccagcctggccaacatggtgaaaccctgtctctgctaaaactacaaaaattagctgggcgtagcagtgtcagaggcgtgtgaagcagagcaactccatcttaaataggagataggtaaaatgaggctgaaacctactggactgcattcccagatggttaaggcattctaagtcacaggatgagctaggaggtcagcacaagatacaggtcataaagaccttgctgataaaacaggttgcagtaaagaagctggctccaccgggcgcagtagctcatgcctgtaatcccagcactttgggaggctgaggtgggtggatcatgaggtcaggagttcaagaccagcctggccaagatggtgaaaccctgtctctactaggaatacaaaaattagccaggcatggtggcgggagcctgtaatcccagctacttgggaggctgaggcagagaactgcttgaacctgggagggggaggttgcagcgagctgagatcacgccactgcactccagcctgggcgacagagaagaccctgtctcaaaacaaaaaaaaaaaaaaaaaaaaagaaaagaaatgaagctggctcagtcccaccaaaaccaagatggccacaagagtgacctctggtgtcctcgctgctacacacccatcagcaccacgacagtttagaaatgtcatggcaacgtcaggaagttaccttatatggtctaaaaaggggatgcatgaataatccacccattgtttatcatcaaggaataaccataaaaatgggcaaccagcaactcttggggctgctctatggagcagacattcatttattcctttactttcttaataaacttgcttccactttaccctatggactcgccctgaattctttcttgtgtgaaatccaagaacccttttttggggtctggatacagacccccttcctgtaacagtggcaagcgcctgtggtcccagctacaagggaggctgaggcagaagaatcgcttgaacccaggaggtggaagttgcagtaagctgagatcatgccactgtactccaccctgggtgacagagcaagactctgtttcaaaaaaaaaaaaaaaaagataccaaattccagcctaactctagtatagcatcacatgacagatagcaggccctaaaagaaattgaagtattttaccctaaaatatatttctttgacatattttgaaatgaccttacaaagctgtctcttgtgaaaaaaatctacattctgtagagaactcctttccctttccaggtcttcatcctgatcgaggagagaattaactaagagtctgacagctttttaagtctgacaagaaacatttacaatctattctctctgaatcctgttacctggaggcttcatctgcataataagaactttggtctccacaaccccttatcttaacccagacgctcctttctatggattcagggctttagataaactctttcaatcaatcgtcaatcggaaaatctttgaatccacctatgacccagaaacctggaactttctcccccaacccttacctccagttgtcccccttttcctgaccaaaccaatgtacaccttacatgtattgattgatgtcttagtgtcctgtgtctccctaaaatgtataaaaccaaactgtaacccaaccatcttgggcacttgcggtcaggccttcctgaagcatgtccttaaccttggcaaaataaactcctaaactgattgagacttgtcttagatactttttggtttacagaggtatagaaacaactgtattggttacagcttggcacttgccttgtttaaacaaggcttgaagagttggctgcctgtgattggctgagatacagcaacttgttgcaaagtagtaacagtctgtttatacatccagttaggttagggttcactatgtatggagaaacctttaggccaaacttaaactatgtaagtaggcagctttagactaaattaatttaacatcttaattctgtcaactcttactttcctaactatagcctccattaggactttacagacaggttttgaaatcacagtacattgggttcctgtgtcaaggagccctggaaattctccacccctgaccattttacccactcttgtgcaaaaggcctttgggtccctgacaggagattgagccaagggaccccagcccttttgtcaatctttttcttgattaatctgcctgagtgttgcttgaggcaattttagatcatttttctcattataatctttgcctcctaacttttcatatttctccaaactagggtaaattcagcaaacttgtttggagccctttaatgttgcaggaccagctggggctcctgttggtccatccaaccttaagagctttgttttgaccccacacatttacattttattcacctcatttcttggtaaccatataaagatttccaccttgctcagacaaatcccctgactctcctctttttccgtttagtttcacctttatcaatgttttctttattcaccttatttcttaataaccatttaaaaatgtccaccttcctggaaagttcttttactctcttctctgtcttttccccattctcttgttaattaatctaacgttttcattagcatctgtaagacccgtgaagggaagctgtgacaacaaactgggtaaagcttctcgaactttcttttgggtttgcaaaacagtacggttatatggggatctccattaaaggagccccctgaataacagaatttaccataattcatcaggtgaatatcccagtcattataaagctggtcccacatggcttgcatatgaagcatattagctgctgtaactggagtgttccaattagcatttctaggtggagtcaggcaatctccctcctcagagtaaacagaccttaaaatggcttttatcaagttcaccaggctcgctgttccctcaggaatcacctcctgttcatgactgttccatagcgagctgtggatattgcatcaacccaaacatactcttccaccctgcagcatttaaaaccaaagatactgcccctaaattagttaactgtcacaatccattttactaagggttcttcaggaagctgatgatactgcaaggctcttgtattggttcaaaccccgagagcgggccaacaaacaagacaaggtggtgtggagcaacacgctgatttaatgagcgcctgggtgcaggtgggctgaggcctaaaatggcgtcagcaccaaatgaggacagggcaggggttttatagtctcctgtaaacaggaagtgtctcaatctgatgtaactgcttcgaggtacccggatggcctctctctccctcttcagggggtacgtgtcttccggccagctctcttcctgcttctgctatcttgctaaagcaggctaatgtgctcttgcgccttgggactgggcctgagaagggaggagttattcattcccttaagctttcaggctctggggagaatctttcagataccagtctacaaaatgaaacaattccttcacactaaaccctctggtttcaatagcttctttgttttgcccttaccacacactgactaccttcttggtaaacacaggtcttagaggtgctttctgtagtcctggcataattttttctgggagatggctctgaggctaatgactgaagttctaactcactgaagtctgcactgggggtagcatcaagatctgacccagcactgtcttttgatttcattttagctattacagatagcaataaccacacaattgtatattttacttttttgttgtttattataagtttgcatttctttatgcatccagcaaaccaactgtccaggagttgaatgcatctctaaatttcactggaggttttgccattagtaactgagtgcaacacagctactgcctcatatcatggtgatacggctccagtgactgtagaaacaccgtgggtcctttgtctcacactgataagattgacacggacacacgtggagtgattttaaggagtaaaaagtttaataggcaagaaagaagaaagaagaaaacagctcccctgtacagagggagggagggagcctccaaacagagaaaccccacatgccgcagaaagcagttggttatattgggaggttggaggaagcggtgtctgatttgcacagggctcaggggattcgtttaaccagctgtgtcattcatgtagccctcgaaaaaaccctcccaccctagcttttaatacgcaaatgcgagttgccatgaagtcctgcacatgtggtgttacctggaggtggccatggcacctgccacacgtggtgacaaggataagagggcaggactgccagttgggtggacctggtttctagccatctgcatttgcatatcaatgattgccagtctggtttttcaagcctctttcggttagaaaggaaatggttcgggggttgctctttattaaaggaaagttccaccgagaaccttcaccctttccagctgcctaaaaattatttcttaacagctcctgtattaataggtggccatatggtcacctgagaatcatatttatcaccctccacccatttgtcctttttacccaaaatcacatgttcctgtgagtcagaggccaggctagtaaatcccacttctgacaccaaatctgaggctattgaggaaaaacaaactcagtttctcctactatactctcacaacacagaacacttcagtaactaaatgtgtgaggttttttccccacacaccaagcaagcgtcaattctacagctctaattcaattctgacactatgtacctggaggtaccatcagatcccacaggttgagaactcagttctagaagactggccttcacttcagatgccagttgcaagtctgggtctctgggataagtcaggattcccacaacgccctccttgaattcaattaatttgccaaagtggctcacagaactcaggaaatacttacttacatttactggtttattataagggttactacaaaggacacagataaagaagtgtatagggtgaggttatgtgaggaaggggcacagaatttccatgtcctctctgggtgcaccaccttccaggaccctccacatgtccagctatccagaagtcccctgaacccagtcttttggcagggttttatggaagcctcattacataggcatgattgattaaatcattgatcattggtaatcaacttaaccttcatcccctctccactctccagaggttgtgggatgggctgaaagtcccaactctttgctcatgccttggactttcctgtgatcatcccccatcctgaagctacctggagacttccaaccatcagccaactcattagcatacaaaaagacattgctttggagattttaggagtcctaggccagaaaataggatgaccaaatatgtattttactgtagcacaatgggttttcaaggctctttgaaatctactcatattcctgatcaacttggtgaaacctagagggagtcactttggcaagtgtggaatagtggttcagagtctaggttttggactcaggctgactctgtgtggccatgggtaagttccatgtcctctttgaaccgcatctcctcatgtataaaatgggaataagaacagtatctactctgtggacttagctccttgatagaagcgcgttttatgagatgaagcgtgttttatgggataaaccgtgttaggcacttggtgcaaggaaatcatgccattatttgagaatggagggagattaacgtgttgttcccagtgcatttctagccacctccccattacaaaagaactaagaattgggaatctaataccaaagttctaaaaaatcccatataatatgaattaggggaaagaataacaacagcagcaacaaaagttaaacaaatagtgaggtgatatatttctaaatatttaagaaattgttactttactgaaagagtctagataaatactcttagagtgacaatggagcaggaagagtcccaaatttgctctggggagctggattttaatccacacctcccatgcctcaccagccttagagacagtgaatggtcataccttaactcaaaactctcccccagtgacatcagtttggaacacccaaagcctagtacattttaagaaaactcttctaaatggccacaggatctgactttcagcaggcaatgcttatttatacactgcatatgtttgtttgtttgttttttgagacagagtctcactgtcgcccaggctggagtgcagtggcacgatctcagctcaccacaacctctgcctcccaggttcaatcaattctcctgtcccagcctcccaagtagctgggattacaggcgtctgccaccagcccagctaagtttttgtattttttggagagacaagatttccccatgttggccaggctggtctcaaactcctgacctcaggtgatcccccctcctcggcctcccaaagtgctgggattacaggcatgagccaccatgccaagccatgtttgtttttttaaaggccactaggaaacaacaaaatgttaacagttgttatccctgggagatagggttatagattattttataattgtaatttataattttataattttaattctttgtatttttctgcactttcagtaatttgttttgtaataaacacgtattgtctaaataatttaacaattagacattagtctatatgccaggcactttgctaggtattgagaatgcagcatccatcattcctggtgtttatggtctagaagggaataagacagtgaataaataaatacacaaataattaattgctttctctacagagaagtctagaagactatgaagtcaagagggatttgacctagacccgattttgggaaggcttctgaaaaaaaaaaattactttaaagctgaaatctggctgggcacagttcacgcctgtaatctcagcactttgggaggtcaaggtgggtgaatcacttgaggtctggatttcgagaccagcttggccaatatagcaaaaccccatctctactacaaatacaaaaaaaattcaccaggtgtggttgtgcgcacctgtagtcccagctactcaggaggctgaggtaggggagttgcttgaactcgggaggtggagattgcaatgaatggagatcgagcctgggcgacagagaaagactctgtctcaaaaaaaaaaaaaaaaaaagaaaaagaaaaaaagttgaaatctaaaggaggagagaaagaggaagatattctaggtggagagaataacatgtgcaaagagcctgaggcatacagtatatttaagaaaccaagagcaggccagagtagctacagcttggggaacggagggtgttcaggtatggcaagaccaagcaagcatggccttatagatcttattaatggtttttgcattttattttaagaagaattgaaaatcaaggttttaaacagaatatagtaacagagagctatgtccatttcatattttatttttaatttcaaatcatttgttatctgtaaggagttcttggatttggattttcaaggccaattcaatggactcatcctatatatgcatgaaagtgttttataaaaagccttttttcttaaaacattagcttcctctggccaggcacagtggctcatgcctataatcccagcactttgggaggccaaggtgggaggtttgcctgagcccaggagcttgagaccagcctagacaagatggcaagacctcatcttaattaaaaaaaaaaaaaaatacagcaacactttagctttctctatacagggagccttggattttgaaagctgcacatcaccgcagcctggctctcccatcatcagtttggggcaacggagcatgctggaaaaaacaggagcatagagtagaaggctgagcagcaagagacccttctgtgtacaccagggagttgaggcatgagaccgccacatgagcattctgtcatgaaatttcatgtgccatggaaatgcaaaacaattcaattcccagaccagctgcggtcaaaatacagctgaacaaacgacaagagctagaacctgacaaattgggagggtttttttcagctgaggagtgcaaagctgggtcactgtcatgccgattaactgtagttcaagcttaagtgatgatctcagggaccccaacctgaaacggtatatgagtaatcgtcacatgccaacacgaagttacatttgttacaatgcttttgagtttgctttgcatttttgttttaaacctaccctgctctatcatcttaggaaatcactgtatcagaagtaattagccatgtggctgctaaataacagatgagaggtttccagcaaatgcccctctctagtgctcctaaatcaactgggcatgtcctgacctccaggtgatttgaatggcagaggtaactgccaaaacacaccgctggtcctggaataactcagaggtttagtggactctggagccacagtaacgggcatctggtagtcaaccttttcctgtaatgaggagttattaaatattcacatcaggaattgaggctttagtccgccctcaactggtcttccaacctgttacctattatgcctcacactttatatacccccgaatacaacaagaagaaacttgtgaatgttctataaaacctgctactgacatcagggtgggtctttgaggcttatggttatcctaataaaacgaaggaatgtgtaacagactgtagccggcagaccaccaactactttattgtttaaacacaaaagcaaaactttggtaaacctactatacctgaggcacagcgtgtggctgtttcttaacccttgaagactgttatgtacccaacttcagctgacatctctatgtttcttgtttccctccatgtgaggagtttactaagttacatgcttagacaagaaatacctgttgatggagtggttatgaattacagattggagcttgcaaatcaatttggaattttaaaaaaataaactcaaaccagatctgtgaggcctgcttctccacagacagcataagcatgaggcaaaagaagagccccagcagataggcaatcaggtagccctaagataggtcggaaagaggtcttctgtgaccccagaatcctctttcttgatctcttcctttccccaccaccaccctcaagctcagaaactcagtatcctactcttaccttgatgcaaatgcaggaaagggtctgcatcagcagaggaatggcaggaaactctcaaaagagttaagtgcagggaattaatcaaagaagttatttcgtgagatgtgggcaggtaatggaaaccaatgagagacagaggagcgcccaaggactattaccagcagggagctgttcctccccaccaaaggggccaagggtgaaagagcgctgatgagaattaagtaggcattttagtaaaggaagccggtggggcagccttacagtggtcagcctcctaaggcacagagtaggccgcagaaggacagagagcccatctgaagaggcaaacagaaaataaccagcacagagtctggcattagattattcaatctgttaccatgttcaggttcattagtatccaaaacctagtaggtgtgaaagaaaagttaggaatcatgctagtattttatttttaatccttgcactaaaaagtttccaaccatcagtgagcagatctgggaggatggaaagaacgacctatttctgtttctcagtcatacccaaacattagtggtcgctggtcttttgaatgatcagtgatgtgagggagagcttccaggtgagacctgatataagaccctctttaggagggtccttcgccctcccaaagtgctgctattcattggacaaatattgagtccaatgcagtgtccacttgcaacattttgcaataaaagaattttctaggccaggcgcggtggctcacacctataatcctagccctttgggaggccgaggcgagtggatcacctgaggtcaggagttcaacaccagcctgaccaacatggcaaaaccccatctctactggaaaaaaaaaaaaaaaagccaggtgtggtggcacgtgcctgtaatcccagctacttgggaggttgaggcaggagaatcacttgaacctgggaggtggaggtttcagtgagccaagatcgacccactgcactccagcctgggcaacagagtgagactctgtctcaaagaaaaaaaaaaaagaattttcttattaagtttgtttaatcatcatgaatccatgcccctcatttcagtcttgaacttttgacagagtcttccccaaaatttctattcctctggcctttctcccttcaaattatatctcccacagaaccatcagattattctatctagaaaaataaatccctgcttaaaaccctgccctggctccccattatctatagtgtcaagtccagaccccaagaatggactcccaggtacctctgcagcctcatttcttctctactctcctccttgccctttaaataacaaccatgttggcacttttatttatgtgtgtgtgtatttatttatttattatttttatagagacagagtctccctatgttgcacagattggtgctaaactcctgggctcaagcaatcctcccacctcagcctcccaatgtgctgggattacagatgtgagccactgtgtccggccatgtcagcactttttctcatgtctttccaggcccatgagaccctcttcggcccccattgttggcctgcctgtctcccaatggttatttgagaaacagctcagggtaacagctccaggcttccatgctgagatgctctctagccctgactcttcttcaacagagaattgcctgcatcacgttgaaatgcctcatctcccaccttcactgggaacaccgtaaaggcaggaactatgtcctattcattgaataatcaataatcctccccaatatagtatatggtaagagttggcattcaaaaatatatgataaactaaactaaatgatgacttcccaaaaagaaagtgtccccttaaagcaaagttccctaggacattagactttttttttttttaaactctgtaggaacacaacgtatacagatacttcattattgttactaggtttctctatatgttcaatgtatacctcagccccttaggaactggtttaaatgaaaatccaagaagttttgaaaactgattgattaaatgatgtttggtagaatgaatgaaaggaattgaaagttggccaggcatggtggctcacgcctgtaatcccagcaccttgggaggccgaggtgggcagatcacctgaggtcaggagttcgagaccagcctggccaacatggtgaaaccctatctctcctaaaaatacaaaatttagccaggtatagtggcatgtgcctgtaatcccagctacttgggaggctgaggcaggagaatcgcttgaaccctggaggcggaggttacagtgacccgagattgcaccactgcattccagcttgagagacagagtgagactccatctcaaaaaaaaaaaaaaaaaaaaaaagaaagaaagaaaggaattgaacagaaaaaataagccatagagcatctgacttatggaggcttttaaaacaccctgcagtagacgaggtaaagttacacagttacctgaagacaacagtagagatcatctggaaatactggcattggtaggctgacctccatgtccccatgggccttattttctataattctaaaatggctttcaaatacaggatactccatcaacttggagatgtaatcatccagtgtcatttcacagtggtgcagctgtaagacttccttgtatggtctgggagtgtgtttctaagaaataggagtgctaaacgaaatgagtcaaacatacctcagttctcatgagttatatcccctgaccacattatttatcacctaaaatcaatatcctctagatgtctttatcttcttggtgttctctagcactcctgtcctggtgggttgacccatatctaaaatgcaacctcatccattcaactggaactcacccacctagagttactggaaaacttgcatttcacatttggcatgttacctcaaccatcaaaataatctggagttggtttatcctttggaaaactatttgctgcaagtcaaaaaatcattagtcagaaaaaggatgttaatgacagaaaaaccagagcagcataaacaaagctaagatactggctgccaaccactcaacctgtggaagggcagatggagggggtgctttttggccctcagacttcataccagcttaccagcaccgtaactatcaataccatctgagggggcctgaacaaggaaagcttatgtggtcaaaaggggcaaggagatgcttcagaaattccaactcctcttgaagagtgtccagtactgggaatcaaaattaacaaaattatccaataaacctcctgcctcaccactgcaatgcaaatattttcttttctttttcccctcagaatgtgaagttaaaactcacctaattcaatggttttatgtatgtatgtatgtatgtatgtatgtatgtatgtatgtatgtatgtatgtgtgtgtgtgtatgtatttagagacagcatcccacactgttgcccaggctgagtgcagtggcttgatctcgggtcactgcaacctctgcctcccggattcaagcaactctcatgcctcagcctcccaagtagctgggattacagacatgcaccaccattctcggctaatttttgtatattcggtagcgacggggtttcgccatgtttacctggctggtctgaaactcctgacctcaggtgactcgcctgcctcggcctcccaaaatgctgggattataggcatgagccactgtgcctggcctcgatggttcaatttatatggacaacaagcaactggaaaccctggcattataagcagcatatttattgtgtatggtgtggtctaattctagataaaccacttataaaaccacctatccccacttaggtctccagttaaagaagctttaacagtgactgcagcttcatctgtatagttgcttctcctctaacaattatggctgggacacagcgcccttctctagaaatgagtgctagagccagggagcaggggaggagtcagtctatccgaatgcaagttctaaatgtaagaaggtgtctgttttgtacacactcactttggcagcacatatacttaaaaaaacattggagtcatacagagaagattagtatgcatggtcctttacaagtatgatgtgcaaatttgtaacgcgaagctttccaaaaaaaaaaaaaaaagggaagtgttgacataagtgtgaagaccatgataaacaggtatagagattaccatttgctccaccaatggcaaatttttttttattattttttattgttttgagacagagtctcgctctgtctccaggctggagtgcagtggtgcaatctcagctcactgcaacctccgcctcctggattcaagcgattctcctgcctcagcctcctgagtagctgggattacaggtgcatgccaccacacccagctaatttttgtatttttagtagagatggggtttcaccatgttggtcaggctggtctcaaactcctgacctcgtgatccacccacctcggcttcccaaagtgctgggattacaggcgtgagccaccacgcttggcccaccaatggcaatttacccaaatgtattgaaaacttatgtccacaaaaaaaatctgcatggctgggcacggcggctcatgcctgtaatcccagcactttgggaggccgagatgggtggatcacttgaggtcaggagttcaaggccagcctggccaacatggtgaaaccccatctctactaaaaatagaaaaattaggcaggcacggtcgtgggcgcctgtaatcccaactattcgggaagctgaggcacaagaatcacttgaacagaggttgcagtgagccgaactccagcctgggcgatagagtgagactcagtctcaaaaataaataaataaataaataaataaataaataaataaataaatctggacacggatgttgatagcagctttattcataattgccagaacttgggacaatgaagatgcccttcagtaggtgaataaataaaccacagtacattccgacaatagaatattatctaggaattaaaaagaaatgagctattaagccatgaaaagacatatgggaaacttaaatgcgttttactgagtgaaagaaaccaatctgaacaggctacatgttgtatgattccagctatatgacgttctgtctccataggccaaacaatggagacaataaaaagatcagtggttgccaaaggttagggggaggaggggacggataggtggagaacacaggatttttagggtagtaaaacgattctgcatgatactgcaatggtagatacatgtcattatacaatttgtccaaactcatagaatgtacgacaccaagagggaaacctaaggtaaactacagacctcgggtaccaatgtaggttcatcgattgtaacaaatgtaccactttggtgggttgttagtgggggaggttgtaggcatgtggggcaagaagtagatgggaactctctatattttctgctcaatttttctgtaaacctaaaacttctctaaaaaagccattttttaaaaaaaggtctagcatattttaaaaaaagatataaaggaagcagagtgaaagtggatcttttaaacatttgatttaaatatcagtgttcagccactgagaggtttggagtagtcaaaaagggatgttttattttttaaatttttgtgggtacataataggtgtatatattttgtgggtacatagtaggtgtatatatttatggagtacatgagctactttgatacaggcatgcaatgtgtaataatcacatcaaggaaaatgggtatccatcccctcaagcgtttatcctttgtgttacaaacaatccagctagactcttttatttttaaatgtacaattaaattgttactgactatagtcaccctgttgtgctatcaagtactaggtcttattcgttctttctaattattttttgtacccattaaccatcccactttccctccactacccttcccaccctctgataaccatccttctattctctatcttcatgagttcagtggttttgatctttagctcccacaaataagtcagatcacgggaagtttgtctttctgtgcctggcttatttcacttaacaaaatgacctactgttccattcatgttgttgaaaatggtgggatctctttctttcttatggctgaatggtattccattgcatatatatgccacattttctttatctgttcatctgtggatggacactcaggttgcttccaaatcttggctattgtgaacagtgctgcaacaaatatgggagtgcagatatctcttggacatactgatttcctttcctttgggtacatacccagcagtgggattgctggaccatagggtagctctatttttagttttttgaggaacactaaatcattctgtaaagtggtcgtactaattaacattcccaacaaaactgtataagggtcttttttttttttttatttgttttgagatggagtttcgctctgtcgcccaggctggagtacagtggcacaatcttggctcactgtaacctccacctactgacttcaagcaattctcctgcctcagcctcctgagtagctgggattacaggtgcacgccaccacgcccagctaatttctgtatttttagtagagacagggtttcaccatgttggtcaggctggtcgcgaactcctgacctcgtgatctgcctgcctcagcctcccaaagtgctgggattacaggcatgagccaccgtgcccagccgagggtcttatttttaacatgtcttttttgatccagctccatcctcaccagattgcttccctcagtatggaaacccatgcctgcctcccttggtgtcatatcagaacttggccgtggggcagcatgattcctcgttggtctgtcctgtggcttcaggagaaggccttgctctgtggggaggaaggaagaccgtgactttctccagcacacctttcccatgcacccacagatttgggatctggtctcaacaacccatgtgaatttgctctgagttcctgacagaggaagctgctaaagttaagaactaacttccacccttagtggacaatcacttgagatgcaccaagggttggaccaccttgctctgccaaggtcagagcactcactgaggccaagctccactctgggatgagatatctggctgagagtggcctggacaaatggaaacagaggcaacgtgacttcccctttccctatttgcacagcttgataatgacacacagaaaggagacacagtgtatatgtaagtttaacagcacaagtaaaactaataattttccaataagaagtgaccaatttattcaaaatttgagaagtttaaagtacagacttgaagcctactgttcaaacacagtcattattaaagtatacatttctcaaacattgcaatcccacctccaaagccacagattcttttctccttagtctctcaggcctgaaagtctttgtccgtatttcttcattctgcagcctgacggtcacgcccctggtactgaatacacacacacaagcaagggactcttctgagcgtatggtgggcaagagagacctctgctggatgaatgatggcaaacaagcgctgctcggccttagcagaaaaacaagaaacagtttttacagtggtgcttttggaggaggagaaaaattgtttttgttttaaaatcaccttttaaactctatgagattaaaaaccaaccccataatatatgtttttttaggtttctagaaacaccgtttgtggactgtgccatttctacagccctttaatacttatgttaagcaattttttaagagctccgtatattctgcacccaggttctaagagcagcttaactgcctaatagctggactgtttcttttctaattgcctgccagtgttgcacattttctgtgcacaggcagggatgcgtgaggcatgattctcatagacccaaaatcaggatggacttcaagactgagttttcagaactcctggggaaaggagatgtgtttgagataggtcagcaggggacaaaagcattcaaagaaaacttggcacaccttgccagacttttccccttggctgcatattttcagaatccttaggtccttcactggggtggggggcagggagagtgagtgcttttgaaaagaggaagttcccttgcacacagcatatatcctgatgcattaaaatatgctcaagtttgcagtgtcctctttacacactgtgtttcaggggcacagcaaaggcagagcttggtggttcaactctctgcctctcatataatgcctaattatactggtttctaatctgactctgcctaattaggcaacggtgcgcaagttttccaaatttcctaagcctcggtttcctcctctgcaaaattggattggttgtagtgtccactgcaaagtgttactaggagagtttgatgagataatatatggtcagtgcttagcatagtggtggctggcctatagtaaatgttcaatgaacacaggtataattattaaaggtgaggtaaacacgtacacaaatgtttgtgtacatgtttccttccttcttccctccctccctcctccctccctccctccctccctccctccctcccttccttccttccttcctttcttctttcaacaaatatttatagagtttctactatgtcgaaactctatgcgagacattgaggagtataaaaagctgaaaaagttatgtttctattctcagagagctttcagtctctctcatgttttatcatttggatatagatcagtgattctaaaagctgtttgctaacatcccagaatggccttagaagaaaattccccaaattctcaggaaaataaataacaagcttttacctgaaatattgatttatgcctttccaatcttaaaagacagaaaaagtcgtgataaaaatcatgctagaccaggcacggtggctcatgcttgtaatctcagcactttgggaggccaaggtaggaggattgcttgagcttaggagtttgagaccagcctgggcaacatagggagacttccatctctacaaaaaaatgtttttaattagccgggtgtggtggtgtaagcctgtagtcccagctactcgggaggctgagacgggagaatcacttgagctcgggaggtagaggctgcagtgagctgtgattacaccactgcactccatcccggtgacagaccctgtttaaaaaacaaaacaaaataaaacaaaacaaacaaacaaacataaaaacctactaaaagattggcaatcatagatgtcaatttttgagaggaaagttgttggtaggcaagcctttaattttgggcaagaataaaagcaagttgattttaaggtttccctggctgtatgaatatttcttccaaaggacatggtcagaaatctccagggaatttcaaatctcttttctagggagaatccaatttttctggtgtagaccagcatcgccaaaccatcatcagtgcagcatggcttcctccttcattcctccttcaccagctctgtactgccgcctgccaggttccaggaagggcggtgatgcagatccgtgaataaccaagacaacatcccctgcctgggaaagctgccctgttccatcctcactgcagtcccacactctctcaaagggacccttcaagattatggcagcccttcttgctgcgctatcaggattagggctggagttgtgaacccagaatagcaaattcaattcctctcaaatcagtttctcaacgttgtcctctaacctcttagcaggattgagggagtttctttctcttcattaggcaggttgtgggactcacttaaaccaagcagcaaagaggttaattgaccaggtttgtgttgttatttatatgtcatgtaaacacccagctggtcctggcctttacatttggccatatctcagcagggatcacaggataaacttgacacttgtgagactccccagagaggtcttgagattgggaacacattcttttgaagtgtatcatccgcttcaatctattctttaggccaaatcctaataatcacacctgtcctccttgtaagggtccaattgtggatgaggcaatttttcctttttctgtccgaagaagagattattatcttaaaaaaaagacagtcttgtaagaggcaaattcaaatacagattaaaataataataatacttagcatttccaccccacctttcatctgcagagctcaaagtacttggcaaacattaattaattctcaaaacagccttatgaggtgagtaggggtattatctttataataatatataaatactggctggttcatgaaagcagccacttaaaagggacagtgctacaggattagtttcaaaaacagtcttctcacctggtctagacttaataattttggataacacatttgggagtgccaaatttcctaataatacgataccctagagtgaacatatataccctttcaaagtgatgtctctagtggtttaaggcagtcttatctatttgaaggaaatttttaatgttaaaaaattctaattgtgggttgttcacttgaaatgatgtcagtctacacatgaaaggattctaaactgtcctagtgcataaagtttagtggcgcgagtctgggattctatttcaaatgcatttgcacttgaagggttggtgacaatttcaaggttttatgtttttactcatcgatttaaattttgagcatgtcgcaaatcacagttccatgacttgtcaaaatgcataccaaccagaatttctgtctcatcaccagagatgaaaaataccaagacagataaaagctgaccaggaatgcattaaattggctcccaaatgaatcatacaaaaaggtggtctatttttatttggtatccttttcttcctttgtctcctgtcgtgacctcctttagcaaatagaatagtattccattttccagttgctaacctgaattccccggagttggtttctgagcatagaaccgtcagtgaagcccaccgcctgtggggtgtgttctgtcatagctttggttccatctgtgcttatttttcctgaagacaatgctcgtctatgcgaaattgtactggctttttgatcctgaaaaattaatgctttgggttagtagaaattatactttttctatcctaaactcgccccgcatcaagaattaccttgcccacagtaaacattaattcaggattttctttgttttattgagatgtaaaaatatccctagactctggctgaaatcattgttcattgtcttggttgggtaaatcctctattttaaagttgtatttgttgctccgaattttttacttattgatcctagtatgtgaattggtccacttgatcatgaaagaaaccttatataccacttaaccatgcagtattgatctgctaaatctatctgcttgcctctgtcaatggcttcacttagcagcctcaagagagaaaacctggttttggtctcatagctttggttgagctgatggtctccaatctccaaagtgggataaaccagattccttcactgtgtttatcttggcccgccatgtctctttatggagaaaatggtccaaataaagtgcttcctctgtgtattttgacaggaaacactactaatatgctttccttttgttgtgtgcctttctcctttctcccagtgttgtttaaatattttcagtacaatgacatatttattaatccactactctctgcatggggcatgaaatgattggttcttctgtaaagccctcttagaaaaggtggtttctccagtgagagttaataatattaccactattcatgtaaaaaaacactgagacaatctcttaaaaatggaacacatttatctaaaacagctggtaaagaaagcacgcaggcccagccagaggcggcgaggtcagaggtcagggttaacaccgatctcggtggaactttgaagctgacattttacagattatatgtgtctcagtgcacagtgggcatggcatataaattggacttagagacccctatttgttctctgcatttttatgagcccacagagctcttctttgaagcagcatacatagaaaataaaaactcattttaatgttgtggaactatttacaataaatcacatttacatcctgccttttcctaagcataagatctttctccctctctctctctgtcacacacagacacacacacacacacacacacacacccccacacacacacacacacgcatacacacacattcatggagtctatttcccaacctggggagcttatttttcaccttatagtattgtaaacctagcttcctctctctctttgccttgacttaggaatcagattagagattcagctatatttagtaccacaaggacaccttttgtaagtcatgtgaggtgattcagctagaacgagcactcttcactcccaggacaatcccctgataccataaaatgcttgctatagcatggcacttcagcactagaagaaagcatctgatttcaaagagattgagttccactctggaactaattatatcattcgttttatggatttttttttctaagttgctaggtgttttaactggagaaggctggcgaccaagagagaaacgtactggcagagattctgccatgggcactttagccacctaattaattttcaataaaaactcgcaatagttaatttgctctagaccccaatgtaaatcaaactgagacaaataggttaaaattagaaatgtgtgatggaaaccatgtttatggtcaaaattacctttcaccctggaaataacacagattgacagggaaagaaaatgagaccacacaggtttttgttcaaagagactcttaagtgaattaaacattttattaaggggaaacctggaccaaaaaaaagtttccaggatctatgaaataatgttattttaataaaaagtaaagttttaaaaagagttaccttaaaaatcacaagattaagacattttcattatacaaagttgcctggtatccccttttatttttttcccaggcttaacatgatgtagggtataatagtaaaaatactataaagttattaagttcctgggtctaagttggcagacatacccacccagtgccacattccttcagctcctatgtttcaaaacattactttcctacatcaaataaccatttttacttttatgagaacacagacatagattttttatgattttataattatacttcaatcctccaattaaaatgcccagacaatatagatatctttggcccagtctattggacaaatattattattaaagttccctccaggactttatatttgcaaaatattttgtgggctttaatcattttaaattgccttaactttgcccattttctccatgccactctgttatttctcaggcaaccatttcattttaacccacaaactactcatgtgatgcaaggtgaaataagctaattttttaacatattggaatgttagtctcagtgattgttagctccttcctcgtcctttgctgaacatggcaattcaaaccacccctggattctatttttatttcacttttgccaagttcacgaagtcaattccctctttcccactcaatctggcttttcttcctgccccaaaggaatgatgttgtcactgtgatgtcttctaatgcactataaatgccgtgatgaattggaggcaggctggtttcttctgagtgggagtccattatcctgtcagagtgttcctttcctgtaacttaatttttattgtaacaaatgactaagtaccaaaaaatgaaacaatgtgatgggccgatctaaagtggccttcctctgatggtaagtagagcagagtgacaattgtttgcagctgctttccacagggctctctgatgacattcactacccaaattggagttatcaaaagcattttctgggcgtttatggaagatcttcattcacactgactgactaacgataccaatataaataaagtgctttgcaaaagaggtcacgttaagagtaagagtggaagagacagattctcaaacccggctgcacgtaagaatcacctggagatcttgttaaactgaaattcaggggctcagctcccatcaaaggagatacccatttagtctgctgaggtaggacctaggaacaagcattttaaacaagcatctctgctaaatctgttgaagcagtcatacacattatactgtgagaaacactagcctagagctctggtcaattaatcttttcaataaatctccactgcacacttgacctttattttataacaaagcatttttttttcctgcttggatttctaactagggtagttcactcaaatcctagttccaatttgaatatgatctgttcacagttggtccattttccccgatttgttttacagattaataaccaacatgtctgaaaggttaaaatcatctgttaaagatgatgtgagaatattaatctggaatccatcaatccccagaaatccaataaatttggcgtataagtgaccgagccttcatctggaccagagggttcacagatttcaccatattcccaaatgggtctgtgacccagaaaagattaaagaccagtatcctggaagtgaacgaatttggcctcattaatatgaaacttccgtatcaaacaaatggttgcaatgtctaaatggtataactgattacatgtctaaataatataactgatattaaggttctagctttacaggtgattaacattttataataaaaataaagctaattgcaacccttctgaaatattagaatgttgtttgatatttgaagtttaatatgtagtgtaattgcattgtcctggaagcactgaaactactctcctaagaaacatttaggaacaaaggacagaaccactaggttttacctctatgggtttaaatggagtctattttggaggcagagtgaaactgaataaattctagaagatcatggaatctcagtatcaattcttccgtctattaaacatttattgagggcccatcaagaaaaataaaaactatcatatgtttattggaagctgaggctagcagatttgtgaaataccctagtttcatctaaacatatgcacacctgtgaattgtcatggtggcattctgtagccattaaactttcagttggaataatttcagtaaatcacagttaactttattaatccatgtaatctgtaagaacaaaaggatgattttttttcttaaaaaaatgtttgaacatcaattagttaaaaggctggatgagagtgggagatgattattggggaaagaagcaaaataatagctttgtgagtaaaaccacaaatcctttaatctattgatttccacagaaataatgctaacctttgcggataatcacaaaacgtgaaatgaaagacatatcaaagaaatatcaaacattctggctgtacccaaacaacttctggtaggaagacaagatgtactttaagggacttccaagtatttcattttaatcacaaaccttgaggtgttaaaggggttcatgaggtctcaactcattgtcaactaattatctttaagttgttgtcagcacattctaattattatgctcctgtcagctccaccactgggggtgcacaatcctagagtaatcggttccaaaaacaataccaccaccaccaacaaaaaaaccaaacaaaccaacaaacccagggatgactcacctggctgctgcttggtttgctaaactaaactgttgccgtcaccaacgcacacacgcacatgcacatgcacatgcaaaaagcttttaggaactttcatctttttaaaagggcaagggaaaaaaatcaataaagtggtggcctggccagcagtagggaatagttgaagcagcatgggtggctgcgctgtatgagaaacagatgtaagctctctgggaattgggcaggcatttctctttacagccaaatcaaccagccaatggaaggcaattaatgtccctaccatcggtcacccacccattcccaaaaagattattcagtgtggctgctgaggccaagagcagaaagggacatccacccagctggagaacatatgatttgggctcacactttacccaagtcgtattcttaaatatgatttatttcgaggtctgaatcagcaggggaaggctctcttgctgttctgacttggcacattctaccatcagacaagtctaaattcatctgttgccatttacatccatatcttttttttttaatttatttttcttggcctaggaatccttttagagttggtaaaagacatggacctgacacaaaaggattcttgctggtgtagagttagatgttacagatttaaggatttggaatgattcaacccctttggaaaactggcagtttctcataaagataaacaggcatctaccctacaactcagcaattccagtcctaagtattacctgaaataaatcaaaagatatatccacagaaataatcatttaagaatattcagagcagcaccgggcacggtagctcacgcttgtaatcctagcactttgggaggccgaggcgggcaaatcacgaggtcaggagttcatgaccagcctggccaacatggtgaaaccccatctctactaaaaatacaaaaaattagctgggcgtagtggtgggcacctttaatcccagctacttgggaggcggaggcaggagaattgcttgaacctgggaagtggaggttgcagtgagccaagatcggcaccactgcactccagctcagtgacagagtgagactctgtataaaaaaaaaaaaagaatattcagagcagcattactcataatagctccaaactggaaacagcccagacgtccattcatagtagaaaggaaggataatcaagttgcatattcatacaacaaaacactactcagcaataaaaaggaatgaactacagatacacagtatgatagagaatctcaaaagcattgcggggatcaaaagaagctggatataaaagaatacaagcagtatgattcatttatatgaagtctacaaatgggcaaaattaatctatagtgagagatgtcagaagtcagaaagaagtcacctttggcaaagggataattgagtgggaaggggcacaaagaaactttttgggatgatgggaatagtctatatcttgttttgaatcatggttacgtttgtgaatacagcggacaaaatgcatggagctgaacacctaagatctgtacatggcattgtatgtaaatcatgtctcaaggtttttaaaaattgaaaagtgaaggatttttctaaacccagatgatgcaacagaaaaaaaaaatgaggaaatcaaaaaatagggaaaatggggggaagtggatgatgccggggaaagccaaattaattaaggataaggatacatatgaatgtatgtagaaatacccagccatttacctaagattttctcgagtgcttactaagggcctgatactgtgctaatcactttaatatacattatctcatttagtcttctttttctttgaccctccagtacacagaattggattaatcatattccttggttcatgacatattctcatcattggtccatttgtagctagtttgctagttttatttagttgactacttatttttattcattatatgtgttcacgagcctgccgctccatcacaaactagcaccttgactataaccagttatctccctatttgatcctctctccctcccattctcccttattccctctcattcaaagcagtcatcaccctggaccttgtgtttatcattctttttcttttttgcacatgattctactgctgctgtatgaactcataaacatatagacttcaatgttatttagctttacctttatgaaaaaatgtgctatacataatctttggagatttattttttcctttaatattatattgctaagattcatttatgttattgtgtgtttgtgtatcatttaatctttactacaaccttgtaaaattggtattactatccacatttatggaagataaagttgaggctcagagaagttgattaatatgcctaaggacacacagctaggaaggggcagaggcaagattcaaagctgaatctcttaaccaatatactacactgccttctcaattctattgccaattatctatagccatatctctatctatacctatttgtatccatatccattgctgtacatatttatatataagcataaatgtctccaggtagtggaatacaaaataatcagccaagttcatctaataatttatgggttgttataccccgatagagaaatacaaacacaagcccataacttcaagggtcaagtcctctaaaatttagaatatacgagcaggtaatgtctaaggaaaagcatctgaagtcagagtattgtgtgtgtgtgtgtgtgtgtgtgtgtgtgtgtgtgtgtgtgtgtgtgtatgtgtgtgtacgcacgtgcatgtgcagtttctggaaagtgtctaagaacaacatccttattttatttaatctcatatgccaaaagggcaaatacatgggcattgtttaactgagtccttgctctgcaccttataactgtataccagaggccgtggaaactggatcgccctctcaggatgccattatagccaagcagaatctcattaaaaatcaattcctcgggtccataaagccagtttattttatcttcctggagtgcctgctgctagcagttacacagtttcattgtgtggcagtcttgtctgttaagaacattgcacaaaacggctatttaaagattttccatttttatgttaaactttataattttacagtagtttaagtttacagggtttgcttttcaagcttagggtatcttgttacatgggttggaagtagcattgccagtcctaaggttccactaattaaatatttgcctttataaactagatgttgtccaatgtgagtgtgcagatttaattgggcagcagagctccagatctaagaaagcctgatttggccactttcagcaatttctcattcactgctgctttttgattgttgaattgtgcctagggccttcactagtagtaacacaaaaatcagctagggaatttgctctttgtagtaatcctaattcaactctctctaaatatcttacaaatcaatattagccaaattttataaatggggagttgaaagcacatagagatttagtgacctgtacaggtcaccctgaatgagcaacacaggcagaagaaattggagaggctactctggccccatctggaatcttttaactcttttgacccccttcagtgggcttcagggctcgctgatttcaaagatcagtgacctttttgggatagtgcttggcagtgaaacagagaggcttgaattccttagattttggctactgtggtccatgacgcagtttgagtttgttttttagaagagtccgtgctgttagtgaggagagtaaggagggatggggaatggtgtgttgggctgggattgaagtaggaagatgtttaagatcactagagccacccagtgttccttccctaccacgtgttgaggactagcataagcatgtcattacaattttttttaaaggttagaagttgacattggaaggaaccaaatccaaaacaatcctcaacataacctttttcaaattctcagtggaaaataacagggttatcctctgttatgaacccttgcaattttgacaattgcatttctcctcaagaaaccatcccaggcgggtgcggtggctcatgtctgtaatcccagcactttgggaagccaaggtgggtggattgctggaacccaggagttcaagaccagcttgggcaacatactgaaaccctgtctctacaaaaaatacaaaaattagcagggcatggaggtgagcagctgtagtcccagttacttgggaggctgtggtgggaggatagcttgagcctgggatgcggaagctgcagtgagccaagatcgtgccgttgcactccagcctgcgtgacagagcataaccttgtctcaaaaaacaaaaacaaaaaccctcactttacagaggagacacagaacattaaataacttttccaggtcacatacttaggtattggcagaaaatggaccatcacccaggatcaccacctcccaagccagtgcttctctctgtcacccctctgccactaagagcacctttcataagccctacaccaaatcatctttgaatttagagtcattttagtctgggcttgaaaacataaaactgcaatattgctacattagtgtacagtgctaatgtttgcttagggtgagactgggctaggagaataagatctagggagagctccaaataagagcccccagctgggtgcagtggctcatacctgcaatcccagcactctggaaggatgaggtaggaggatcactagaggtgaggagttcgagaccagtctggccaacatagcaaaaccccatctctactaaaaataaaaaaattagccaagcgtggtggcatgcgcctgtaatcctagctactcgggaggctaaggcaggagaatcacttgaacctgggaggcagaagttgcagtgagctgagatcacccccaagaatgtgaaaagggattctttaagagggagaaagagttttaaagactactgaagcttttagaaaaatcataggtccttggctggacatggtggctcatgcctgtaatctcagcactttgggaggctgaggtgggtggatcacttgaggtcaggggttcgacactagcctggcaggcatggtgaaaccccgactctactaaaaatacaaaaattagctgggtgtgatggcatgcacctgtaattccagctactcgggaggctgaggtaggagaatcacttgaacctgggaggcagaggttgcagtgagctgagattgtgccactgaactccagcctgggcaacagagcgagactccatctccaaaaataaataaataaataaatacataaataaaaattataggtccagaaagtatgtagtgataaatagcccctgaagctgcataataagaccatttttaaaagcaaggaacttctgggagtgcataaaaagtaaaatgcattgcagggaaacataggaaaatcattcatgagcctccgaatcagtggcttgactcagcactgaaacatggatcttgagcaaagacagatggaaacttgttttacgaaggaccaggagaggaattgtctcacgagaatatgtaactagaaatggctttatatgcctggttcatctatatgctgctaatgcacttatttgtgtatattttatgctaatagaggccctaaaactgatataagaatctgtgtatgctaaaaaaaattctgattccccgagctttgctgaaacggcgcctagggagggagatgaggtgatggggatgggtgatgggaaacaagaaacacagtttttgaaggaaaagcaaaaacttcattccttgggtgggatggtagagggtggggttgaagggagtcttcaaccacgccaagtctaaatagactgggaggcttttatttggaactctcctttggcaacgttttatcacagcatgttttccattcttggcggagaaaaggacctggaggctatagaactggctcagtcttcactctgacaatacgttcacaataatggaagacatcttttccctataactttgaaaaacatgaaagcagatattggctctgagtatgtctgatagtctaactttatttcctgtcaacagaaataactatgatttatatgtggtcatcaacttcgcatactcacatacaattcagattgagagagtacagcgagatgtaatgctcggagccttgatgtatgcctatctagcaaagcttcccggttcaaggagacctcagggactgagaaagactctttaatattctcactcttctgacactctagccccaagtgcatccttccagtgaggtatattacatgggcttcagacgaactacatgtaggctttgatctctgagcccctcagctacccttcttgtgatcctgaaggttggttggactgaatccaataattatagtgagatgctgaaggctgaggagctgattcatgttggcatccggcacactgttttattcttttagtattcgtttacatcagaggagtgagagcattttaaaaattccattttcttctcagaatggattgatagtgcaggcagtggaaattgagtgaatacaccttttcagttaatgccatcttatgtcatctggttttgaattcaaaagcattttttccactgtcttgttgttatgctgtataatttattgaatttaagatgtcgagaatcataagatgcaccattacgttatgtaccactaagaaaaaaaatgctgccaattaaaatatcacctaacaattttttacattttttgcactttatccttattaaaagggtgcttttatatttgtttagatagatttttcttacgtatcatgcttctgctgatatgaaaagaaaaatatatttaaaataaactaagctttatttttgctaagattttcctaaaattccttcatgttcagagtccaactcttcggaatcccttaaagacagaatcttcaatgtctatgttattgtacacaatgcagtgttttgccccaaatatgacagtactgcacaatgacagctacatcctgaccattacctggctgacagtgagtctgtctaagtgccagcaattgtaacatgccatggattgtgagaagccaagactttgatatacatcctgattttagaaatgttaaaatgtggggggaagtgcagcttagaatggaagaaatatttgttttggtattgaagaatggtaccagcttcacttacacacaattttaaaatagtttacaaaaatttatatttctggccgggtgcgatggctcacacctgtaatcccagcactttggggggctgaggcaggtggatcacctgagatcaggagttcgagaccagcctggccaacttggtaaaaccccggctctactaaaaacacaaaagaattaggtgggcatggtggtccatgcctgtagtcccagctacttgggagactgaggcagaagaatcacttgaacccgggaggcggaggttacagagagccgagatcgtaccattgcactccaacctgggtgacagggcaagacgctgccccctgccaaaaaatatatatatatttcttaggttcaatatcaacctcaaaaagtaggcaaagtttaaatcattcccacctaaagctttttgctttgattgaatgactgttccagtacaagcaattcaaagcaattcatagaatgctaactgggcatacttaattttgcttctggaaagactctggaggctttctgctccagaaagaagtgactattgtaagtgtatcagtcagtccattaagctgtgagtcagtttcatacagttcctgggaaaggcatctgccaatatttattggtcttccacttaaaaagaaaaatatagtttcaaatataaaaagacatattcttcctatttggcaaagacatttggtgaaaagaaaaaaagtggcagtcttttccattttttgtgcctatgcttatgacaaagtaaatgacgtgtacttttccaaagttagagccaaaaattttttctttatgacatagttgtaaaactaacatatttgtgaaaaagtttttttagagaaaaaagaaatttgtagtaaccactagaatcatattgcagaaaatattatttgaataaaaattaatgataaattttttgatcacttaatcataatgtatagaaagtcacaaaattgtcataaaatttataaacatccaaactttatttactcccaggaattttaattaattaattaatttttatttaagttttaagttcaggggtacacgtgcaggtttgttacataggtaaactcacgttatggggtttgttgtacagattatttcatcacccaattattaagcctagtatccattggctatttttcctgatcctctccctcctcccaacctccaccctctcatgggccccagggtgcgttgttcccctctatgcgtccatgtgttctcatcctttagctttcacttataagtgagaacatgcggtatttggttttctgaggagctttaatttctatagctactatttacatgcacatacacaatcccctaagagcagattttttttgctgtcgtttgcattagacccaaaggtaattaaatgctggtgattctgtctatgtccagcggagggcagcagtgcacatctttagaacgggattctcattacagattggaccgacaatcaacctgagaaattgtacgctgcgttccgtgtcgctgcagtcaggctccggccacaggtcccgtcaggggcagcgaggccacggcgaggtgacttcagggggccaggtggcagagttgaatccttttctcagttctgtagaacgaccttccccagtccccgggtgtacagcgcaggaaaaatgcaagactctatgacatgcaaaggggctggcactgagcccactgcttggctgctgagtttacctttggtagtaaatttgaggaaatgtggctaaaatgctacttattcccttcccaagatttctgtcttagggttaatttctacttagattgcatggcctcccgctttctgctctgatgaaagacactgaggttgggcatggtggctcacacctgtaatcccagcacttagggaggccaaggcaggaggatcacttgaggccaggggttcgagaccagcttggccaacataatgagacccctgtctccacaaacattttttaaaaagaaaaaagacaatgaggagatgtcatggctttggtgctatgagtctgtaatacaaaagccatctctccacgctagcagtggccaggatttttcctccctcatacagtgtctatactcaccaaaattccaaggggacttacctgcaggggctcctgtgttcttttgaactttccactaaaatggagtgcactgggcagtagtccacctaatgtcatttttgtttttcaacttaaagaaaacacatttaaaaattatccaaatttcttaatgaggtcgcaaatgcttaggaatgaattattctaaccttgtgcattacttgagtctatagaagcactggatgcaacacagaaaaaagtagactctaaaggtatcatgatgcaatggctcacacctgtaatcccagcacgtagtgagactgaggagggaggactgcataaacccaggagttggaggccagtgaggcccacatagcaagaccctgtctctacaaaaaaatttaaaaattagctgggtgtgatggcatgtgcctgtagttcatgctagtcaggaggctgaggtgggaggatcacttgggcccaggaggtcaaggctgccgtgagctgtgattgcatcaccgcactgcagcctgggtggcagagcaagtccctgtctcaaaaaacaaaagcacaaacaagtaaaggtgtcatgaaagtttaagtcttagactccctggcaaccttttcatcagcgcagagtaaattctccagactgttattatcagtgctgaagagtgtatacaatgtgtgcacaacttaaggaataatagcaagatggacactagtgtacccacctcccacagtattactagtactttgatacactgtttgccctccctgccgccattcaccccctctctcccagggataaccactctcctaaattgttatcttttctgtgtttttcattatagtatgaatttctctctattctgttccattggtctacttgcctaccctacactaaaatcaccctgtccaagtcactgaagctttccagtgaagtcttcagttctggtaggtcaagtgaaatccccctccaccttctcacgccttcaactccagttctttttcagggctgtcttgactattcttgttccttcacagatttagtcttaacattcatgattaatcattatttgcataaaaactaaaagaaaattagaggatgagaagttgactcctttagcgagcctctcagtcggccaacctggtttgaattctggctctctatactgcctgtgctgccttagactagttatttaacctctctgaacctggcttcctcatctgtgaaatgcagttaatattagcacctacttcataggattgttgtgaggagtacaatgtgataggcaaagcactcagaacattgcctggaaagtgctcaacaaatggcagctatttgttttgtcactgctgactttgaatagccagggagcttctgaagtcacactgccctcagctggaaacctggctgtccccaaccagctgcataacactggaccactttctttctctcttcaaacctctgtttctgaatttgcataatggggataatattagggttgtttaaagatgacatggggccgggcgcggtggctcacgcctgtaatcccagcactttgggaggccgaggcgggcggatcacgaggtcaggagatcgagaccatcctggttaacacggtgaaaccccgtctctactaaaaaaaatacaaaatattagccgggcgtggtggcgggcgcctgtagtcccagctactcgggaggctgaggcaggagaatggcgtgaacccggggggcggagcttgcagtgagctgagattgcgccactgcactctggcctgggcaaaacagcgagactcggtctccaaaaaaaaaagatgacatgagaaaaaccaagggaaatcacttagtgtgatgtctggtaagttgtatgtgctcaacaggattttaagtagatttctttttcttttcttttttctttctttttttttttttttttttttttttttgagacagagtcttggtttgttaaccaggctagcatgcagtggcacggtctaggctcactgccatctccacctctcaggttcaagcgattctcctgcctcagcctcctgagtagctgggactacaggcacacgccaccacggccggctaggttttgtatttttagtagagacggggtttcaccatgtcggccaggctggtctctatatctcctgacctcaggtgatccacctgcctcggcctcccaaagtgctgggattacaggcgtgagccaccacgcctggcccatagatttaatttttgaagtgaattgcatcttaaggctaaaaatggtctgtacccttgcttctgagtatctacaaaaacacttgcctgggagtcattggaaaagaatgctggcagtaacaaaaagtttataaaatcacctcttgtgatcttgcaacttttctttgctttcaactatcagaggtgcagggaggagaaagtgttccttactcagggcgggactctctttcctgggtccctcctctggttccacagcctgctttactggctgagggcagacaatgcaaagccatgtcttaacttgatttccagaatcagaggaaagtttaacataacaaaattttatagctcctgcccagtaacatatattactttaaaaaaataaaaatacctttcccttatcatgcattattcttttacatgtacatttttcctgatgtattgaagtaatattccacggtttcctatgagttggaggttttatggcccttctgtggcagatcagactaaacataattcattcatagctacttagtgctcagggaaataaacccctgaacttaaataactatggtgtgacctctgtaaaatattatttatggctttaaaactactattatgtagatatcaagatgtgccaaatgttataaaccaaacaccagccagcaaatgggacaactactactccatttatttttttctttccttcctggatacttctctgcaaatactacttctgtttaaatggattctggggtaattaccaggcaggggaaagcaatgtttatttacattttattatagaatattacagtaagtaaaaaattctctttcataaagaagcaccacaaaaatgtgaacattcattaacatactggagtttaataggaaatacattgattacttttgagcataaagtaactaccctcactatcaatgaactaatgtaacccatctgctattcatttttgcaaattagtttatggaggaaaacctgattgtacgtttaagttatccagatgggatacgctgagcatttccatgctgttaagaatatacgtgcattctcagctgtctttaagatcttcagtgtttagagtgccatctctgcatcttacattattagatgcatctctgcatccaataatttcctgaattatttcctatgcattcaactatcttgtaggaaacaaaatgttcactggtaagaaagtaatggagtcattggtttcctagttgtcattcagctaatgtttgaggacccatcatgtgctggttatggtacttggcactggcaataaagatgaatgagaaaaaaattctcacctcttgtaggactagcagcctgaatatggagatagataaatgaataatcagcttctaggcacatagcaaatgctccgagaaagaaatggaataagtactaagagaggatgagggttaaggatagggcatgggagaggcaaagaagacttgcaaagaacttcacagaggtgaaaacacagagtaaagtcttaaggaagaatgaatgagtaaattctggtggtcaggtggaggagcaagaccagcatgagcaaagacacggaggttagggcctctttaaatcattcaatatggctggaatttggtggggtgttggaggaaaagtggatgaagatttagaacgaggccaaccatgaaggtgtgtatgtcctgctgagtttactttctcctgtaggctgtgggtagacaggagtgattttgcattgaggggtaacatgataagacttgtgttttatgtagctcattgtggctgtgatgtggagaataaactggagcccaattaggaggcttctccaactttcagatgagaagtagcaaagccctgggccagggcagtgataaagagagaattgactgaaagtgcatttgggatatagaagcaacaggatctgataactaggttgattctaagaggaaacagaaagggagaaatcagggaggcaattcagggctccttgaggggatagaggagtcattttcagcatctgatgctattcttggaaggatgggtttggagaagtggccaatgaagttagtatggcccatacagaagttacagtacctatagggagggcatttagacgtgttcaagaggtttttggaaatgtgagtttggagagaagttagggttggagacacagattatgccacttatatatatgatgttcagtaatgtttttaaagatacatgaaagtgaatatatgagctaattggctcatctaagtaaaacttaagaccacaattcagttgttggcaaactacattgaaataacagataagtcttcatccttcaagacctgtaggaaaaaatgaaaagaatagaagctgttttacatgctgtcacttagcatgaataggaaatgtttcctttcccattttggattctttaacaaaaattggaaatgtcttttacttattaaaatcataacaagtattaatcaagccttcctttgaaaatactcatggtccattccaatgattgtcattgcctcatccagaagttatgctttcttttcttttagaacatcacctacttttatagagttctgtacaaaactgagcaaaatataaaggaatatatttctacctcattggtcttgatgactttctaacacctcatgcattttgatggataagattaatgcgaccatatagtgtcaagcaccttggactttcagaacaaagcccttttagaagaacaaagtatcattattaatgacacatcatttacagctttcatcggtaatgtaaggcttcagccactataatgggaacttagttaagagctcaatgtagagggcaaggctattagctaaggttcttgacagtaataccttttgctcctaaggaaaaagacaaatcgcacttaaattgatcaaaaagacaagccaaggggttcagaaagaggtgagccaccattcgcttactaaatttctcaaagcccttgtcatcaatgagtcctggtggtgagccatgccctcatcatgggtttcctttgctgccaatcccctgccttctaggtatcctgctcctccagaaaaatgcctcatgcttcagacctcatctttccctttattctcctctcctgtctccctacaacccccaaagtttcttgggtttcattgccacaggatttttctctgtcctacatgaactcggacagcaaagtacattaaataaaggaatgctggtttgctccggtaacctaattgacatgagtaccgctaatgacggcaatcttaatgcaaggtggcaaagcagtggggacgcattttttcctgaatatgcgttgtcagtgtattcagtgtattgttgtattactaacaatcaagtaaataatggaggatgcctgtgtacatagcatcaacactattagaaaaattggcaaattcctgacgaactgctgctcttatgtaagaatctctttgggaccttaatgtacttcaggttcatgaagaccttcttaacgactcttttgcaactactctgttttggttggaggagacttaagagacattttcctggggaaaaaaaaattaaagttaatttttttaaaaagaatgccatctaaaatcagccagctctgttttaggtagagagaaaaaatctggaacacaaagaaatgtccaataaaaataacagaagagggactttttttttttttctttttgtttttaagacagagtctcactctgtcacccaggctgaagtgcagtggcatgatctcggcttactgcaacctctgcctcccaggttcaagcaattctcctgcctcaccctcctgagtagctgtcactacaggcgcccaccaccacacctggctgatttttgtatttttattagaggcggggtttcaccatgttggccaggctggtctcgaactcctgacctcaaatgatccatccacctcggcctcccaaagtgctgggattacaggcatgagccaccgcacctggccgggaatttactttttgattacgtgtatgcccttggacttcttatatccaaggaactagttgatgaccttgcagctctaccagcaacttagagagttactcaagattgttgagatctcctatgacaggaagacggcaacagacttaaagtaaggtagaaagggttttgattatatattatgaagtgatatttgctctaaaggaaattccagactattagtctgtctctgaatcttaataattacataggccgggtttggtggctcacacctgtaatcccagcactttgggaggccaaggcgggcagatcatttgaggtcagaaggtcaagaccagcctgaccaacttggtgaaaccccatctctactaaaagtatataaaaattagctgggcgtggtggtgtgcacctgtaatctcagctacttgggaggctgagacacgagaatctcttgaacccaggaagcggaggttgcagtgagccgaggttgcagtgagccaagttcacatcacagcactccggcctgggcaacacagtgagactctgtctcaaaaaaaataataataacaataattttatagtgagcaaattggttagttgatttgattgtggagatacctggaaaatctttgtcatattattgttttaattttttttaaccatctgagaaaatacagtgacatattattgttttaggagctctcaccaactactttactttctcttttatgcttttattttacaaagttaggtcaaagctcatttccagtccaattgttgaggttcactcttttctatctcacttcctgaagatacttctagctagtgaacatttactgggcaacaagggaattcaggccaacaagaacctggaagcctgagacaccagacaaaatgttacagcacagggatcattgcaggaaaacgtttcccatttcagttttaaagtttctgctgctttgaagtccaaaatatccaataaataattgcaatttataattgaagtaaaatgcagaagactactacaaaaatttttaaattgacatttattaaattcaaacagtatttgaggactatctagtttatatacatgttgaggttgataaagtattgaggactatctagtttatatacacgttgaggttgataaagttcaaattctgttttaggaagttaacaatgaattgagttcattttaactgaatgttactataaaagatggttttcttgctgcaatgtaaatctgctattaagaaattagcaaagtggctggtggtgtttgtgcctttaagatcatcgttcaaaagaattcagcaaactcgataacaaaggtaagacaaacataacctttattctctctcaaaaacccagagaacagggcctggaaccatattcgttaatttaaccagaatcagaatactttaactttcatagtctcatttaaaattttatagcaatatactgaccattctaaaaataacaaaatacatgttgctctcaactacatagttaaaaaaggtagtaaattctcttacccaaaatagaggaggggtgggctagtgagctgctcaaacatttgtaacaaataaaaatgtatctatatacatataatgatcatgttttcatagcctaaaatcaccatacaaaatctaataataaaattgtgtcgtgttcaggagttgggaagccaacacattaaattaacaaagtatttttggtatatgtaaataatgggatagaatctctcgaatcaggattgtcccagaagttctaaggcagatgtcaatgacatgcacattgtccatgttcagtaattttcaaagactagaataaactatgtaaactattcaatacaattcaatattacttaactgctaaaaagtacttcaagatcttgcactgccttgagtgagtataatcaagttagtaattggaaaatagctgtaatagcaggcactgaagaattctgacaaataccaaataactgtttgtttttaccaaataaactggtaagatgatatcacaaagggttttaagttattttgctatacaaggtttttaaaaataaactattgcttcttagaataactttaaacatactgattgatgttaatcaataaaatcaatggaatgattttagttgagtgtaaacttcatctcaaaggttcaaataatcttaagaatctagtttacatataagactatatatgctttaacattgattcaaatatgattactagaaatcaatagatttcatttgaaaagataaaaaaaattttttttccaggtccaagggaaaaggtatgaatgaagccctttctaatcacacacacacacacacacacacacacacacacacacaatgacaaagaacactgagctaggagacatagatgtgactttagggaacttactttccctcgaagatctcttccagctatctgattctacgttaaagcatttcctctgaactgtacaaactggcctcacattttcgagtttctacacagtacctggcaaagtttgcctgttggcttttacaccaaaatactaaaatatcaaatgaatcacataaaccctgtcctacaactctgtatgccaactagttttccccagatagtaattttttaaaaattcattccacaaatcatcaagagcttcctacgttcaaggcagagtgccagaccaaacctggaacatcatggttgtcactgcccctgggaacaaattactatccgaaaaagtgaattcagttgactgcttcaggcccaacctggttcagggtcgtgattcccaaatttgagggaatatgggactctccagtggagtttgttaaaacacagcttcgaggatctcatcccagccttactgtgtctgaatctctgtttggtgtctcctaatctacctgcatatttaacaagcatgttctccctcacgcctccacgtctctgcaggtaatttgtgggcctcactctccattccagcccactctccccgaccaaagaaaagaaaaccactgtactgtagtggcgaaagccctggactcaagattcaggagtcacttgcagctgcctgatctttgttacttcacattgctaggtctctcaatctcttcctctaataggggtttaataggagtctccatagggatcccttccactctcagacttgaagaacctcacatggcaactcagtgtcgtgaaggaggtgggaagagtttgcaaggatgtttcactctgcagtcaacatccctccccgcggcaagacagtctagcagccccccaagagcaaggggggtaattcccttatctggtcccctcattcacaaagggaggaaaagctaggcgaggttggaattgggtgacgggcgaggaggagatgccaaaagcaccttgcaagagttttggcaagaagcaggagggatccctggaaagccggaatcactcctcgtcgtcgtcgtcctggtcctggtagcgaatgtagacgaccagcatgacaaagccggtgaggatgcagagggagccgacgaccaggtaggcgatgcccaggaaggggttcttgccacccatccacgagatgctgctgaagatgaggagcttgtggccgccgaacgcgcgcaccgggtagttgtaggtgatgttgacgcggtaggcgccccgcggcagcccggccgagtagttgccctggcggatgcgcgcgtacagtttgcggaacgtgggcagcgccgccgtgcgcatccacaccacgaagtcctgattgatgaagccggtgttgttggggtcggggctgagctcgtagactggccggcgccagttgggcgggggcgccgtgccctggaaggccaacgccaggctgccgttgaccagcggcgggttgcggaacttgacgtggtagtcggtccaccaggcgatgccggagcggtcgagcggcacctcgacgtagggcccgccgggctggcgctggtgccaaagcgagaaggagtcgttgaagaggctgttggcgatggcgccgcagggcgcgatgggcaggccggccgcgctgcgctggtagggggcgcactcgttgacagggtggcgcagcgcgctggggagtccgctcagctgcgcgtcgtcgcgggacacgccgtagcgccggttgttctggtagaagttggtcagctcgtagtagaggtacactgggccctggaagagctcgggcagcgagaagtaccaggcgcacgagcaggggggcggcagcgcccggccctggccagccgcggcgcacaccgagcagttaccggtgcccgggtcgcctgtatagtcgtactccagctccttgatgccgttggaggagtagtagaggcccaggcccaggccgatgaaggccaggcccgcgcagaagaagagcggcagcgcgatgctggccgacagcagcggctgccaggcggggaggcgctgctgagtgaaggcggtgttgtcgggctggtgggcgccccgggccgtggcgctccaggtcatggcggccgcgcggggaccgacgcgcgggctgaccgagtgggggccccgccgcggggcgcctccctctccgcgccgcgcaagcccggggactgctcgcgggtcgggtttcccgccagctcaggtgggtttttgcccgggcccctcctctgcctccgtcacaggtgagtttagttccaggccctacgagcagtgcccacaccctcccagttccgcctccgcccaggtgcgctgcacccccgcgggtcaccgggagccgcacctcgcccgccccttccgaggtgagcaggtgggtgttttttacctcacctggtagactcagtctcgcgtttcctctcagtccaggtcatcggactccacctcctctcctaggtgagtggcggccccgggctgcctctgagtggctcctacctggctcaggtaccaccttctcttccgccttccaagtgactagagttcctgggccagtctcccgaaatcaaaaggcgctccggcctccagcagaaatttttgctgagggcttgcaccgtggtcctggaggcttgaagatttcagatccttaatcctctgttatttgcggggaaaaggtggctctagaccattttgtcttttaggttagcttcacaaaccgctttcgcccagctttcagtctcaagttgggagtgtccagggaattacgttatgataaatctgtttcgaattcaacgcctgcgttcaaattttagctttttttttttttttttttttttttttttttaagggaaaatgattttctggccagatcacccagtctggctgtataactaggaaatgtggaaagttctctaaaaataaaatcatccttaaaaagaatcaaaggctggagaggttcagagcctttaaataactcttagctggtgtggagaaaccaagaaaggaaaaaatgtgctggactacatgtgatttcgttttcttttcagattatttgcctgactagagaaaggcccaatccaaggtcccaggagacctagctgctatccacaaaaacatctggagtgtctggcctaaggaagtaaactacaaggatttataggatttattataaaaagaactcaaattagctccctatgttgcctgggattctggcttttttttttttttttttaaatctaggttggtaaaacatatacaagggggtattgggacgttctgatttcttactaaatctaaatcttccctaggtattgtgttcttgcttctcctccagcttgtaaaatgcaagtaatacaaatgttttctctattacactacacctagcataatatattatattcaggagtcattcaaaacccattgaacttggaaagttaaaatccttattaaatttaacagaggaatgttgttagcatcttccaagtgttcagtcctatgctaattagacaaaaaaggacctttgacctcaaggcatttgcagtttgataggggacatattaggagtaagaaacaatcaaaatagccaataatagctatgaatcatagggtgtaatcaagtatcaaattgcattctacaagtcacattaaaattaaaaagtaatattgatttaataatggaacattgattccagtttgttaaatgaatgcaagttggaaaccaggtattatagaagactgagggaaattcaagtgacttgaatttcaattccctcacttcttatcatacccaaagagaggaagttccaaaattctcagcaagttcccacagtgtgatccagtctccagtcaccctttttttcaataaaagaataaatagttctttgtatcattatggttgagttccacccacccgtttcattgaatcactagtccacaaaactcgtctctaggaaggaattcagttttcacaacttttgtagatttttttttttttgagagagaggtgtctccctcagttgtccaggcttgtctcaaactcttgagcccaagagatccttctgcctcagcctcccaaattgttgggattataggtgtgagccatcacaccaagcctatctggtaaatcttaagtcttttttctagtagatcaccaccacacccctaaaagggcaagccccattcttgagctcagagcctttcctccttttctcctattcctggatggcctaaaggtactagtttattcattccactaattaaggtgacagattttcaaagtcaaaagagaatatttcaagacaaggaatggtcagcagagttaaacacagctgagggttcaagtgagataaatgaaaaggaattatggggtttgacttttgtgggaacactttgggtggtttgtgtggcaggaatgaggttaccatcaggtgcagggaaagggaagcagatagcaagataggaagacactctttttttatttttatttttattttttggagatgaggtcttgctgggcatggtggctcatgcctataattcaagcacttcgggaggccaaggcaggaggatcacttgagcccagcagtttgagactagcctgggcaatataacgagatcttgtttctacaaaaaataaaaacaaattatctgggtgtggtggcatgtgcctgaggtcccagctactcaagaggctgaggtgggaggatagctttaaccagggagttatgattgcgccactgtactccagcctggacaacagaacaagaccctgtctcaaaaaataaaaataaaataaaaaaagagagaatggggttctaaaggggaaagcctgtttttagaaatgtgtggaaagggaaggagaaaggcaagtgataactgtctagaagagcatgtatcctaaaggaaaggcttcttttttagatgtcagagaagtgtgtatcctgagggaaaaagataatagtgcagatgaggttgaaaagaggggtggcaagcttactgatagtgcaaaggcaggagcaggctggagacgctgatccaccagccagagccactggtttcagagaacaggtgcagagttatctcacctctgaaacaagagggcagggtgataaaaatgccctctgcagaatgcagctgggtattgggctcccgcacctcaggctgggagaaagaaatgactgagtgtgaccagcatatggtggttttcagggcagatgaatttgaaagataaaaaattcaaggtattgcagtccttgtggaggggtggctaaagagatgtgccttagtagttaatctgaaaggcgaagaaaatgaaaccaaccctgtggatcaaaagaaaaagaagatactggtagattggcagtcctaataatgttaattggcaggtgccgtgaaagctgggaggaaaaagtgctggtatgagatggggtgttaaagatcttggaggtgaagctgtaccaaggtccatgtatacactatatttcccctaccagctcgtaagttccgagaggtggaagactgatatagatatacattgtcgtgttcctcagagttcactatgtaaggaaggttcagatctcatttctctcattttattacatatgttgtgatgtattaaaggatgcttggatcatgtaaactctttagtaccagtaaaataagaaacaagttcactctaaaattgttttttgtatcagtgttattaagaactcaaaggaaaagaaaaaaggcatttctagtccaaatactgctaaaatcacttcattttttcattttatctcccagactttatccatgtaaatatttaatttttaatagattgtaattaagatatacacacaattattctagttgtcaaattacctcattttggaatgagatgaagattgaaataaatattttctatgttccttaatggtgccataattcataggtctatcatatttaactattgttggacatgtaggttatatccagtttttcagtattccaaagtatatgatagtgaccatcttttctgcatataaccctttttaaaaaaaactatgtgtctccctttccccctaacgttttctttcagatttttttccttgggataaaattctaaaagtaggaaagggacttaaaggtgaagctctttaaaaatacatactgctggagtcatatttacactgccacaccaatgtatatattttgatactttcaccaaaaatttgccaacaaaaccaagagctaagcacagaatatatttagtctatgccaataaactctcagatactaggagaatagtattggataggggaaagaatgctggccggaccttaaggaagttcagattctaccctgaaagttccttaggatataactgtgtgaccttggtcaaattgcttaacttctctgttctcatgattgcttatctgtacgaacgtgtttaccaaaatgattgttagtgtgtcttttttaagcaaagatttctgttcctagtcttccttacaatgactcattgaataatagctaacttttattgagtaccttctgtgaatcagtacttacagtcactgcgtaaacactttatatacattgtcccatctaatttgtacacaaatggggggcattcagtccaattatactcaaagaactgatgcaaaactaagattcaagccagtgcaatggaggctgcctgagttctcatagttgtaatggggagatgagggattcaaagggcagcttaattccagtgtcctgtttcttcaaccatgctacactgtaaggccttggcatatttcctcctcaaaaaactccaaaaacgttaaccttgaaccagtgtttattgttgcagatcttctcttaacaccccaaagataagcaaactctgttccatttacacagagtcccaggaacagctgagttgcttgtatttttgtttttacaaaagcttttgttttaaatccaacttttgtttagcatgctcatttctcttgctagaataaaaataacttcacttgtctggctgttctcagtttttgcatgtagttcatttaattcatgactatttatcttactgtaacagaacctgggtttttaattggcattcccttatataggtttatactgctcaagattgttgcctattactctgcccatggggcagcttttatttaaaaagaatcaaattaaattgcttcataaaattacagcatgcgctcagaaaagttttaaaaaaattctttgtgcctggacttcattttttattaagaactgcatccagcagacttctgtttcaaaagttatggagtggtaccccctagtggaagatgcagagaaactttaattaactagcactgtaagcaccagaggcacaaaagacagaagcgaattctctccactccctgccacggtgtgttggttctttgtcactaacttactgcaaaacagtggtcaaagagagggtgaactcacacctgtaatcccagcactttgggaggccgaggcgggtggatcacctgaggtcgggagttcgagatcagtctgaccaacatggagaaactccgtctctactaaaaatacaaaattagccgggtatggtggcgcatgcctgtaatcccagctactcgggaggctgaggcaggagaatcgcttgaacctgggaggtggaggttgcggtgagccgagatcacgtcattgcactccaacctgggcgacaaaagcgaaactccatctcaaaaaaaaagagggtgaactgtgagcacagttgggtgggttgagttgcagggggcagtataaagtgaaaaatgggactgagatggataacagaaggtcttaaacagcagaggcattaggtatgggatggccagattaaaagacagttggcagggtgcaatggatcacacccataatcccagcactttgggaggccaaggcgggtggatcacctgaggtcaagagttagagaccagcctggccaatatggcgaaaccccgtcactactaaaaatacaaaaattagccaggtgtggtggcatgcacctgtgatcccagctacttggaagttgaggcaggagaatcgcttgaacccgggaagcagaggttgcagtgagctgagatcacaccactgcacttcagcctgagcaacagtgcaagactccgtcttaaaaaaaaaaaaaaaaaaaaaaaaaaaaaagataaaccagcaaggatagggctggacttgaattgtgtgggtagagtttggctgtaggggttgtgcttggtgagttggcaggagagcaacaccagaataggcagaggacaagttaggtgacagaattgagacagaggggaaggaagagctctgtactggaaagaagagagggggttgactcagaagtgaattagggccacgcccggtagctcacgcctgtaatcccagcgctttgagaggccaaggcaggcagatcacttgaggccaggagtttgagaccagcctggccaacatagcgagactccatctctactaaaaatacaaaattacctaggcatggtagtgcacgcctgtaatctcagcctcttgggaagccgaggcatgagaattgctttaacctgggaggtggaggtttcagtgagctgaaattgtgccactgcactccagcctgggcaacagagtgagattccgtctcaaggaaaaaaaaaaaagaaactgaattagactgcccagtgtggccagtgagaggggctttatacccaaggtgaggactggaagagggagggggacaccatgacagtgtctgtggagccagccaatcttttgaggctagaagtcacctcctctgccatcctgtccccagtgtagtgaaactcactggtttggggaagtcttcacctcagcgacctcagactggctttaccctctgcatagtgactatatctgtttgaaactttaggaatttcttacgtatcaggtaaataattaaacatttcaaaaatttcagaaagttatcagattttaaaattgaataaatatatattgctacatcagagcaaagccatatattctaacagccataaactagggagagaggggtgacatcctttaggaaaactcaggtgcccaacaaagacatgcttagatgtctttccctatgtgatatcatcaatgagccaaatacacatactctgtttttttcatttcttcccccagaaccaccggaaaaaaaactaaatacaaattaaattttatttttttgtagaaagagagtctagctctgttgcccaggctggtcttgaactcctgaactcaagcgatcctcctgcctcagcctctcaaagtgctgggattacaggcatgagctgtggtgacaagcctcaataaacatactttcaattccattacctaggtcactgattcaaatgcaaaaataccttggcccagcaccctaggaacctatgtcatgtgtgctgatcaatactgacttgttaatattcaatctggagatcgtatacccatggagtgttgtaggggcccctgactttttctctgaatagtaactctgaattcgtaatggctgtgtttaaatttttagttttctttctgtaggaaaagttctgtgaggatggctgcattgtgtcaacttctaagccaaagtttgggaatcttaatgaaaccaagactgtagatgttaccaggaagttcactcagagcaggctctgatgtgatgataggagctctgggagccactcacctacttcagcttatttcatctagcaattctctttgacttagtcggaaatttctgggatgcaaggaacggaaacttattcaaatcagctttaataaagaggttgttattgttcagagatgagggatgtcacagaaggaagaattgaaggaagcagatctggctgtcacaggagtagaacgtcatcaggcagctcccttctctctgcattgtcttgcctctgcttctctctgcagctcaggcaggccatcttcagcaaggctcttggtttttgcacctccatatcttggcttctatggcttttggttgccacagctttgactctggcaccagtgctgtgtcaccttgcaggtgatacaggcatgagccaccacacccagccccacttttaaaacattactgggtgagcaaattccttaataagaacatctctaaacccaagttaagtgtaaaggaaggggaccagcatgatgagaatctagatccaaagaggaccagttcagggaactaagcatgtataggctgggcataaaaatcttgaggtgaacatagtagccatcttcagcatccttaaaaggcaaggagtgattttattctgtattactccagaaaatgaacctagaatacatgagggtcattaccaaggaaactgccaaggccaggtgcagtggcttacacctgtaatcccagcactttgggaggccaaggcaaaaggattgcttgagtgcaggagtttgagaccagcctgggcaacatggcaaaatcctgtctctataaaaaataccaaaattagttagtcatggtggcatgtgcctgtggtctcagctactcaggaggctgaggtgggaggatcacttgggtccaggaggtggaggctgcagtgagctatgattgtgccactgcactccagcctgggtggcagagtgagaccctgtctcaaaaataaactaagtattgagggtgactttacacaatagaacaacatgcaaaaaatacttcacagcataagagtgaaggcagaaggaatatattttgtaaaatagaatggagctgagtgagaagctggtttgtgaagcacctgccatgaaatcctgtggccttgctggtggtagtctgcagggctgcctcaggtttcctagtggccagagaagggaaaggataagtcattgcatctgtgagagaaaataagccattagctcagaagaactttaaagatttctgcctgagagaataggaaaaatgtgtccaggcacggtggcccatgcctgttatcccagcacttggggaggctgaggcgggcagatcacaaggtcagtagatcgagaccagcctggccaatatggtgaaaccctgtctctactaaaaatacaaaaattagtcgggcgtggttgcgggcacatgtagtcctagctactcggaaggctgaggcaggagaattgcttgaacctgggaggcggaggttgcagtgagccaagatcacaccagtgcactccagcctgggcgacagagagagactccatctcaaaaaaagaaaaaaaaaaaagtaagaataatgttctccttgggattctcccagagatgtgaaactggggaaaaataacatctttaacaacatacttagggtaaatacctcagtgagttcctaggattgtttcttgtaacatctgccagagtgagacaggatggtgctcggtcaaggcacaattcagaggccccatgatccagtctgggtgtgccattctgtgggtctctgccctgatgtctaaggataggttagaggacctagcagtttttccaagatgtcctctgaggggcagcttcccaacatcccattctcctatccttgggcttctaagaaagacagggtttgaacaaggattctgtggtttaaagagtttgaaactgacctaaaagaaatgggtgcattgctgtccttcacataatcctctgcaaatatctctcatttcccaaagttcagtagttaaggagcagcagtgagttacaagattaagtatccttcagttaatagggttgcttaaaaaaaaagagagagattaaacatcctgataagttcctggcacacacagcatccgtgttgccagttaaatacagagccatatgttttaataagccagcaagctagggagggattgacaacttcttattaaaactgaggtacatagcaaggacatatggtagacagaaggccactgcacctcagcttggaggtgggctaagaaaggactgtctgtctgtgctcagattctccttaagaaataatttagtgtttgctccaacaagataatatgccaagtacagcctcagagattttagcctgaacaaaatttaaatttcttataaccaaatgtcagttttatccataaacaaatctcagtaagtcccttatagaacatctagctttttatactgagaagggtatatgtgcataagttttaaaatatatataaattagaaagttgggtttggatttagagcaactggcccttctttgtgataatagctaagatcaattgtctattaatgccctctggttctttttttttttttttttttttttttgagacggagtctcgccctgtcaccaggctggagtgcagtggtgccattttggctcactgcaacctccgcctaccgggttcaagcaattctcctgcctcagccccccaagtagctgggactacaggtgtgtgccaccacgcccagctaatttttgtatttttagtagagacgaggtttcaccatgttggccaggatggtctcgaactcctgacctcaggtgatctgcccgcctcggcctcccaaagtgctgggattacaggcgtgagccaccatgcccagctgccctctggttcttgataatgaaaccatagcattgatgaaccagagaaagcctctgatgaaccagaggaaggtctctatatttcttgtaattggagtaaacactgtatctaatcctcaatggactgttactcttgaccttgaaacgcggtggtattaagtgcaggtttcttataagcttttgtggctgagggtgggagtggggatggggaatcaatactgagcttgcatatctcagcctataactgatttcagtcatctgagtcaaagattatggaaaggtcaataaaaactgcgagcgctcttaggtttttcttatcagattgctccacaaaattgataaagactttaataatgatcagtggtgaaatagctgggcctctagaaccttgtgtagaacattggcccaagagtcccggaactcacattttatcagtcaggaagtggcatgtattttagatgcaccacctagtaaattaggaggagagttaaaaaattacccttgggaaaaatgtggcagatcaaactctgctccaatcaataaggaaaattttctcattaaaaataccaccaaaggccaggcacagtggctcatgcttgtaatcccagcactttaggaggctgagatgagaggatcacttgagcccaggagttcaagaccagcctaggaaaccctgtctctacaaaaaaaaaaaaaaaatttaattagccgtgtatggtagtgcacatatgtggtcctagctactaggaaggctgagatgggaggattgcttgagcccaggaagtcatgactgcagtgagctgtgatcacaccactagactccagcctgggcagtgagaccctgtctcaaaaaaagacaaaacaagctgggtgcagtggctcacacctgtaatcccagcacttttggaggctgaggcgggtggatcacctgaggtcaggagttcaagaccagcctgatggggtgaaaccccatctctactaaaaatacaaaaattagccaggcatagtggtgcgtgcctgtagtcccagctactcaggaggctgaggcaggagaattgcttgaacccgggaggcggaggttgcagtgacccaagattgagctgctgcactccagcctgggcaacagagtgagactccatctccaaaaaaaaaaaaaaaaaaaaagcaccaagctgggtgttgtggcttgcacctataatctcagatactaaggaggccgaggcaggagtatcacttgaggccaggagttcgagacaagcctgggcaacattgtgagatcctcatctctaaaacacaaaaagaaaaataccaccaagaagggattttccctgtctgctcacaaaaccaggtgattattcagcctttatttcaagagttctgtgggaatagtgtatatgcaccagaagccctatgtaataaagtggcacatgactaaagagtgaaagtggaaagtaataacattaataaaacataagctcatcttcattaacctcccaagagggcaacaggagaggtacaggtgggtaccaactgtctgttagggcaaaaccctaaaatgcctgattgactacaactgcatggacagatagaccttccatcttcacagagggcctgtcagctggtgcaaaagaagcacctgcccttttaacctcatctcaaatgaccatggcaagggcaatacgctagagcttagaagcctggtgggctaggcagcaagtgtgacagcaacaaagtacaggcttctgaaggactggtcccaggtcttccagaagcagagaagggacttcccattgtcccctccccttaaggtccacacagcccacctctggctgaccttacattcaagtagatatggaatcttatcgcagcactaaaatgacagcgtttcttctgtccagcttgtacaaacggaatactcaaccagagaccaaatcactcagttctcagaacacctgaagattttttttaaaattgttaaaaatcagagctatttattagaagcaatctgtgggtgataataaatctgcttttagagttttatttagctagattttttattgtgctaaataatagaaggttactgccagcaccatctctgatcagtctgcaaacttagagcggtcagcctctgcttgcaaactgaaaagttagtttcctagacagcacctgtggtctgaacttcagtacttctccaaggaaaatcttaccaggaaaactctgccccagaatctgtctattaacagagctgataaccaagctctttcaaggtaataatatgtttatattgagttttatactttccatgttccgaggtggccattttcattgcatatgtcatcccactaacgtggctacacttatttgtttgttgatgcctgacagttcacgtcagtcaaattgcctgcccctctcaggtggaacgctctccactcccagagatgtgggatttaacagagagacactagttggacattgtttgaagttttatttttatttttatttttttttttgagacagagtctcgctctgtcgcccaggctggagtgcagtggcgcgatctcggctcactgcaagctccacctcctgggttcacgccattctcctgcctcagcctcccgagtagctgggactacaggtgcctgccaccacgcccagctaatttttcctatttttagtagagatggggtttcgccgtgttagccaggatggtctcgatctcctgacctcgtgatctgcccgcctcggcctcccaaagtgttgggattacaggcgtgagcctccatgcctgacgttgaagttttagatttttatttaaattttatgttgatttaggatcataattcccatttattaatattatttatgttctgattctttatatctagtatattaggcttgtgtcacccaagcatgtgatcaatataacccttcattcaagtcacaaataaaaatcttttaactgtgatggtagatttattgatggaatataagatgagaattgaatatattgttgcagacctatttactgtcataataagatatcaataatacactgaagaccgaataaaaagtcattgaatattatgcgttttttattcattgttgttacaaatgtgtttgaacataaacatacaaaaaggcctgcaaggagatgcaccccccgcaaaaaaaatatcagtatatatctcttagtggtcaggctaccagtaattatttgctttctttttaattcctatacctatcttctttttttgttgctgtcaagacacagtcttgctctgttgcccaggctggagtgcagtggtgcgatcttggctcactgcaacctgcacctcccgggttcaagcgattttcatgcctcagcctcccgagtagctgggacatgcaccactactccaggctaattttttatatttttagtagagacaggttttgccatgttggccaggctggtctcgaacttccagcctcaaatgatccacctgcctcgacctcccaaagtgttgtgattacagccatgagccaccacgcctggctcttgtacctatcttctaaaaaataatgtaattgacatgcagttgttttataaacagagaacatgaaaaaggattctgtattttaaaaaaattcaaaagaaaaaatatcaaagagagtcctgtggtctctaaagaacttccaggtctgaaagactggtttcagattgccatgttgcacagaattactggaaaagatttttaaaaacatctcccctgggagagtcaccaggtgatactgatgttgtcagtccctggccagctagaggacacagccatgtaatttagctattgacacatctaactcctctgcctcttactaaatatgggacctcaggttacttgaatttaataaaaaaattttgtttctcctgagcggcaacgtggaatagtaacatgaaggatggtagtgaggcttaaatggggtaatgccgaatccagtgcctggcacaaagtaaagcctagtaagtgatacgttggtctccatagcatctagcccatggttctcaaccttatccataggtgattccataccacacgtcttccttcttctccctttgcagcatattctagaccaagaggaagtaaagaaagcaatggcttagtatggctgttactgttgctgcccatttgtggaaatcattgtttcgaatgctctctgcataaagtgataacccccgataaataacttatattttcacccttttttttttaaaccctttgctggttttcttgtggctttcccattatggtggaaatcccccttagaattcaggtaagcctggaagttcattcaagaaacatttgcagttgtgcctgaagcggtcggctagggattgatatgatcttcattccccaaagaacttgaagccaagtggaaaagacaaatcagtaaaataccagtttccacatcataacatgttagaggaatttttgttgttttgaatatctcacttgctgggagagagtaaaagggtaaactttatttttaaaattcctttttcaaatagagcaggatatttaaaaagcaattcttatgggggagttaccaattttgtatagaatatggttcaaaccacttcagaagggctgagatcaaagagccttaatcttgaagaggtcacagagctatgaggcattgttcttggggtagcaagcttggcagctcctcgggggatcggctaagctgatacacacccctgctcctcccatcccttctccatgtgtgctgtaccacttccacacttatgcccccagagttgggtggcagtgtgagcaatggaaaattcctttgaccccagaactgagctgtgaaggtcatgccacggggtgcatctttccaaaatagaaccaatggatctcagctcagcttcactttctttctctaaagtccaagatacgttcagtagccccataatctcctctgtcttgaagggctgcagggagaatggttagaatagtcattttccatgcagaagactggccatctgctaaacttgtagacatcaagataatatccttttatctatccccctaatcttaccctccctttaaaaaactatcctaaacatattatttcatccaaggtatttctaatgattttgtttctgtgggaatagtgtatacgcatgaggaaccctatgtattatagtttcaggtgattgaagagtgaaagtagaaagttgtaaagtgcatataagttatggtttcaggtttgtcatgaattattttaatttaacatgtgatctgtagttatctatgcaatatgatcatttgtaactcacatgattgtaactcacatgacaatgactaaggcaaagataaaatttttgtaggcaagggcagttaactatgcaattttgaagcttgtaatgtattagattttactattttattattatttcagttctgattccctttcttcttcttttggcttatggtttgtgaccattagatggcactgtgcatctcaaatatggaaagcacttggcattcaaatgctaggctatgcagaagaaagtaacgtgcattagttaatattttcatgctatggtttcaatcagggtagaaacattttatttttcatataaaatttgccaatgttacagtttattaaggagaaatccagaatgtaattccacagtcttatgaaacttaccttgcatacagaaactattcctttctgtgtgacacaagaataatccctctcaaacttagacttgggcctggggctcctgagtcaaatgagagaatacagttccttcacctccacttcagagcattatgctgctgattttctaagaatgttggtgaactcatatttgtctgctgcagtggtctccaacctttttggcactaggaactggtttcatggaaaaccattttttcatggaaggggaggagatgctttcaggatgaaactgttctacctcacataattagatattagattctcataaggaatgtgtgacctagatcccttaaatccgctgttcaggatagggtttgtgctcctgtgagaatgtagtgctgccactgatctgacgggaagtggagttcagggggtaatgctggcttgcccgccactcacctcctgctatgtggctgggttcctaaccggccacaggactgttaactgttcgtggcctgggggttggggacccctggtctagtgtgttctgtcatttgtaggtccttatcaccagaagcatttgcttacaaataggacgcaaattcatttacaaattacaaatcatctgaggtgctagtcttaactctagaaaagaataaaattaattggctttcaatcccaggagctagcttttttactctcatctttaatcagctaatggaagatgatgttactgacatttcatccccagactttgtcccctacatagcacagcccttgatacaccaacaatctctttgttccccttaatctccagccttctctcctactgtacaaccccttcactccagagctctgcctgaggccttgtgtcctctccttctacaactcccctgagcagtctcacctgtgcccaggactccagttccttgatggtgttaacgtttcccagtctgtatcttcagtccatgcagccacttcttccacttggatgtcttcaggcacttctaaacttaactcatccaaaatagtgctcactatgcccaacttcaaacttagtgttccctctctcagggaatgccgccgtcatcagtgacatgccccatgcagagatctgagtcaggatcaaccttctcttgctctcatccctcaacttacccagggatgaggggaagagccaggatttggaaccaggaagtgcagctccacatcacgatccctaatctacaacatgatagagaaaacaaataagatacatattcatttacaaattacaaattatctgaggtgctagccttaactctagaaatgtgaaacagattttcattattttaattgaggatactagtatctatttaataaaactttgtcatgtggccctgtttcagtacgtagatatctgagagtaagagggtagtttttttgtttttgtttttgtttttaccaaaactctttttttcctgctttttactgttaccagcggtgaatccctctgggtctgcagcaacctcaattcttgcctcctcagaagaaagaatttgaccaaggggcataaagcagaaagatagtgcaaggcaagttttagaggaggagtgaaagtttattaaaaagctttatagcaagaatgaaaggaagtacacttggaagaaggccaagtgggcgacctgagagatcacgtgcatggttttaccttttgacttggggttttatatgttggcatgcttctggggtctggtgtcacttctcccttgattcttcccttgggttgggctgagataaaagcactatcttatgttcaaagatcacataatgtagggtaaaggagaataacttcatttacaccatgagaacacagtgtataggtgccgtaagggacatgtgtactggtggacatgggtacagggagggagaatttaaatcctcatggtggttccagaaagattacactgaagaagggtctgcatgtgcaatggccagccagtgcctgggaggggctgcatgctcagtgtgtttattggagttgtatgcatgctcacctgaggcgttcttaccttaccagtcaaaagttcctagaaggtcatatataccagttaaagtctgccatgttgcctcctaatgcacatgcttgagcccactcgcccaactcctgagatcttatcgggaagctgcggatcacaactttcaggttttttctactgggagactgccttcccctggggccacctgtgaccaattattattttagagaaacagtgtaacaaccacctgaccatcacttgatgttggcctgacattcctggtggggcaggaggagccctcttctgccctgctcatacctgattagctatctactgtaatagtaccacagcatccttgtctcaaaaccttgcagtaaacttgcaaccttttgcctttcaggttttcaactctactttcatctcccatgagacctttttttgagacaagcaaagcctctcagttcagcttatatatttttgaatacaccctcccaacctaaaatcaaactagagctctgcaattagaacatagctacagaagttaacaaactgtattgttatttgatataagaaaatgtgatcataaacctatgcattattataaaacctattttaaaataaacatttcaaaggacaaataacatttttcatcagtttgaatactgtctcaccttttgggaagtaattccattgcaaagatcctttccccatatgtaagtttttctttctcttataatccaaagcctgtgagtgtatgtccaaagtctcatttctctacttcactttatctcataatatagttttcctttctcttttctatttttcatttaatattgaactggagcatttttgagcatttcattcagtatctgctatctaatctttttgttttgttgtgtgttttctttctcgggttttggaatacttctgtaggatatgttttcttagataacatgtaacaggaagggaatcaaattcaaaggaaaaaatgtttaaatcatcttctcaagaccaatagtatattctgactgaaagaatctccatatgactatcattcaagcacttgatgaaacagaatttattgagcacctgctaagcctggcaatatgacaggcactgggaaaatgagataaaagcacagtcttatgttcaaagatcacaatgtggggtagaggagaataactatatttagaccatcagaacacagtatacaggtgctgtaagggagatgtatactgggagacaagggaacagagggagaatttaaatcgtcattgatataggagttaaagagaaatatttaggcagatagtgagggtaaggaagtccttggtaaggttttccttttaatgaaaagtagcccccaaatccttccttttctaacaaaagcaggctgaaaaatcgagctgcagactgataagcaagctgcaagcttgcacgggtgaatggctggcagctgtgacaataggaaaaggctacctgggggctaggcatgttcagcatggcagttccatcttcccttttgtcaaccttgtgaatggtaaagaacagaaaacgtggcactggcaaggtagaaaatccatttgcagaataaaagattagggtggggtggtcagcttcttctcctgttatgtaaacatcacacctggtccaaccgatctttgggccctatgtaaatcagacaccacctcctcaagccagtctataaaacctgtgtacttcaccatgggaccggaagacccactcaggcgccccgctctctctgcaggagagagattctcttttctctttctttcgcctattaaacttctgctcttaaatccacttctcgtgtgtccatgtcctcgatttcctggctgagagaaggaacctcaggtatttaccccagacaatgactctacttcatcatggtggttccagaaaaattacactgaagaaggttcacaagctaaatctggaaggatgaatcagtacagtcattattatcatcactgaaataaatatgattgggtttgaactttggaacttttattcagaaggaaaataaacatttttcaaataaagttgtaggatatgttttgcattttagcatatatcgtacctaagatatctcaggggacttttttacttcaattatatttaagatttaaaatgtcagaatgtttcacattttgtgtttatgtcatagtttttggcatgcaacttatatgctcaaggtaacgtgtgcatacagtgaaatgtacacatctgttcaggcactgaggctcatgcctataatcccaaaactttgggaggctaaggcaggaggattgcttgagctcaggaattggagaccagcctggtcaacatggtgagaccttctctctacaaaaaatacaaaattagctgggtgtggtagtgtgtgcctgtagtcccagctactcaggaggctgaggtgggaggatcactggagtctgggagttcaaggctgcagtgagctgtgattgcaccattgcattccagccttggtgacagaatgagatcctgtctgaaaaagaagtacatatcttaaaggcaaaattttatggatttaccaaatgatacacccttgtaactaccacaaaaagtttatgatatagaatttttttcatcattcccaagagttctctcatgttctctttcagttgacattctacataggcaaccactgacctagtttctatcactacagagttttccctgttctatttctttaacagagacagggctattcagattttctgtttcttcttgtgtcagatttttacatgttgtatttttcaagaaatgtgtccaatttatctaagttgttgaatttattggcataatgttatgcacaatatttccttattattctattaataactatgtgatctgtggcataaaatgtaagcaaatacttaccataaatcctgccttaagcaaattataggctgtgaagcatatagcattcttgcctttcccagaggggtccacttcagttgttttacacagtccttctgaagcaggacttacatgcctttctttatggcatataagccctgggtccgggttgggggaaagtgtggggatccaccatctcatctcatggctgccctagacatggcttctgttcctaagttcctattaaaggtttctttctgagaaaacggatttgtcagcctctttcttcaacatctcagctaccttaattttggggggtaggtttgcatagacctgctgtctatggaacatccacaaattttgatttttaaaattattattcaggctaaaatatcttttaaatttactgtgatttcttctttaactcagttatttagaactatgttgtgggacttccaaatatttgggagttttaagatatcttattgttattgatttctaatttcattctgttatgtttagagagcatattctgtatttttcaatcctttgaaatttattaagccacattttatatttcagcacgagatctatcttggtaactagtccatgtgcacttgaaaatcgttgtttattctgcagatactaggtgaagtattctctatttatcaattaggttaagttggttgatagtgttcaaatcatttatattcacatatctatgtctagttctacaaagtacatgtaggtgaattaaaaatgttcaactgtgattacagatttgtatatttgttccttcaattttttttttttttttttgagacagggtctcactctgtcatccaggctggagtgcagtggcatgatctgatcacagctcattgcagccttgacctcctgagttcaaacaatcctcctgccccagcctctcgagtagctacagatgctacagctacagatgtctatcaccatgcccacctaattttaaaatttttttgtagagacaggatctcactatgttgcccaggctagtctcgaactcctgggcttgagcattcctcccaccttggcctcccaaagttctgggattataggcatgagccactgtgctgggcctgttcctttaattttcatatcttgcttcttatacttgaagctttttagtcacataaacatttatattttttatgtcttcatgatgaaatgaccatttttcattaaggaatgtcactcttcaactttgataattctttttgacttgaagtttgttttgtataataatagtatatcaataccaggtttcttagatttgcttggtctatgttttcccttccttttactttcaacctatctggatctttaaaatgcattgcatctcatgccaaagctcttacttgaatcttgctttttattcatccttgcaatctttttcttttctttggactgtttagttcatttatatttaatataattattgatttggtaggatttaagtctatcaccttgctatttgttttctgcttgtctcattttttgtttgtttctcatttcctccttcatggctttattttggtttatacaatattcttagtattctaattcatttattgattttaaagttatatgtctgtatttttttttttttatggttgctatagggcagcattctccaactaaatgttctttagtagtgaaaatgttctatgtctttccaatatggtagacactggctacctgtgactgttgataccttgaaatatggctagtacaactgaagactgaaatttaaattttatttatttttaattaatttaagtttaaatttagtcacttgtggctactgactaccatagtagtcagcacaaccttaacagtctgtttagagttaatattatactacttcatgtgaaatgtaagaatcttacaatagtacaattttgttaactctgtcctttttttctttctccaaaagcattgcttaaaataaacacacacacacacacacaaacaaaaccctctgtccttttttgttattgctgtcatgtattttacttctacatgaattgagagtcctacaatatatttgtctttaaatagtctgttttaaaaaaatgagaagaaaaaagttctttatatttacacgtctacttaccatttctggtgctatttattactttctgtagtttagatttccctgtgctatcattttccatcaccaccgcccccaattcttctattagtatttaatatagtttacaatgaatcctcccagcatttgtttatcagaaaatgtcttttttgttttcatttttgagaaaatgttagaattctggccaggtgtggtggctcacacttgtaatcccagcactttggaaggctaaggcaggaggattgcttgaacccaggagttcaagaacagtttgggcaacgtagctgagaccccatctctaaaaaaaaaaaaaattagttggacatagtggcatacactcgtagtcctagctaattgggaggctgaggtgagaggatcacttgagcttaggaggttgaggctgcagtgagctgtgactgcatcacttcactccagtctaggcgactgagccaaacaaggtcttaaaaaaaaaaaaaagctgggttgctctattctttcagtactttaatggcatcattccatttcttttggcctccactgtttctagtaagaagtcaactgtgattcatagcattgttccccttatgtcattgacttttttttctgtttcaacatttattctatatttttggtttttaaccttttgactacagtgtagctggtgtgttttctttctttattttattttttgtatttattctgcttggagtttgttgattcttcaatctgtaggctgatgtttttcaccaaattagagaatttttttaaaaatttcactctaccccattttctttttcctttcttttactgagactctaattattattatcttttactttagagatagggtctcactctgtccagcacgggctggagcacagtggtacaatcagagctcactgcagcctttacttcaaggcttaagtgatcctcccacctcagcctcccaagtagctaggactatagacatgtgccaccatgcccagcttttttttttttttggtagagatgggggtctcactgtgttgctcaggctggtcttgaactcctgcctcagcctcccaaagtgttgggattacaggtatgagccaccatgcttagccttaggactccaattatatatatactaactttgcagggttgttccagagttcactgaggctgtttatatattttttccaatcttttcctttctgttattaaattatataatttctattgctctctgttagagataattcacccatccttttgccatctccaaactgctctaaccatcgaataaattttacatttcagatatttgctttttatttctaatatatccatttggtttatttctttgctgatcattctcatctgtttaatcacatattcatcttttcccatgcatccttacatatatttataatagctgttttaaagacctcatctgctaattccaacatttgggtcatcttggattctgcttctattgaccatgtcttattttgattatgagtcacatatttctgcttctttacaggtacaatattttttaacctcctgttgaatattgttataaaggagttacagagagtctggattatgttatcttcttttaaatggtgttgaggtttattctatcaggctattaaactactaaaaaatcctcttgatcttgctaggctttgttttgttatgtattattattatttattctatgtcagttttatccttagtcctgagacatggccctttgtctgggacatggtatttactcctaaggtctatcctctttagaatttcaattgaatggatgaggtgcttagtaaggtctctccatttaggctgggacagtattccagtgtttgcagtactgcacagtctatgatatcttggcccagttctcttgttcatagcaaccattctctgctaggcctcattaagtcctatcctgcacatgggctacacaggaatgcttgtgaaatcttctttgtcctcttcttctgcatactcctttctttgtggtattctgtcttacaaatttcagggatgacaactactctaaacttttatctagatttcttcagctcagcaagacttccatacttccttggattccacttccttttagtctacttggtgtccccagacagaaagctgaagaggacgtgcagatcacattgtgtttcctttctctcaagtatcactgccctgcaatgtttgttgtcaaatgtctagaatcagttatcttgtgtatttctagttgtttctagtgggaggatgtgtctggcattagctactatctatggccataagtgaatgtcctctgatgtatgttttggtatattgtctacaacttaataacgtacgaaaacacacaatcacatttttcctttttaaatttaaagatctgtctttcattactgtattaggccactactcttcatgattatagatattcttaatgtaacttcaataaccattagtttgttgaagttcctttaaatgactgtaattaacatttctaaattataattattaataattaatgtgaaatatacatctgtacgactcattgcagcttttaccaaacactgaaaagacatttttaaagagtttaacacaagatttgggtatagaacaaagtatattctaatatgcttctatttttttaaagtgagataaaataaaatttcaagacaataaaatcatctatacaaaccttgttcactggtacaagatttaacttgtaattttcttaacaacaacagggccgggtgcagtggcttgtgcctgtaatcccagcactttgggaagctgaggcaggaaaatcgcttgaggctaggagttcaaaaccagcctggaaagcatagcaagactctggtctccactataaaaacaataacaacagtaaataactttttttcctactggttataatttcactggcacatcaaagaaaattccagaaacaaacttgtcacagacattgtatttctaagaaaggtgatatatacatcatcaacaacagcataatttatatgttttactttattgtttaacaaaccatatcaaagcaatctaaacaataatgctgtttaaatcaatcaatcagataaggcctattgatccagtaatttacttgagataggacccgctctgggagcctctagccttacattctgaagacccagagaatgtgtaataaaaaacatgcagatactcagctctgattctggctcctcatctgtaaaataaaggtttggtctagagttctctagcatatcttcaaatggacccatttttcctgtgttcgtctggcccatcttattacaatgctgtttttttgttttttatcataaaacattcattctatacatttattttcatctcaaagtaatgatggccatatttctgtgtgattataacaatcttcaaataactataaatgggaacaaaaataaacatgcagctaaatgccaggtaattttattttattatttttgagtgagacagggtctcgctctgtcacgcaggctggaatgcagcagtgcaatcagggcttactgtgaccttgaagtcctgagcccaagcaatcctcccacctcagccttctgaacagtcagaaccacaggcacacatcagcacacctggctaatttttaatttttttttgtagagatggggatctcactatgttgcccaggcttgtcttgaactcctggcttcaagttatcctcctgccttggtctcccagagtgttgggattacaggcatgagccactgtgtctggccccaggtaatttgaaaacttaaaatgtgtaacaattattctataaatataatgcattgagtctctgattgctattacataaatggaccaaaactaagaaacatagcttgtgcatttacgtggaaatatagatgctagaatgatatcactgcctgccaccagttatctaaaacggagtccaagtttttaaagtcatttcctaactaatgttaacaagcacaggtgtttcctgatttcagttgttcggactcttaaaatgagtaactcagggaaatgtgtaaaattcctttgttgacttcctttctcctgtatcaagcccaagtttcatcttagtactcagtgtggtttttatattatcacacccattgtacccatgagcttatcatctgcctttatttttgttatactcaccagagcacttgtgtctttcttgctacttgtgttatttttcaagtgttcctccacatatatgtgtgtgtatgttatatattattttttatttattttttgagacagagtctcgctccattgcccaggcttgagtgcagtggtacaaacacggttcactgcagcctcaaactgctgggctcaagtgatcctcccacctcagcctcccgaggagctaggactacaggcatttgccaccacactgggcctagttttaaattttttgtagagacagagtctcactatgttgcccagactggtcttgaattcctggcctcaagcaatcctccagcgtcagcctcccacaatgctgggattacaggcataagacatcacgtccagcctcctgcatatttagaatctcagtttaagtgattatatttggactaaaagaatatgtcaaaaattctacctctgagcggggcaccatgtctcatgcctataatcctagcactttgggaggccaaggtgggaggatcacttaatatctggagttcaagaccagctgggcaacataccgagaccccgcctctacagaaaaatacaaaattagctgggtgtggtggcacaagcctgtagtttcagctattcaggaagtgaggtgggaggatcacttgagcctgggaggtcgaggctgcagtgagccgtgattgtgccggtgcactccaacctagctgacaggagtgagaccctgtctcaaaaaaaaaattacctctgatttgaaggttctctgcaaatggcagggttgagccccctgcatagtcatggatctgtggcaggggccaaaggatgaggtgaataggaggggatctgtggcaggcaggaaggataaagcaaatggaagggaaagtgagcagcaggatgaggcagagctgataacattaatacaatgctgcagggctttgcaatgcgctttaaattcagtttctcatttaattctgtgcaattatatgatttgtccaaggccatctagcaattttgggaggatgcaaaccaaagtctttgaaagctattgtctcctatgcctagggttcttaaacttgagagaagaaaaatcacccaaatttgtcaaatattgtcaaatcccaatatttggatcatctaactccccatgccaccccaaaaggtcatgaatggaagatctgaattaccttgctattacctactggcttctagaactaaaattatgttgactactttattagtccatactgctataaagaactgcccgagactgggaaatttatgaagaaaagatgtttaattgactcgcagttccatatgtctgaggaggcctcaggaaacttacaatcatggcagaaggggaagcaggcacatcttacatggtggcaggcaagagagagtgcaaaagggaaagaaccccttataaaaccatcagatctcatgagaactcactcactatcacaagaatagcatggagggaaccgccccccctccgtgatccaatcacttctctccctcaacaaaacacatggggattacaattcgagatgagattcgggtggggcacagagccaaaccatatcattccatccctggcccctcccaaatctcatatcttttcacatttcaaaaccaatcatgccttcccaacagtcctccaaagtcttaactcatttcagcattaactcaaaagtccacagtccaaagtttcatttgagacaaggcaagtcccttccgcctataaacctgtaaaataaaaaacaagttaattccttccaagatacaatgggggtacaggcattcggtaagtacacccattccaaataggaaaaattggccaaaacaaagtggctacaagccccatgcaagtccaaaatcccgcggggcagtcattaaatcttaaagctccaaaatggtctcctttgactccatgtctcacagccagggcacactgatacaaagagtgggctcccatggccttgggcagctccacccctgtgggtcttcaaggtacagctcccttcctggctgctttcgaggtgttggtgttgagtgcctgtggcttttccaggcacctgatgcaagctgtaggtagatctaccattctggggtctggaggatggtagcccttttctcacagctccactaggcagtgacccaatggggactctgtgtgggggctccaaccccacatttgcctttgcagtgccctagcagaggttctccataagggctctgccctagcagcaaacttctgcctggacatccaggcatttccatacatcttctgaaatctaggtagaggttctccaacctcaattattgacttctgtgcacctgcaggcccaacgccaagtggaagctgccaaggcttggggcttgcaccttctgaagcaacagcctgagctgtatgttggccccttttagccacagctggagctgaagcagcagtgcatgggatgcagggtgccatgttccaaggctgcacagagcagaagggccctgggcctggcccatgaaaccaagttttcctcctaggcctccagatctgtggtgggaggggctgctgccaagatctctgtgacatgccctggagacattttccccattgtcttggcaattaacatttggctccttgttacttatgcaaatttctgtggccagcttgaatttccccccagaaaatgggtttttcttttctattgcatcatcaggctgcaaatttttcaaacttttatgctctgcttcccttttaaacataaattccaatttcagatcgtctctctcaacttcagaggcaaaatgccatctgtctcttggcaaaaggatagctccagtgttcaataagttcctcatctccatctgagaccacctcagcctgggcttcattgtccatatcactaccagcattttggctccaaccattcaacaagtctctaggaaactccaaactatcccatatcttcctgttttcttctgagccgtccaaactgttccaacgtctgcgtgttacccagttccaaagtcacttccacattttcaggtatctacagcagtgccccactcttggtaccaatttactgtattagtctgttttcacactgctacaaagaactgcctgacactgggtaatttataaagaaaagaggtttaattgactcacaattccacatggctggggagacctcaggaaacttatttcggttggtgcaaagtaattgtagtttttgtaaatgtaattgtgtttacctttaatggcaaaaactgcaattacttttgcaccaatctaatacaattatggtggaagaggaagcaagcaagttcatcctacatggcagcaggtgagagagtgtgcaaaggagaaagagccccttataaaataatcagatctcacaagaactcactcactatcatgagaacaatgtgagagaaactgcccctatgatccagggtggttgacatgtggggattagaggtcccttgacatgtggggattacaggtccctccctcgacatgtagggattataattcaagatgagatttgagtggggacacagagtcaagccatatcaactacatagtgggattttattaaattagtactgaaaagaagcagtaccttaatttacctactttacttgtccagcattttgaataaacatttgctaaatttctgtgttcaaaacaaatgattcttgtgcttcagcttcctaagcagctgggattacaggcatgtgccaccatgcctggctcatttttgtatttttaatagagatggagtttcgccatgttggccaggctggccaacatattttacaccaaatagggtcatgatgaattacagtttgatagcctgcttttttcactaacaatatattgagaaagtctacaatggctactctagtaaatagctatggctacatcctggtaaaatagtcaatttaaagtgaagctctccatattggtccattttcatactgctatgaagaaatacccgagaatgggtaattttttttaaaaagaggtttaatggaatctcagttccacatggctggggaggcctctcaatcatggcagaaggtgaaggaggagcaaaggcacgtcttacattatagcaggcaagagagtgtgtacagtggaactgccctttataaaaccatcagatctcatgagattattcaccatcacaagaacagcatgggaaaaccttcccccatgattcgattacctcccactggctccctccacaacatgtggggattatgggagctacaattcaagacgcgatctgggtggcacacagccaaaccatatcactctccccccgcctcccacagctatgaaaaacataactaagaaggcctgagtgacctccttaacattaagatcatttgaattgataataaacattttgtgtattaaattttatcactataaaaactattcagttcaaaggctaaaagagtgtgtagaggttttcataagtgacctaaaggcaattccaaaggattttgaaaaatccaagtatgatgcccaaggacaagaatgaaattactgactggatggtcactgagtataccagagaatgccatcaagacctagagaaaacccagtaaagggtaaagagaatgatgctattaccgcaaaatagtcattttcctttcacaggtttcttacacaagccatacagtttaataatttggttatgacttgtagttaataactacttggcttgttaatggacaagaaccaaatgagaaaagttaatggaacaacctgaccattagctatattaataatagctttagagaaaatgattactattttaaaccatattcacatgcttctatcactaatccttttttaaaatgtcaaaaatattaagttctgcattcagaattaaagaattttaaaccattttattttgagacagggtcttgctctgttgcccaggctggaatacagtagtgtaatcatggtcggtgatcagcctcaacctcctagactcaaccactctgtattagtctgttctcatgctgttgataaagacatacccgagactgggcaatttacaaaaaaaagaaggtttaattggactcatagttccatgtggctggggggtgcctcacaatcatggtggaaggcaaggagaagcaagtcacatcttacatggatggcagcaggtgaagagagcttgtgtagggaaactcccccttatataaacgtcagatcccatgagacccactcactgtcatgagaacagcatgggaaagacctgttcccatgattcagccacctcccactgggtccctcctacaacacgtgggaattcaagatgagatttgggtggggacacagccaaaccacatcacgatccttctgttttagcctcctgagtagctgggaccataggcatgtgccaccacgcccagctaatttttaaaatttcttatagagacaggttctcgccatttgcccaggcttacattattttagtttgaaaagatatttttgcctcatttggtgacatgctagttttacgtgttagaagtggatacaaagaaatgtttgcagtgactaaatgcagttagatttggctcccctaaataatttatctcttcttttttattgtgtatgaagtctttttttgtgtatgaagttttttttattgtgtatgaatctacaaaactataattgggctgtcataaatctgtttcttaatagaatggcagcaaggttttccagggttcacactattgctagaaaggcacttagataatataaaggatttcaaaggaaaatattctaatatggatagattcaagtaggtgagatgtcaaaaaataaattagccatagaagagatttgtatttgttttgtttacatacataaaatatttaacctcactcgattttcctgttagaaaacagtggcagaaatgttttatgaagtcgttgctcttgatcaccaggctgtctgggcagttgtcagtacaaagtgttactaacttgattgctttttatgggaggattatttttatttgtgcttttctgttctgatctcaatccctggaatctgtcttacttaagtggacttttgaggcaaatagtcatcgaaggctcttcttttggggaaacctgaggaagggcgagaagctctccctgtctcctggatctgcttgccctcttaggacccttcccctttgggtttccttccctttattctctctctcatcatgagctgtgcatccactgacaccctaacagactggccgtcaggaccctttggctagctgaagtcctcactctctgatctcagccccccatgccaccccgccctgactttgtctctgtttcttcctccaagtcattgaagatctttcctttatccatcatgaagtctggaaacttcccaatgatatttctagttgtgggtcgttctttactcgttctgcccaatatgctgcatcattttcaatatgagaccagtgtttttctttcattctgagaaatattactatatctttgaaatatcttacattttctgttctttttgtcccatgaggaggacagtatggccccacttatttagatgtatctttgcatactcagaaatggatatagacaggcacttctaggacccctgccctgcaaaccactctctcctgcttgctgagagtctcagtcttcccctttgtactcagtgtgtagtagcggtagttttcaatcctactatccgttagaatcatgctgggatggagcttaggcatttatttttccaaaaattcgtcaaatctcagctctaccatgtattagctatgtgatccaattcacttaacgcttcaactctcggtttccttatttgtgaaatagagataataacatttcatttggttgtcatgaggatcaaatgaataatgtttgtcaagtgctttgttggctggtggatgctcaggaaattataatacagaagccaaggtaacagctgaagtgtaccatgtgcctggcaaggtatcaaatgccttatgttaattattttatcttcagagtcctttaaaataagtacatttatttgtacaatgctctgaaaattgttttaatttacccgtgttgcattgttttctttatccttttgtatacatattttttgtacttcttagcatatttatatttcttactctagttttcaaatgttatttactggattttttttttttttgagacggagtcgctctgtcacccaggctggagtgcaatggcgtgatcttggctcactgcagctcttgcctcctgggttccagctactttcctgcctcagcctcctgggtagctgggattacagggacataccaccacgcccagctaatttttgaatttttagtagagatggggtttcatcatgttggtcaggctggtctcgaactcctgacctcaggtgatccacctgcctcggcctcccaaactgctgggattacaggtgtgagccactgcgcccagcctatttactgtttttttctatgttgtttatcatatataattttagtaattacataatattccattaagttgctattctataatatactcagccattccaatatggctgaactggttctttaggcatagaactcattttactttgaaacttctgatgtacactgtcaaactgcccctcaaagcctgtgccattttatagtaacacggggtcacatttgacctggctgtgttattctctaaattctctaattctattaaatggaatgggagttgtgtgaaatgttccttaagaaattagaaaaatgacagtgattcaatcaagcaaccaatcaatttaaaaagcattttgataatgtactaggaattatatacagagaagtctaaagttatagtgtgactaagacaagaaacagtaatagtgatcatggaataaaaccctctagtctataaaaggacctataatacagatatatctatattgcaatagttgctatattgtatcacatacaatccattagtgatcagcgtgggatgtgtagagaaagggaaccccttgctcccctgctttcagggtcagggccagctctggataaaagttgttacataggagaagttggtattggcagacaattccttcttacggagaccttgtactgtgtgctgctccctacctgaccttatgtcacataacataggctggagacaattagagttttcctggagattaattttgagatgctgatagcaaagatcctcattctgctggggctgttaagctgggaatgtaggaagttggggctgttgatgaccatcttccctggctgtatttagggagccagttgcaggaagagaaaatgaggaacagggagaggggagcaaaaccaacaggtgatgagagggggaaggaaggagacaaaaagtgcttgagccagatggtgagagggtagcttgacaattaccacggtagcctgtattttgcctgtagccttttggggtttaaatacttcacgtcaaacgtgtgacttcaatcaggcaattttgggcggcaggctgagagccacaacataggtgtttctttttaactaaggcccatgcttttgccatgtcttgggtgtcattccctcctgcagtctcagaacgctatgatctctctcctcggtgttgcttacccattctaaacaagcccttcttctagtgattccatcttcttcctcagctctcactctccttcccatcccagccaaacttcttgaaagggtgcctacattcactctctcacacacttttcacctcaacctaccctaacaggcttccactcacaactccctactgaaactgttgaaagattactaaggacctgtccatgccaactccacatgccattctttttaaatttatttttatattttgtagagacagggtctcactttgttgcccaggctggtcttgaactcctgggctcaagtgatcctcttgcctcagcctcccaaagtgctgggactacaggcgtgagccatggtgccaagcccatgtggcgttctttagtccttgcctactacatctcttgacatcatttgacctagcagacaattcctccctgcttgaaaactttttggttggtttccataatacctggacaccacatcttcctggctactgcttttctcttacctccctggctactgcttgtcatcccacttgcctgcttctcctccacctataaatgttggagttgctggagggctctgtcctgggtccttctctcaagttgcattctcttcctatcttcccataaagagtctgatccactattctagcttcaattactatctgtataccaatggctcccaaatttgtctttagctaagagactgcccctccgagtgtcacaaccacatagccaattccccacttcagatttctgcttaaatgtatcaagatatatcaaacttgataagttttgaattgagctcttcatcctcccctcccacccccaactctttatccctgccccaatctcctcttgccatgtttctttctttttttgagacaggatctcactctgtcacccaggctggagtgcagtagcatgatcataggtcactacagtctcaacctcccaggctcaagtgatcctcctgcctcagcatccgagtagctgagactacaggaacctgccaccacgcctggctaatttttatatttttttgtagaaacgagtcctcactttgttgcccaggctgctctctaggctcaagtgatcctcctaccttggcttcccctgtgaacacaggcacgtgccctggctagttttaaaaagtttttttttttttttttttgtagagatgagagtctccctatgtcgcgcagggtggtctcaaactcctgggcttaagccatccccccaccttgtcctcccaaagtgctgggattacaggcatgagccaccacaccttgtctcatgccgtttcttaactccctaatagctccctagtccacacagttggctcaagccagattctgcaagtcatccttgataccgtcctcttcctcattcccttcaatctgtcatcaagacttgtcagttctacttctgaaacacttcttgaattcatctatttatcttcatctccatcactaccacctgagtcctggccaccatcttctcacctctggactttggcaacagcttcataaactggtctccccacactcgtgctgcttcttccaatccacccccgagagagatattttattttactaaaaaaataaaatgggactacaggcacatgccaccacatccagctaatttttttagtttttattttttgtagagacagtcttgccatgttgccaaggctggtcttgaactcctgggctcaagcagtactcctgcctcagcctcccaaagtgttgggtttataggtgtgagccaccttgcctgtccccagagaggtattttaaaacacaaatcctcatcttaccctggctctgcttaacagccttcagaggcgtccagtggcccatagataatgtccaaggctttcctgtgatctaccagtctggtcagtgtgaccacctttgcaagctcatttcagccactctcccctcaccttcctcagctccagccacgccttcctcagctccagccacgtagggtgcttttggttcccaaacaggccaacccatctgtctcctcaggagctctcaatgagctgatctctctgctatttgctttttcaaggaacccttccctgaccacccatccagttataatacatcaccccttggcaccgtgggcttttccttcactgcaccctcttctattagttgtttttcctccttgtgggactgtaagccccaggagggcaggcaccatggctgtctgacccactgctctgtcaccattgccaatcctgataggtactgatagggtgaagatggagtgtctggtatcgtcatatcccagtcccaggacagctgtgtggccacctaccatttggggactgttttctttttaaaatttaaaaaaaaatttaaagtctacaccccatgattctgtatggggactgttttcttttagccccaaagtccaacaggagcaaatcctttagtggctcttaaagctagagttcagctgtttggaggaaagggtgacagagctgacccacagggtagatgcgacatcttcccctggagcactaaggccaaacaggagccccctggacgtttgggagcaggctttacaagccctgcctaaagctaagatgtcattagagtgatgcgttgcatccctgccttgttctctaaggaagctttggtgttttcaagacaggccctttcccccctggcccattgtccttacttgttttcattctgtatagtgctgttattacgggtcaggcctccttgcactcatgtgaaatcgttgagaacctactcaattagaaagttctgaacagggccttagaggagtgggggctagaaagatgaacctggggccaggcacgggggctcatgcctgtaatcttaacactttaggaggcaggggctggaagatcacttgaacctgggagctggaggttatggtaagccatgatcacaccgctgtattccagcctggatgacaaagcaaaacccagtctctaaaacataaaagaaagaaaggagggaaggaagaaagaaaggaatgaaagcaagccgaatctgctccgagggaaccagtatagcaagacagaatgtaatcaagtatcttaagagtggcctaggcttggctgggtgctgtggctcacgcctgtaatctcagcactttgggaggccgaggcaggcgaatcacttgaggtcgggagtttgagaccagcctgaccaacatggagaaaccctgtctctactaaaaatacaaaattagccgggcgtggtggcgcatgcctgtaattccagctactcgggaggctggggcaggtgaatcgctcgaacctgggaggcggaggttgcggtgagccgagatggcgccattgcactccagcctgggcaacaaaagcgaaactccgtctcaaaaacaacaacaacaacaacaacaaaaagtggcctaggctttttggggaacaaattggttgtggctggccctcagggagcaagctttgcggcatagcagcgtaggctaaaaggtcctccccggagacaaaatctgcagggaccacggggtgggaagcatcagaaggctgcccactctgactgcaaatacaacaagctggagtgttcctagaagaggcaatttcttccgcgtgtgtgttggggacagcctgtgtgtgtgaacattttctgcccttgccgcgcagagctgggtggaccagaaaccacccgcagaggaagagacttattacctcttggccatgtctgtctccagaagaaccgacctttcctgctctatgtgcaacaagacacaccttccgaggaaggaggcgaacaggatttccatcattactactgccctattaaaacacacacatacacacaactgtgtaattagcctctgcaggaaaggcgcacaaacaggatgcgttcgagctgaccccgggatgagccatccctgtaaatattaggaaaaagaacctccccgccgtgcccccgcctccggccagggcctcttggggatggccctgcagggtcaccagcccaccggggaggttgggagagagggggcgggcgactcctcgccgcgcgggttcctggctggagcgccctcctctgcgtcctcccaaccttccatcgctccccaggtcagtctaccacgcctcaggtgtttgctcgggctgggccacgaaccctttcctttttggcctgcgcccggggtggcccctaacccgcagcgcacggccagacccagcgctacaaggagggcgcgcagggcggcgcaagcgggcactggcctcccgggggcttgcgcggggatccacccaccgcagggccgggccgcggaccgcgggccacgcccctggggtccggaaggcgcgggagcggacgcgggggttctgtgaacttggaacctggcggtgcgaggttctcgccggggatgcggcggcggcagctgcttcctggtttgaagctcgccgagtgggggagagcgtgagccttcggaggcgggggcaggaggagaagcaagaggaggcgggggaagagacgcttggggctggggctcaccggacgggtaggtccggctctccagggagaggagctgcccggccctggagaaggggcgagtcctgcgcgagtccccgggaggcgccgcgcgcttggaagggacggtcgggcttccccggcccgctgagggctcggcggcgggctcccctcctttccacctcgggagggagggaaggaggggagggaaaagtcccacggaggaggcagaatggccagtcgaggggcgcttaggcgctgcctttccccagggctgcctcgactcctgcacctgtcccgagggctggcctgagacgggactcccggttctcccgctgcgaagcagcgcggccccccggggccggggcagcggcgccggcatgtcgtctggcaccatgaagttcaatggctatttgagggtccgcatcggtgaggcagtggggctgcagcccacccgctggtccctgcgccactcgctcttcaagaagggccaccagctgctggacccctatctgacggtgagcgtggaccaggtgcgcgtgggccagaccagcaccaagcagaagaccaacaaacccacgtacaacgaggagttttgcgctaacgtcaccgacggcggccacctcgagttggccgtcttccacgagacgcccctgggctacgaccacttcgtggccaactgcaccctgcagttccaggagctgctgcgcacgaccggcgcctcggacaccttcgagggttgggtgagtagcggtgaccccttccctttgtgtccacccaacccccgttccccttatgtttttcaaaactcacccgggtcccgctttcccatcgctttgtggctgagggaattccctccagactttggtcttcgtccacgtggccgcggcactggtgacgcgaccgcggtgggtgtgtgcaggcgcaggtgtgtctccaggaagccggcctggacacgatcccctttcaggacagcggcttggcctaacgggaagtcgggcaggggtccagggcggtcaccctttccgcccagtctttgggtaaggagctccaactttcagcacgagagtgataggtaggaaaggcagggaaggagtgatacaaaagggacttgatttgggtaaagtgcttcaagcgctacttaggagaaagccgtacattctcgcgagtattattcataatgtttatggatacatgttggttcagccgctcagacgtgcacacgtgtttcggcttgcacatcccagaggtacatgagctacactggcagggaaatgagcgcctgggtctgcacgttggcagttttattatttagcatttttccaaggagatgagatttacatatacttgcaagtaacttagtcagtccgaggtgggagtcctgcagtgtgggtttctgctgctatgggtctgagaagaggctgtaaggactcctcaggaggttgttaactgtcttccctccccccatcaccagcctgtgttcctgggtattgacgtgtagctacccgcagctctccccttgcctctgcttttcacatagttcccaggaggcataatttctgctgtaaatcaattaaaacttctagagcgctctacacggtgctaacatgcttttactgcctaatcctcacactgtctttgtgatgcaggtgtcatcgttcccactttgagatgatggaatgataattataataaagtagtctggtttggcaaagtggagtacgccatttgaagactctcaggagtttaatagtttaagttctggagggagtcagttttgaacccaatatcagtattgaaaatgtttgaaatttacaagtggtgaaatcagatggatggtgatgaaggctcatttaggtatttattttatactttgtggaattagtaattttaccgtatattttctaaaattaaagatggcttgtggagctattcctttcttttaaatagaagtacaaaaaccataatgactaaccttaatcgtcaaattatattgagttaatttcccttcagcctaatttactttgtggtacttagaagtggggactagagaggaattgctaaaatacagttagatatttacatttatcctgtgaatttctggaaatgaaatagaagtgagtgtaggcatccagatggaattgttgagttctattagtgtctgattaggagttaggtcgggcaaagctctagaggaactaggttctgaattatggtggtgcagattggccagtggccatgagaagcatctcttcctggagatagcctagactcgtccttctcaaccataatcttcccacttgaatcacccagggacctttaaaaaatccccacttttaaagattctagataggaatctctggctgtgggaccccatcatccgtacttttaggctcaccaggtgattccagtatgcagtcgaggtggagaacctgcagcctacatgaagaccaaaagatgaggacttcttggtgtcataagtgtaggaagatccacgttatctgactaggtggcatgtacagagctgcttattgttccactggatgaatattcagtgtaaatcagatatcgatatttataatggtctgaaataattacacttagatgtttaatataacccactggtggtgttttggaaaacgttgagtggttggtagggagggtcagcatttaaatgaccttgaaaccagcagtttttcatgcgtttgcatgcatcagaaggcagattttttttttgttgttttttttaaaaaggttttgggtatttcagaactgtaaggatatggaacataggttgggcagagtgttgtttcttttctttttaaagaaaatcttgttaaaaaaatttggaaatatatggaatgcatgcttttttaaaaaagtatcctttataggttcaaaaatgctttaaaaaaatagagatggggtcttgctaccttgttgaccaggctggtcttgaacttgtggcctcaagccatcctcccacttcaacctcccaaagtgctgggattacaggtgtgagccactgcatctggcccaaaggtgcttttgaagttcaggattaaagaaatacttatttatctttagtattttaaattgacatgtagtttattcagagagttaaatgtggaataattgaatttactccataataaatttatggttgcaagtggaactacagattactgacttaaaaaaaaactattgaagttgcaggttcaaaaaacccccaaaacctagtgacttagtttttgctagatccagagaagctcttagctgtaggttatggatgagaggattcaatatggttaagatctcaattcttcccaaagtattcaataggttcagtataatctcagtcaaaatctaagtttgttgtagaaattgacagactgactttaaaatttatatggaaatgtaaagtactgagaccagtctaagaatagttttgaaaaagaacaagttgggggacttagagtatctgatttcaaggctaactgtaacatgaccgtaatcaagataatgtgatattggaataaagagagtcatacagatcagtggaatgaatagaagagagtctaggaatagatccacacatatatgacccactgatttctgataaagctgccaagaaggcaactcagtgggggaaatgatagtcttttcaactaatggtgcttgaacaactggatagccacatacagtaatatgagccttgacacttacctcacatcctacaaagacattaattcaaaatggattatagacctaaatgtaagagtttaactgtgaaacttctataagaaaacaaaattgtagtgaccttgggttcagcaaaaaatttttagatagcgtacaaaaggcaccaactataaaaaaatcagtaagttggactttatcaaaatgaaaaactattgcttcccagagaatgtttaagaaaataaaaacccaagccacaaatgggggaaaataactgcaatacgtaaatgaaagatgtgtaacatgaatatataaaagaactctaacagcacaataataatgagaaaaatacctaatttaaaatccaacaaatgacttgtaacttgtcaaatatttcaataggcactcaccttcatgccaaatagcacattaaaagatgctcaaaatcatgagtcattaaggaaatgcaaattaaaaccaaaatgagatctcagtatgttcccactagaaaggttaaaattaataagactgaccataccaagtgttggtgaggaagtggagcacctggaactctcatatgctatggtgaggaatgtaaaatggtaaatcatgttggaaaatagtttggcagtttcttaaactatcaaacatatgcctactatataacttactgtttagtatttactaaaagaaatgaaatcattcatacaaaagcttgtccacgagtgttcatagcatctttatttgtaataacccccaaagtggaaacaactcaaatgtcaacagatgaatgtttaaacaattgtggtttatccatacaatggaatattactcagcaataaaaaagatgaactattacacatgtaacaacaggaatgaatctcagaataattatgctgagtgaaagaaactagacaaaaaagtacggtttcatttatgcaaaattctagaaatgaaaaggagtctatagtgacaggaagcagatcagtgggtgcctaaaaatggagagtggaggtaagggaggtggattacaaaggaggcagaaacttttaggggagatgaatatttgtgttattctgattgtggcaatgatttcacagttatatacatatgtcaaagcttattaaatagttcactttaagtatgtgcatgttactatatgacaattatacctgaataaagctgtggggaaaaaaaccaatcagcgcttatccatattttactgaaggtgttaagtaagatgctagtaaatgacagaatttcagctgagccaagtctgactcttgaaaactacatttcctctttagtgcagaaaatatttatgagaatgggagcgtagaaaaaatgaaatcacaataaaacaaattagtttctgatttttggacatggtctcattttctaaattatcactgtcagttttttttctgctgcttctagaacatgtttattttgcataatttctctggcttccaaaatctgaagaattgcctctgtttaaactctattttcttctttcgtgtacttgctcttgatttgctgaccttctaaatggggaccagcatctaatgcttaatgcagagtgctggggacatggggaggcaggaggagctggaggctgcgtcatggaaagaccttggcgccccctcaggaaggaaggactggcttggcaggatcccaggctgttttcctggttcagccctcccgaagacattgtgttctctgcagccctggagggcctctttctctcaatttctcagtgaggtacctgttttgtaatcagtcctgtcaggtgaagcagccatgttactactggacaatcatggattatcttttcccttccttcctggatccaggtgtctgaatttataccaccaaaattcttccagattttctatctagtggttcattctcttttgtactttgtagtgccgttgtttattctcatgattgatttttttctgagccaattggaaggaatgtctaacactgactgatcaacccacagtgtttaagaggaaaaatatattttagaatcttgagggagttttatttcagtgtatgtgaattgtattggctatgtagcgtcttcattttcattgtaagaagaattttgctacagtgggaccggctgcttctcatcacaaacaggttgtggctcagatattttcccctttggagagcattttcctggtcatattattatcttgttgtctttcgttgcactcattgctctctgagatcattttgttaatgaatttgcttattatactttcctcctttagattacaaatggcttgagagcagggacccacctctcttattcactgtcctaaccctgggacaatgtctcatatgtagtaaacattaaatatttgttaaatgaaattttatgtgattgggggacaagtaaagtgtaagtactttgggagcatctttccatctttctaaaagaaagaaatgaaaatagttgaggagttactggatgaacagtattcctctgttaaatcaatcaatgacataccaatatgtgcttgaaagactgggcctgggccgggcgcggtggctcacgcctgtaatcccagcactttgggaggccgaggcgggtggatcatgaggtcaggagatcgagaccatcctggctaacaaggtgaaaccccgtctctactaaaaatacaaaaaattagccgggcgcggtggcgggcgcctgtagtcccagctactcgggaggctgaggcaggagaatggcgtgaacccgggaagcggagcttgcagtgagccgagattgcgccactgcggtccgcagtccggcctgggcaacagagcgagactccgtctcaaaaaaaaaaaaaaaaaaaaaaaaagaaagactgggcctgactgctatattctttgaatatggtaatggattgaaaaccttgtgtatggaaaattccctgctcttacgtcattttaaaagactatgattttaaaacttgtaatacgttataacgtttttcacttataattttcacgcccaaaatgttaaagtcagggcagaagcaagacatcagcatttaaaaggttgtgcctcagccttggagaggaatgaggttggtgggtggaacgtgaatcattttatcttatgcaactcttagtgaagttttggtatctagtaagtgttaagaatggtgattagtggtgatggtaaaagtgtggtgcatttttatgagaagagtagcatttgcgtagaataatagaggtgcctgggatttttggtagtccttttttatttaataaagcaactggggccgcgtgctatggcttgcgtctgtaatcccagcactttgggaggccaaggcaataggatcccttgggcccaggagtttgagaccagcctaagtaaaatagtgagaccccatctccacaaaaaaataaaattagccaggcatggtagcacatgcctctagtcccagctacttgggaagctgaggtgggaggatcacttgagcctgggaggttgaggctgcagtgagccatgatcatgtcactgtactctagcttaaatgacagagcaaaaccctgtctcaaaaaaaaaaaaaagctgaaaaaacagtcaactagattgtgttccccttttgtgttgacttcttagctccactttattagaatgtgataaaaatgagacctaagtggaaacaatccctgtccattgttttccactcttatcattactgtatccaaaatagtctttctcaattgccaaaccaatagtcatttctttatttaaaactcctcctctgtggttctccactgctcttagataaactcctgagtcttttttttttttttttttttgagacagaatctctctctgttgcccaggctggagtacagtggcacgatctcggctcacttcaacctccgcctcccaggttcaagcgattctcctgcctcagcctctcagtagctgggattacaggcacacaccaccacgcctggctaatttttatatttttggtagagacagggttttgccatgttggccaggctggtctcaaactcctgacttcaggtgatccgcccgccttagcctcccaaagtgctgggatgcaggcatgagtcactgcacccagccaaagtccagagtctttaaaatggtataggatgttctccatgatctgtaccctgtgttcctcttgagccttttctcttacatttccccaaattacaatgagcatctttcagttcctcaaaaggaggaacacttcgctttgctaattcttccttgtgcttcaggtctcattatgggcattaattacccagacaactgtccctgatgtgccagtctgggtttggtcctcctcctagtgttccctcagtatcctgagatctcttttgccgctgtctcctccaacctgaaagaacggacgtatgaatggattggcctctaatggaagcgtgtgacactggtcacagggagttcagggtgtagttgtttgaatgattgactaagattcatccgcttggctcttgtagtagtgactctgacagactattacatgtttctatttgaaatgccaagccctaggtgagcatccagccaccaatgagcatgtactaagtaccaggcattgtgctctatcctgtaaagtcaagtggacaggacacacatgacccattctttcgtagggcttgtaattccaagggggagggagattgggataaaaagcaaacaaaagcaactagggaattacagaagtacttacaggcaggtaagcccctggtttggggaggtggggaacatcttcctggaggaaaaacaaagagctgacttttaaggacccagcctagagagccacagcctgcttcagttaaatgactgtgaacagtctttgctcaaaagaagaaaaggaacttctgacctgataatgtttcccagagggacatcgcagatgcccttttgaaaggtaaatgttcctgacccacagaaatgtttccatctttggaaagtttgggagggaactgtttccatgcttgtgaacagatgacctgcaaaagaacttttgactccacaaaggcagaaagtaggaacactatatttgaaccatcaaataccttaagttttgtatagatcataaaataatcatagatgttgaagcaggatgatcatctaattcagaacaacaacaaaaagcctgatagctcttaggcctgcagacagcctgtaggtctattcatttggcacagatgtttttaacattgaaactgaaggcatttagtgctgtggtgctccagtttgccacagacccctccactccctgttatgaaaccaactctcttgactcattacttgcttggacctgggacattttaaattttgtgacactatagctcaagcctttgttttctgaatgtgggaaccaaagttccagccaaatcattactgttgccctaacaggggtgtccaatcttttggcttccctgggccacgttggaagaagaattgttttgggtcacacataaaatacgctaacactaacgatagctgatgagctcaaaaaaaatcctcaaaaaaatctcataatgttttaagaaagtttacgaatctgtgttgggctgcattcaaagctgtcctgagctgcatgcagcctatgggctgtgggttgaacaagcttgccctaactcatgagaagtgtaatatacatacatttaatatgtattaatatctatctaatctatatctacaaaaatacagatatacttacttagatttatttagatatgtaataatttattaatttataaaatgcattagtttagatatatatttacttagatttttacttacataaagatttgtgtcctagtatttcagagaaagctagcttactagtaaatatatggggagttaacttttactgcaaattagtattatattaactatccaatttaaaaagaaagcaaactctgccaggctggtatggtggtgtgcacctgtagtcccgtgtactggggaggctgaggcaggaggattgcttgagcctaggagttcaaggctgcagtgagagctatgatcgagctgctgctcctcagcctgggcaacagagtgagactttgtctcaaaaaaagaaacaacaacaacaacaaaaaaacccctctttttatttcgttatacaactcccagcaataggggaacactgtactttaatgggtgtcaggagaactgggttcaagctgtgaccttaggcaagcgtctgcttatctgggtcccatttccccgttatattgtgagggggctgcactaaacggtctccaaagacttttatatctctaaagcctctgcttccatgtgttaggcaatcacataatttcttcccttttggagtaattggtttggtttaaactgtcaaaatgaattatgtgttatcaaagttagtaactcctaagaattaaattggtccaaatctaaattgcttagagttggagaggatttagctcccatctaagtgacttgtatagcatcgctagtgatgttggtattattttcttggtttagaatcagccttaaggcaatacatttcaagccatgcagttgtatttcttgatttatgctaacgcactccttgttctatgggatggttgtaagttatgtccctgttacggcaagtcagagagagactgagaatcccactgttttgctagaagccattctcactagtttggcaattacagcattattgtcccaaagtatctgtagctaccagtctatgtatccacccagggtgatgacaaatactacaaatcactgtaggacagacattttaattagagggaggaatgagcccaagggtattgactatggtagtgtttaagtgctgtgttaaagaattttatgagacaggaaatttttgttgagaatcatggtcctatctggagatatttatcaagattattatgttagtgtgcttctgtagcaccagtaaattagagcagtatctgtcaaagcacataggacttttgtagtagaaagcccacttaataggaagcttaccagcagtgcttttattatgtactgccttcccaaaagttcctttgattgcgtataagttttacccttgcacgcctttgacctcacagggagataaatgcttaaaagttaccaaagatgtttagtttgtgcttgtggtaaaaaattaagaaatttgccagagcataaaaccatggtcaacatgatccctgtcataattgcattaataagtcatataggccagagtgagcatattctatacctcgtcctgtatttccaatttcagacctagcctctgttctccatgcacttagacaaaaaccgcaaagctgcatatttattcgtaagtcacatctgtcccttgtactagcatagctctgtctctccacctctcgtgtcgcaagcccttaaatatgatacactctttccttacaatggactttggtttttgcgtctgtgatgttggagggctgggccccttgagctctgtggtccttccggtgtcagagttttgtggttctggtaatggttccgttggacaatggaaattctgctcccttctgaaatatattcaggagacttctgatactcagatttgttctgggctctgaaattattttgggaagcgcacccaaaagtcatacgtgtattagcctaattccataaacagaatacatttatttatttgcaagctgtgggcctcttagatgctttaatatagattactgttgtttaattatggtacagaagagttgagagcagattccatctaaatcagtgcttttgaaactgttgtcgagccctagacccttttagagatgatgagagctatggagctgtttctggaaaaatgcacatatgtgcatattgatgatattctgggaacaatgtcatctgattagtagccctcctaaagcctttcctaaaccttaaggacacaggacctcaggttgagaaacctcagttgaaagggttcaaaaataaggcttttattaattcctaacattcagggtgtggttccagtgttttcctttgtatttgaggacattttcacttcaattaattatagaaaatagttacttagtagaaaacaggagctaggagctataaattttagagaaaaagatgttcttaaaaatgtgttctcacttatggcttctggtgaaatatactagatgatgacccattttaggacctatttggttgtgttatttaggtgttttcaaaagcctctatttttttaaagagtttgtttgaggtttgcagtagatgaaaacttaaaaaaacaaaactaggacagtttgagtgaccctggcttggtatcttttgttaatataaacttttcccttgtaaaaagaaataggattcatctttttcatacgctttttcttaaaacattcaccctctttttgagctgcagtgggcattatggtgttctgctgtgttagtctaagacaaaatgatgagattggtgaggcctgcctgatcctcttaccctttgagccccagtctcccatggtctgggtccccgtgacccagcagattttttggtcctctctggaattccagttcactcagtcagcatcttacagacaacccgatgttggtggaaactgagctgaatggagactgtccacagagcagccccctagctaaaggtaaagtgagaatccagctctctagacttcaggccaagattctttcccgactccacctcagtgtgtggtggaggcagcagggtagccatccagtcagtcattcataggtgtttattaagtatctaccttgtgcctgagcctgttctaggtgttacaggtagggcagagaacgcaagacccagcatctcggctctccagcactgccgccctagcacagggaggtggataacaagcaggcaaacgcacgatgaagaaaatgacaaatgctgggtaggtaccaagtagagaatcaaagcagggtgacttgattcagtgtgacaaggtggctgctttatctggagtggtcactgtctgcgaaggacaggtaaagcactgtgcagcagacttgctgcacagagcgggtgacaattcagctgaggcctgactgacaagaagcacacagccctgtgaagattagagaaagagcattccaagcagaggcaacaaaggccctaccgtgagaacaagcttggcaggtggaaaaacagtggagggtggcagaaagagagtcggcttggtgtcagaaagctcggggcattgtcccagatctgttgcttcctaggagtgtgaacgatgagcaagtccctccatctctgatgattagttttttcttttggaaaatggtgctaatgtttgctaccttataggcttggtgtgaagattagatgaactacattaaacatgcccagcacaagataggcactggagaaatgctagctttgggtgctttttaaattaattaattaatttatttaatttttttagatatgggctcgccatgttacccaggctggtcttgaactcctgggctcaggttatcttgcttcagcctcccaaaatgctgggattataggcaagagccgccactcctagcctggttgctttttttattttaatctttaacaaaattatttatttatttattttttgtaatcttggcaggcaaagctttggttgcttttaatttcctgaggaaatgaatatttttgacaagggccttctgaaaagaatcgtactggctgaggatagacacccacagggttgcctcttagaaaagagggtggtggtatgaaagtttcttaggggtggggtagggtatagtcttgttggcgccctcaaatgacatcatagaagcatctagttatctctacccccttcagtaacatgttttctaaagagaggatggggaaaggaaacaaagactctgaagtttattccgtatttttcagtttctgaaaagtgtatttgttttctatggactcataaatattaatggaaagtttcaataatttagatggacaggataattgcattgtagtggtataactgatagggccccaacttgtttttatttgttacaaaactatacatttatggctgagaattaataaacatactaacagtaatcataaaggaaataaaacctcagccattgtaaaaaataaaaataaaaaaaaccacaacccccccatctgccaaaactagatataattgattcttgcttaattctgaaagctcatttactttttggattataattttgtgaactaactctggataattttgcctattttgaatagttttagataatgcctattttggcatctccctgaatatttctgaccatcccttcaacatttatttggtctgtttaaagaagacacattaacatttgcctaagtcacatgaattaggatgcagaatctataattatggactaatgatacacaaatacaggctttgaggagtatttattggacaactaccataattatcagtgcatcatagtgtgatggttgggtgtcagccagattggggttcagctattcattctgcctctcattagcagggataatttaacccctgcaagcctgttctctcatccacaacacagtacctgcctcacagggttacttcagaacacagtgaggacttatgtaaaccatctacacagggcatgacatatactaccgcagaaaaatgattgttgatgtcactttcattaccaccactctaccctcagcacttcaatatgaagtgatgggcccagcccttttctgaagttaactttgaaagcagtaagatatttatttacatagaattcaagagaagggatttttgagtacaacttcctcactggttttgcttttaatgtaggattctggaatgtaaatcagtaggagatttctagttactggtggaagagaagatggcttccttatcccggaatcacagggattgggggtaaattctgtacataggtcctctctggaagttcttgtaaggaatatgggaaaatgaagctggaattattatagttacaatgttggctaaagttggttcatggaaaccttgaaattaagtttgttggtttgcttattcaatattggacagcagagggtctgagttagtgagaaccaacaaaccagaaataaatcaagttgcaatatttagctgcaaaggacagaaagaggcctttgaaaagctgaagtgagtacttttattgctgtaattaagggaaataatggtaaacaggctctttcaattggcattaaaatatattttccttggttagtttgaatatccaatacaagttggtggatgtgaattgttctgtcatgctttcaaggaggaaaactctagttttaaaagtacgtcattagggccaggtgtggtggctcatgcctgtaattccagcactatggggggctgaggtgggcagattgcttgaggtctggagttcgagaccaacctagccagcatggtgaaactctgtctctactaaaaatacaaaaattagctgggcttggtggtacgcacctgtaattccagctacttgggaggctgaggcatgagaattgcttgaacccaggaggcgaggtggaggttgcagtgagtcgagattgtggactccagcctgggttacgaagtgacagtctgtctcaaaaaaaaaaaaaaaaaaaaaaaagtacatcgtttgaatatggatttatagatgtattcaaggacaccaacaatttttttttttttttttttttgagacagggtctcactgtgtcccccaggctggaatgtagtggtgtgaacatgactcactgcagtctcaacctcctgggctcaagtgatcctcctgcctcagtcttctgagtaactgggaccataggcgtgcgccaccaagctcagctaattttttaatgtagagacagggtcttgccatgttgcttaggctgaacatttgatttggcttgcagaaaatatgaagtactttttttcctatgtggactcaattaaacaaaaaattttattttacagagataggatcttactctgttgcccagtctggagtgcagtggtacatacaatcttaactcactgtaaccttgacctcctgggctcaactgatcctcttgcctcagccacctgagtagctgggactacagtcgtgcaccaccgtggttggctaattagaaaaccttttttcttatagaggtagggtctcactatgttgcccaggctgctctctaattcctgacttcgagtgatgccacccttcatggcctcccaaagtgctgggattacaggcatgagccaccatgccccacctggggactcatttgaaggtgatcatttctacttttatttgtttactggacacttgttctgggacctagatctttcacagttgattttaagtgaaaggtttctgaactgtatatatacaatatttcagaacagtaatttcctttgcttcatagtacggcacaacagtgtttgcacttgatgtttagcgtagccttggttttggttgttcagaagcctttgttagctctttggttgtgccaagaatatattgtttttgagtctccttgccgggcctcctcgccttcttgtcatgcacatcctgtacctgggttgtggttgtattgatttgctggggcgctgctgttgcaaatgtctggagtgaatgagaatgtgtttgtgggtgtctgccctcaccttggccactgatctgctttcagccctgaagtactgccatctgcatgaacattagggacccccagcctcccccaccacttagtaaagtaccctgcacatgtttgggattcaggaaatgtttgtagaaaggaaaaattccttatcattccttaccattctctgtcttgagtctgagtcatgattcaaacacttttgctaaaaggttttcgcttgaaaaattcatattcaggtacagatttacttttttttggtgtgtgtgagtttaagagctgcctcaggagtagtttagagagaatgaatataccagtatggtttttattcccttgattacttaaataagtattaaaggtgtgtgaaaagattagctgaatcctaggttcctcaaacaaaatgttaacttttgtttgggtggtaagagatggatttcaaaatgggaaaaagcgagactgaaaccatcatccagcacacactatgtcaggaatgtattaatgacagcctgcgcttgataagaacaggacaccaacagggggcataaacaagatctaggtacaactgtgaccttgaagtgaccttgagtttaagttgccatttaaactcattttccttaaactgtccttttctggcaaaataagtgactcctgaagttgcctcattagaactccaatatgcatttttctctctgaactgtttctgatgggtgttgactccttctgttgtcatttggtcctataggaccaaacttgtatatgtagaattttattttaaaataggaaaaatcatgattctgaaaaattgtgcctgtcaagatattaaatgactgttcccattaatattattgccattaatattttgaagtcaaattacatagtgacagctctctgcctgaatgatacttacgttaaaaggaagaaactgtctgagagaattggaagagatgataatgaggcctccccaccactttcccttttaagcccctcacctatcacctactcctccatcccctagacttaagtaggttcccttacttttcttctgcttgggccattgtttagaaaggtctgagtcttgggatgagctggcctcctgttcaggcttagccctccacctgctctgcctgggtcccctctgtgttctccctgggccaggccttcccttctgtgttttcatcctctcctgtcctcctgacaccttcatttaattgtaactttttttttttttttccgagacggagtctcactctgtcgcccaggctggagcgcagtggcgcaatctcagctcactgcaagctttgcctcccgggttcacgccattctcctgcctcagcctcccgagtagctgggactacaggcgcccaccaccacgcccggctaattttttgtatttttagtagagacggggtttcaccttgttagccaggatggtctcgatctcctgacctcatgatccacctgcctcggcctcccaaagtgctgggattacaggcgtgagccaccaagcccggccttttttttttttttttttttttttataattaaagttaaggttgcagtgagctgagattgcaccactgtactgcactccagcctgggtctcactctgtcatccaggccagagtgcagtggcgcaatctcagctcactgctaccttaactcctaggctcaagccatcctcttaccccagcctcctgagcagctgggattacaggcatgcgccaccatgcccccagctaattttttaatttttcatagagacagaaaggtcctctaggttgcccaggctggtctccaagtgcggggctcaagcgatcctcttgacttggcctcccaaagtgctgggattataggagtgagccactgtgcctggcgaaaccttcattttaaaaacatacccaaatctttctgagcactcagcctttcagtcctctgttggccttgcccactatccttttgaggtggggcacagtgttttcctttcccttctcagcctcttccctgacagctgtctgcagatgcccttccctgccctgttcatttttcttcccggtgcccatccccaggagactgcgctggcgaagcccaggagtgacagtgtagtcaggtcagttcttctttgtcttgttggctgctaccttcttcagattcattgctcccctgtttctgtgtttttccaatgcttactgatgtgtttttaagtttctttttgtatctttcctcatccctcaacctagtaaatattggtgttccccaggtgggagggggcggggtggggggcgggggtgggtgggaggtggtttgtctttaccttcttttctttgtcatggcgcatggtctcgtcaacttttaagtctcaacaatattgcccatatgccaaggacttccaaagctctgtctcttgtcttcccccctgagcccaactattgcttctggaactggggcaggcttaggacaaaccactttatactccgtctcctttaatcctcacagtagactgtgagagaggaggagtgctgtggcacctgcatttctcacccgaggaaactgtggcttagacaggcccgatatcaggtccagggtcccatgtctgatatgcttgctggacagacctgcttggacatcctttaggcatctccaagtcaacatgtccacaattaaatatcccatctttccccttgacctgctcctcctcccattttcccggtcagaactggtcttgccgttgttcagtcacctggccaccattctagacttttctttctcctttacctctttccccacctcagttgattgccaagtcatgccagattggcttggtaaatactttctgactcaatttcttcttttccccacaattaccacactcgtttgtatcatacatatggattattgtgatggccttggaactggtttccatgaatctagttgtattccctcaaatccatcctccataaactgcctggatgagctgtctaaaactcagccctaacctccctcctgccagaagtcgtttaaaggcttcctgtgccctataaagttcaggctcctggggagggttcccaatcggctggccctgccttccccattccatcttccacctctccttgccttccagtttatgagctaagtactaatggacagactaggttttcttgcctctgctcatgtctaattcaccttatttacaataaatgttggaggaggaaggaagatactcctttgtaatttgtacagaaggacttgtataacattagaaaagatagggttgaataagttacatagaaaaaatatgtcactctccatgtaactacaaagacatccataaacaggcctgagcatgccacatgcacatgtcagcacagttcacagcattcactgagcacctgctgtggccagagaccacagtagatgctgggggtgaaaagctcaaggagctctccctgtagtgagggaggcagcagaaacccacagtttcatcatagggtagttgagtttaggaataggaatgggtacgggatagtaggggattgtgagcctgagtattcagggaggacttcttggaggaggtgatgcacaagttctgtcttcagggaaagtcagtagtaaccaggtcgaaggtagtgtaaattccttttctcctttttcctctttgggatttgtatttttcccatggaattttacctgtacaggtcattttacactggactaacaatgcttaagtgctttttaaaagcaaactgtgccagatttatcccattggtaggaactttcttcatgagttcagaggctttgtcttggttcccgttgtattgccagtgcatggcccctggtaggtgctgagtaaatgttggttgaattggatgccttgaggtgaggcatgagaaagggttctcctcctccccctgaaggtggtgaagatagttgtgacagttgagacttgcatggggctgaccttgtgaggtcctaagcctggtgaccagcctctgcagtgtaactgggctgtctcatgggaagggcagagcctttcctacgtggccaactctgtgttctgaacaggagtgccaaactcatttggaggggaagggagcgcccttttaaagcctcaactactaattaaattcaagcagaagatggtgaaggtggagctaactcatttattagcatataatatgatcaacctaactcatataaatgtagattatcttggtttgtcttttcctggctgcagaaaaggcttggagaggtgccttggattgtgagttagtcagtgagcagctgcttaaagatttgaaaaatcctagaatatgtcatctctgtaggctttatcctttaattaattatggatttttatctgcatatatgtgaagctaatgattgacttggttcggacactgaattgtcggcttaaacctgccattccactgggcttcatcactatgttctatgggtgtgaagcctttgttttttcagagacccatttccaccagcgggtttgcactgtaagtgtttccacaggaactctgccctttgccagtgtcactgttgtggctatgcagcagaacccacagggcggaggtgtttcagccctcactgaaaatgcaacagatcttaacatctcttgctgcaaattttccagtgtgttctggtctaccttggtatcttaaaaccaggctcactgactaccacatgagaaatgacagtggggtgtcttaaatgatctgttgaagaccagcagccaaaaagattgcccttagtgtttctctctaccggctaacattagacaatgccatgtagaagctgctgttagggtttgagaactgtgtcgcctcattctcaagatagccaaggaagtgtcatctctggagaaggcagttctgtctctttcagtttctccatggatccgatattgttctgaaagaggtggttttaccaattcgtctcacacagacttcttgcctttacttttatctgactgctgacagggtgggctggaatataatcgctacttaactggacttgactttcaaggcctgattggcgtttccagtatagcagttgcctgagtcatctagttttggaactgataaatcaaaggactggcttggaggctagtgtcctgtctggagaatgggcttaatgtaacttcagttaagaaattaatgaatctgaaatagttataacccaaggaagagattttcctaaagaatgtccctttagagaaataatgaccagttccctcaaaaaaaaaaaaaaaaaaaaaaaaggaaaaacagacactagactggatagaaaagacttacatgttgaggctgatgatttctcttatggaactataaaaggactggactctaaggaaatgagggtcttcaacttcattggtgatatttccagttgttctggagctgtgatagaaccaggactagagaatgcagggcacgatgatagatttttttttatgtagcacttttaaacataaaaaatatatatctaatgtgccaatgcaagacctggcctttttgtaatcaagtaatattttgagtaataattgattgcacaacatcctgtgacacactgtgaaagagtaaaattggcttaaaaattttaagtacaaagacatttcagaagagttttgtccataactttgttagactgaaatgaggaattacatttggcaccaggaaatggatctggattatttagaacaaatgttttccaggtttgaatcttctatgtggaagtacagcctgacttctttgccttttccctggtccgggatcctgacagtcagttcttcagctctgtgcctccagaatttcatgtttatgctgcacaaggcctgtattttataatggtggctcttttggacgatgacttcctcgatggtgaaacttccagtaatctccctcatcatactgaaatgatatcagtatatcatcagaacaccatggagcttgtcatttgagggacacagcttgcttgtgtgcttgggaaagaagaggtttagcatggtttcaggtcagtgatgagtccaatgatctctgcaagttcccttagctctgagaattctgatgtcatatgcacttctgccgccagagttgctgcttactggatgcgtaagaagaaaggaaaataaatgtaaaatgcctggcaccactgaggaagtagggtgaggagttaagttagacagtgactggcatttcccagccacactagtacagaagtgtcctgtggtacgaacggaggcaggctggggggttccattgtgtgccaggtgtttccatgaaaataaactgttgagtgccaggtatggcagctgcaaacagggatttggggggcaaaatttaatctttttttgtgatttgttgaatgaagtgcctaatgtgtctcagtaacttacttgagaggaaaagagccacaagcaaggtagtggagagtgctggatggttgccttgtgaccagacctgttcttttaaggcctctggagccagctgtgggacgatcaatccagcagctgcaggtacgcctcgggtgacacttgggtctgtagtcagcggggttgcctgtgactgagagtggcagagtggtcccttgcactgatgaatcctgaccctgctgatctttgcttgggtgatggctgtttgtgtgctatttctagaagttcctcccgcctgcctatgtgacctgttttcaccagatccagattgctagccccttaaagcttgaagaaccttaaaggtcatctggaacaaaagatttatttatttttagcccggtggccaccctgaaccccccagttgattgattgaggctagtcttgagcgtgccctgcttcacatgctagttttccagtttctactttgggagaatgaccttatcattaggctggccaagagggcttctttctgttcctgtcacagtactaggctgtatactcattcaccctcagttcccttttctggtatatttcttaacaaattatttccctctttccactatttttaggggtaacaagtctaagatatttacatataaatggctctcccttctcaaacccttttctagcaagcactttctgggaggacagtgtcttaccaggatcttctgtcactgtggtccctttgagggtagaaagaatagattgttgtgaagtcttttgtcagcctcttcatggttataaacgtacttagttttccagactatgtaggttttagacttcaagtgaaaagagtatacgttgttatgcagcaatagaaaacaaaacaactaccacaaaattgtattttttctccatccagaggctttaactttcaacatttgtatatggaggcaaggctgacagccacagcagtaatttcatgatggctgaaatagctgtgaactgtgcattaacttgttccttctctcttaaattctgctgcagtgttggagcagggaaggcgagcagaggagtgatgaatagagtagcaagtgggataatatacaataataggagatacacaataaggattaattaggtgtcaggctaagtatttcatgtgcattaactaatttaatcctcagaataccttcaagatattcagattctcttattatcctcctctttgggaggcaactgaggctcagagaggttaagatacttgccccaaataagtggtgaaggctgggcacggtggcccagcactttgggaggccaaggcaggaggattgcttgagcccaggagtttgagaccagcctggacaacatagcaagaccctgtctctctttttttttttttaaagttgtggagctagagtttgagcacctgcatggaaccactaagctgcattacacctgcctcaggtggttgatatgaagaaaagtaaaaatttttcagatggactctgggtatttgccttttaaggctatatgccttttaattctgatgtaaagtggtagagaaatgattaaaggtttaagagttgatagggccctgggtagcagggacactttacatgtgttgtgtgtgcatctgcagcagatgacagctccccaaatggacatgcctcccttgttcaagaaagcttgtcagggtggcaccaatttttttttagcaatttaatgaatgaggtatcaaatgatcacataatacaaatttgattgatctccttttggatatatctccccttaaacattgtgctggctacactatccatttctataatacctttgattttatcctctttactcctaacagtgaattcctaggtaaagtcacaactgaatttatcagcacaagcatgctgcatcatgttgtacgttctgcaaacagtaacttgagatagtgtgtcatttcccagttcttaaggctgtggcctacaccaatggtcttattttcccttttgattttttcaaaattaactgttattttgccaataagtttaacatttcattggagcaattattacgtgtctggggttatgcaacacatgggatgtgcagaaataaaaagatagtttccctgccctcaaggagcttgtcttataggggaaacagatacataaacacttctagggcacacagattttcatgtatgtgtgtactatggtgttaatgcagaattctgtaaaggaataaagcttccatgatcaaagcaagcatgggcaaatgcttcacatctttctgcctgtgttttgcgagcccattctgtttaatgtggacttgatttaaagtcgacctgcagtcctggacttcaaccaaacagccattatagtaatgaacatttaaaggagttatttttccaaagcattatagtttttcacatccatcttttcattccctcattagctaatgatgttgatgtcctcacaagcattgtttaggaatggcttaggaattttaccgtatgtttactttggcttgtctgctgccccttgctttgtaatctgttcaccggtgattcagttgtttctttgagtccctttgaaattgcaagttgacgggtggggactggtggggaaagaaatccagaatagatattcctaaaactgtgaagtgaaaattcaggagagactgtcataactctgcttatttaaggtggtttggtttgtgccaagctaaaggagggaatattgattgaattacttttttaaaatgcaattaatttttatttaattgttttccctggagttgtggggttgaggtattgcagtttaaagcagtttggatgtgctgataatttttttctgattatcttcaagtctccatggacagtgtcactgcaggtctattcatgctttcgttcctcctttacctgccttcatctgctttctctgggcattggtacccatacccaggtgtggtcagttggagtaactcctgccttgctgggcttaactgtggtgtttctgggcctaaggcaattggaacatctgtagtttatttcctaatcccaattttgtggaggtttgtgttctagctttgattcaattactcctaagtagtggcccgtattaagtagaggctgtgtgagacaagacacttaatgtaggccccttggagctgctgggtccttttcatcagaatttggctaatgatgcctctctcttttttacacactaaagcctaatataactagtaatgaacctcattaataatttgtattggcagatgtgaggtgtcacacattaaaactgttttacaccatgagcattgacttcattcggtcagtgagggaggatgcaaccacctttgccaaaataggaaggaagagaagacccagagttttcagggaacggaattaaatagcactttaacaagcttggcggaggcagtggggtgaggagaggaagttaataggcccagggaggagagtatctcactggtttctccaagctgattcttctgggtgccaagagagctgtggaaacccacagaggaatgccccggttcctttccttccttctttctggtaagggtttagatctatttatttgatggtcagccttccagttttatcagcaccggtctctttgtacaacttcccaaatgtacaaactccagacagatgagtacagttggtgttttccggggagggtgttgctccctgtggtctgtcacagccagagagcagggggccagagagaggactgattgcccatatgttccacatgagtcgtcagtggtgcacccagttttaaaatgctctgggggtgtgtggccatgaagtggattttgaatgaatagaaggaaaaagctcgtggatgaaaaccatgagccatttgaaccgtgtgtggtgtctggaaaaacaggtggtctggcaaaactgacaaagtttgcttggggaaacagaagctttgcctccacctctgatgcttgggctgggatgaaataagccacttttctgtttagactgtgtttagatggagggaagcttcttcagttctttattgggtgcagtgaatggcagaacttttattacttgcattcttaattttagttagccatgctgagctgggtttacacccaccttggtatgtaatttctgtgacctgttccgcttccttctctcctgtcacagtcaccaaaagccactatgggtagccatttgttaatatcacctttattaggagtcctccaggctcagttaaggtctccctccatctttccacccccactattttatgccttcgtagccactggcactctgccttgcggcacttgcacatatttataatcagtgagtcaccctcctagactgtaagcaccatgagggcaagatctgcagcccaccagcagcctctgcttccagcacagcacttggcacacaggaagcactctcttagtatttgttgtacttgtcagtgtttgttgcctgaatgacacagaagtgttccctgctggagaagggattcgagttaaatggaatcatccagagaatttgataaaatgatgatggctatccgtttatgctcttaaaagtatgcacttgagacctctaagtagatgtttatttgtttatccctttccagggttcatgtgtttatcttgtttccttttgtatgcattttctgctttgcccctcacatagtaattcttggaagcaagtagatcattgtttccatttcagttgagatcactttaggggcatgtcttggacttgatgacagatcttccactatcttatgctccctacctcacatttattgagtacctactatgtaccaatccttaacatttgttattccagtttatcttccatcagtcctgttgaggtagatattgtgccccattttacagatgaggaaatcaaggttctgagagattagataatttctaggaacatacaaccaataaaagggaaaggaagagtctgagttcaaacccagttctttggtgctaggggtacagctgctgtctgcagggcatgccagatgacacctttttgactcttttggtaggaaatggggaggaatgcttgtcaccttagaaatgctgttcgaggttgctcacacctgtaatcccagaactttgggaggccgaggtgggtggattacaaggtcaggagttcgagaccagcctggccaacatggtgaaaccctgtctctactaaaaatacaaaaattagccgggcatggaagtgtacacctgtaatcccagctactcaggaggctgaggcaggataattgcttgaacctgggaggcggaggctgcagtaagctgagatcatgccactgccctccagcctgggcaacagaacgagactccatctcagaaaataaaaaaaaaagaaatgctggtatgtccaagtctgtgttcactcttatgttcatggttgttttacaaaagctgtatttagcaagcactcaatgacaagttatgccagcactgtgcttggcataacttggatatataggtgaatgaggcagccatacagagaaatatgacaagagtatgttttaaatgccccaaagaaggtttatggaaggtgctacaggaatgtggagctgggaaaataaccatcatttatatagtgctttatatgctgtctcttgcttttatatttgcccccattgtattgtctttctctctcacctttcctccacgtctcctcccctctccggaatttcaggatttggatgcatgtgtacatttaagatttgttctaaatacttgaaagcacgcttgcttgttagttacctgtccaaagcctgttgactgctgggccccagaggaacactagcatgtgcccttgccccgcctgtttctttgtatacaaacagtatacaaaacatagagaagagaactgacagatatttagatctatgggcttttatagaaaataagaattacttttcttctgtaaggtcagtgtttacaccttgtctgcttgctccatactcctctagagactaaaacacctcattgcttctcagaatcatttctgaaactgaggctagaaattacaacagagactctcttctcacctcttcaccagcatcccttgcctcttaaagtcactgaaagaatatcccccctcccccatggaggggtcataacacttttttgtctgtctattccaggaagctcgagtgctttacaacgctttacccagcatccctgggggcaggatcggtgcatgtagatgtttactgtgccaaccccttaaaaggccttctcttagcttagaccctcatctaacccagactaataataaaaagtccccaataactttgctgttatagatcttacagtgctcagagattggccctttaatatccatggttggcaaacatttctgtagagggattgtaggttattttgactctccttgtaagtgccagtttgtcttaagtggcctcaatcaaggaaacaagtagttcggctgcttcctctttatggcatccttttgatgaagcaccacttactttactttgcatattagggtcccaggatacatgggtacatgtatttttaatctatcaatcatttcatataacgttaagtagaactgatttaggaaattgcagaagtttcataaaaagatactctactaaaaagctttaagagagctattgattcccaaaaatagttgattgggccatagcatcaggtgtgctgatgcagaaccacatcgttgtgatttatttctgctgtctttgtgaggggatggaggacacaggcttctggaagaacatgtttataagtcttccttctcccagatggcgcttccagctaaggtcctgcagagttgcattctgccacccttcctggagcctgagagatgggcgaggagtgcaggtggtggtgttaggtggtggcatgtcaaggaggcaggcaggaaaaggcagactgatttttggtagcattagtctttcttctgtccttctctgcttttctttattctgaattttaagatttggatgcatgtgtacatttaagatttgttctaaatacacgaaagcacgcctgcttgttagaaggacatatttgagggaactaagtggtgttcggaggcacagtgacgattcgagagattctggaggacgcatgttgggtgttggtggttttccagttggtatcatagtgtcatattctcttcaattgtaggtttagctctttgggacccaaaaagacaagattagtcaggatagtgacatgcacttggcatgctgtggcttctgttgaggaaaaagtgacccaaatttgaacatccaacttcaattcttagtaattggcaatggctccttgcatctctttctgcttgactataaaactataaaatgctgctattaactttgaaggctgccacttacaaggctaggtgaacagacttttatattaacaactcagattaaccctgggaagcatctgtgctccctaacggagaagttgctttcacgtttttcacggtcaacctgggtggccctcaccatcaggagtgtggaatctcaagagtaacagcacaaaggggtggcaacttgaacccctgggttctagtcccaggtcagctgctaactgctgtatgaactcaaggaagtcatccaatgggatcatcttttgacaaaagaatcaggccattaatcaccaaggtcttttccacctctgaattctgtgatctctactcttgtaggtttcctccctaataatttctgtaggtctgctttttgaactatttcccttatttatcctttccttaaaatcaggtttgttctcattcttctggtcccacccacatccacatggctgttaaagaacacagtgaattgatgcagaaagatgtcccagatataggccgggcgtggtggctcatgcctgtgatcccagcactttgggaggccgaggcagatggatcatttgagggcaggggttcaagaccagcctgaccaatatggtgaaaccctgtctctactaaaaatacaaaaaattagctgggcgtggtggtgtgcacttgtagtcccagctactcgggaagctgagacaggagaattgcttgaacctgggaggtggaggttgtagtgagctgagattgacagagcgagactccatctcaaaagaaagaaagaaagaaagagagagagagagagagagagaaaggaaaggaaagaaagaaagaaagaaagaaagaaagaaagaaagaaagaaagaaagaaagatgtcctagatatattgttgagtgaaaaaatatactaacagagaggcatgcctggtatgacctatttctgaaatgagaatgataatagtatcagtataggcctgcatcgttaatttgaagcagtttaagtcagatgtgtttctgaattcaggattttttcagttttacataggacaatgtattaaatacatttactattaaataacacctccagtgggggctggggtggcatctgtaatcaaaaacattaatacttctgtggcaaaacatggatattcacactaagtggggtaaataaagattacacattgccttatgtcagttcaggtaagattttgacaacaaatgttacaaaatttgtttgggttttgaaactttttgaatattgggattgtagataagagatcgtggtggacctgtatagccaaagtggggaaaaatctggaaaatgaagcatcgagcacttagcaatacttttcttgagtggagaagtagggtggaattatgggggactttcatttcccaagttatattctttactagtaagcatgtataattttataatcagaaaaaatgattaaagatacttatgagatataaagatttacataaagtagctggaaacatttaaccaatctgtagctgtttgagacttatttatattaggacaactaagacttgttttctcaatttttcaaacttttgtaatgtgattatatttcatacacacttaaaattttttgtaggtgatagtattgggaaaaacgaaaaggaatatgtgatcgtaattaaaatgtcagtggataaaaataaggcccttggagtaccctgtgggaaatcaggagccacttcctcctggatgctttatgtagcacattatactgacctattaaataatgagaatcaggctgggcatggtggctcatacctgtaaccccagcactttgggaggctgaggtgggaggatcacatgaggccaggagtttgggaccagcatggacaacatagcaagaccccatcgctacaaaaaaaataaaaatataaattagccaggcatggtggcacatgactgtggtcctagctacatgggacactgagacaggaggactgcttgagcccaggagtttatggttacagtgggctatgattgcaccgctacactccagcaggagcaacagagtgagaccctacctctgaaaaaataataataagaagaatcacatggatgaagcaaatgatgataaccaaaatataatgtatgggagatcactttataaagatgtaaggctatacaataatttaacgtgtttttgaagtaacattgcaattcctaaggggaccaaaatgaatggttggtcttaatgggctttgtctgaaaattgactggaacaattgcttccaaacagaagatacttggaatttcatatatggaatatagatgagatggttggcatttgaccatttaattttatcagtcaatataaaatgatctatattattcttaattttcacacttttccatatttctaatcctaatatactcatttgttgccttttcccacttaattgtataattgcagttcccatgttgcttataatagctgcataatatttcagtcactggtttacataatttaccatcttcttattgctgtttctatttgtgtgtgtgtgtgtgtgtgtgtgtgtgtgtgtgttacaaataacacttccgtacctatagctgtttctttttcttttcctttttttccccctatatttaggggttgttttcttagggaatatttttttctgaatgcgtgaggaacttaaagtttattctataagcatttattcagcatctactgtgtacagggccctggagatacagagatgaattttagaacctgtgcacaagctgtctccatttcctggactctcttcctccctctcccttcacctgacgaattctccatttaaatcccactttgccaatgaggcctttatgtattccccagagtattttaggcttttctgtactttttcttctcatttagtcacagttatattgtgtacatctcagaataactaagattacttcatttttgccttcctcattagactattaaacagtaaactctgagaacaggttttatgtctgatttattttccttggtaccctcagtacctgggacattatgtctggcatataccaggcacagaaattcaaatgagtacttgcataaatgaattagatgaacaaatatttgaatatgattcttgccttgagaaatttagattagaactgaaaaatggattcaatggataatttcgatgatgtgtaagtgctttatagaaaatagaaaataaaccttttcctagctattatcttttcctcctttacagtgaatcccttggaagaggattcaattccagcaagtcatttaatgtcttacttttgcccatactctgcagcagaaatgggcttgtcttattttctgctaaaactgttgcttttctatgcaaatcctactttatttctcattgcactgaacaccattatcattcacctttttcacttctttttgacatgttggttatctttgttttttttttcttattattaaaaatcctgtttcttcagcatcccctttttcctggtcttatctgatagctgtacctattctgctgtttatgaccttttaaaaactgttagctccttgagggaagggatagtgtgatcttttggtaggagactttaaaagatccactttcttatattttagtgtatcccttgggtcaaatggaggatttttttttaaaggatgatcatcaaataaatattttaagtaatttgaccaaaatttatcttcttacctttttactaaaaatatacactaaataattttaagggaagattttatagtctcatattcaacatggaaatttcttgattagtattgccctgactttattggttgcttcacgggtggcttctgaattcatttcttggaatgttactattcagggccaactttgttagtattgctacgttgtgatttaattttttgccacttacacattctagccagtctggaagatctccaccaaaacacctgtatagttcagtctgaatttagaagtgtcacttgcaagagaggcagcaacgtcaggcccgtgagactcaagagaagtctctttccatgatagatcttcttatacttggtagaaactggcaagtgactcaccaggggtggaagcctggaaaacagcctgccgaggagggtagtctttctggtaacacatcgccacccctttgaagcatccagagaaccggaagagcaggaactgcctgtcagactgactgagcgcttggcattctttcatggaaagatgacaactcatccagggtgaaagaggaagtggaggggggtggcagggaacaggagggtgaccttacatttccattgttttgcaggctgcctggtcgagtgcagtgggttgtttgggggttgggaggaattggaatcatgtacttctattgttgctgtccaaagtggatgtcctgtgctgtgttgccaaggaggggagcttgtacccattttatccttgtgctccttcgtaatccagatggtttgtgatctgatatttctttcgtgcttagccctggactctatcggttagaatcctagtatcattttaagaactgggattctcctatgccaaatttctgtgaaatctgagagccaacagaccgacatatttttccgggctatctctggctttgacaatggcatattttgagtgtcagttgatttttgtctcagtttattggcttaagtagtaagagtcaagggattgaactgcagcagtagtgttattttgataatttattaagtgttgtcttgggagatcttggggggaaaaagagtttagtttagttctttcttataggaaattttgttttgttttgtttttgagatggagtctccttctgtcacccaggctggagtgtggtggcatgatctcagctcactgaaacctctgcctcccaggttcaaacgattctcctgcctcagcctcccaagtaggtgggatgacaggcacctaccaccacgcctggctaatttttgtatttttagttgagacagggtttcgccatgttggccaggcttgtctcgaactcctgacttcaggtgatctgcccgcctcagcctcccaaagtgctgggattataggcatgagccaccacacctggccttatttagttctttcttactatggctagaaccctcccaagagtaaaataaagacttcagtggacaaccagtggtgagttcactttctagagaatggcaagtcatcggaacactggtcagtactcccaattctatggcatatctgcacatctgccatctttggtcagcaaccctccaggactgccttcttcacacctgtgcgtgaacttccaagctatactgggcaggttggtgctgcccgtttctcccatgctatttaacgattactccatgcagttactgttcttcttaaggcctctccacccgcctcactcttttaacatatgactttgtatctgactttactaagcaacttgaaacttcttagaatgagctcctccatttcctgtcctgatgcctgcaaacttatgtgtagtcacagttatcttcatctggttttctccaggggtatcccatctgctcctgcatcctcctaggccttgctctgttagtcattgtccctccctctctttctaattttcagccacatttatttactgtctgtttctccctccaatgtgttactgtctctttctccttggctgtcaaatgttctctgcgttttccatttttgtgcttctcgtacctactaatgacttacctatttgtcaactccagtggacacgctatagtccttatctttctggagcttcttcttgtatttaacccaacacatccactctcttctctagaagagtttttagcttctgcaaccgtccatgcttctgttctcttgctgcctctatgtcttgtatctccttggtgggcttctcttcctttgcccacctgttactgttggagtttagttctgggagtgttgcttttctctcctcatatatactctggccttgggacttcatctgctctctaggttttcactctctgtgtgccagtgattcccatgtctctgccttgcactgcctggtgaccagattctgctggttgtcatgtgagtatctgaaagcctccttaaattttccaggagctgaatgcatgaccatttctcctaaacctccccttcttttctgaatttagagaccatattatatatggtggttaagattggggctctggaatcagatttggatttgaattggggctctgatacttcctggatgtttgagcttgaacaagtcacttaattccctgaccctcagtgtctttctttttaaaatggggataaaaatactatccatctcagaaattcttatgaggtagattgtaatgcatttgtacagtgcctggctcagaataagactggaataaatgttagctgctgctgttctctttcagtttccctcatccacggagacatccaagccagaaacctgggagtcatctctaatgccattttcctttagctccttaatgcctgttttctttagcttccatacatagccagttacccagtgtggctgatttctaatcactgtttacttcttccttctggacatttctgagttttcctttctcttgattcccattaccactacctgtgtgaggcctttatccttactttccaagatgaagccacagcctcctgcctcctttatgttcctgtgatcctccctccagtgtgttaccaggctgcctctctgtgtctaacagggtttccaccctggttgaagccctcttgtgatgctccattatatgcaaatcaaaggccaatctccttagcatggtattcctgggtgtcctcctggcccttggtggcattctagcctcccttttaccacttcctgattccggcttcatccttgagcaacacagtcttgctgtgttccctgtgcaggccctgctctttaggctctttcccacctttgttagcgacactgcttggaatgctcccttccctgcttttgacttagtaactcctcatcctgaggactcagctcagctatcacctcctccaggaagccttctctgacccttccaggataagttaggtaatcttccatagagtcctgtcattctctgtgcccatgatgcacttaccacgttggatcataatctatttatgtgtctttcctcccagcctcagtcctgaagggcagaaaccatgtgtcattccacctcatatttttgtgcctagctggatgcttgacatgtagtaagtgctcatgaaatgtttgttcattgaataactgaattcaagaaccagtagacctctggatgaccctggtttcctgtttctgtggaccacaatgctctggggcagtgctgcgtatcagaggttcaagccatggctggagcagccacccctgaagtagacaccctaatatccttcccactgagttcctagttctacatgctggagtgaggctgtcaactctgaagtgtcagagtgtgtctgaaaatgattgctgtgaaaaataaaatatttcacattgcaggcctcatttttaagttatttttcccagagaacattttcatattttagaacttatggtaatgttaacactttctatttgcataagcacttccctgttgggagatactgcaggtgtaagtttttctgaggagtgtcataccaccatggaactattttccatcgatctggagatagggaacttcttgtatactctgagagagaacttctttgagatgtaaactagactgacctactttagaggctgcctgtatcctaattttctattttaaaagagtgatggctgaacactgaaaagctcgggacattttagaactgtgctgcccaatatggtggccactagccatatgtggctatttaagtttaaattgaattaaaataaaatgaagtggaaaaaattaagttcatcaattatattagccacatgtaactgatgactagtggctacctaccatatatagaacatttctattattgcacattattctactggacaatgctgttttaggatgtagaagtcctgatggataatatcaaagccaccttaccacagacagagttttacagagctgtgaagtaattcttactgggaacaccagatacttacttaccattttatatagcgtatgtggcattctctcatcttatcattagagcatgcctgtatctttagcgacaatagcattcaaacaccaaatgttatattgtctgtctggaaatgttttcttatacaactcaaaggggaagagaggaatatgtcgtgagtaaatggaattatttttctctgcaccacatcattataaaaactcgaagaggttgggtgcagtggctcacgcccatgatcccagcactttgggaggccaaggcaggtggatcacttgaggtcaggagatcaagaccagcctggccaacatggtgaaatgctgtctctactaaaaatataaaaattagacgggcatggtggtgggcgcctgtaatcccagctactcgggaggctgagccatgagaatcatttgaacatgggaggcggaggttgcagggagccgaagtcgcgccactgcactccagcctgggtgtcagagtgagactccatctcaaaaaaaaagaaaaaagaaaaaagaaaaactcgaagaggctaaaacgtatcctggaactaaatatttacatttcttaaagccatgtgtgttttctttggatgaaaggataacaaatgatttgtatcgttggataatataaaaacacttcaaaaagttaaaattgaaagaaaggcaggatcttctacttttctttattttcctccccagttacccaacccacttggcttccaggagcctgagaagttgaagaagtaaacagaggtttagttcagctgttaaccatgctaggaagttctagctatctggtaataccatggaactcaccagaatctttcatcatggaccagctgctttttacacttggataccagtaccctagatggtgggagagactggaaggatcgttcaggtcaggggtgatggacttctgcagtccctctcacatacactgttcaagttacctacagtagctacgcacggaaagtagggtgtgagtcattccatgattgacaaccccagtggaccacaggtgactcccacctgggtggcttcgggaactcagttcagaggctgcagcaggtgggatattttttggattatggagagctgtttgatttcacatcagtgggttcttccctcaaccttgttcagatcagtgcctgagtaagttctaatatattaaccttttctgagagaagagatgtgaggatgagggtggagggtgtgaatcttgttttttcaccatcctgttactcttctgcatgcggtgtccccttactgaggaacagaatagaggagctgtaagttggggtatagtgtggcaaggtttgtgagagacttaagaacaaagggtgtttatcataggtaattatcacagtgttgttagagtgtaggcagagcagctttctaaccaacattacaagtttattttgctagtgaaaccttttatttaccaatgaagcattagaatttcagagagttaattgtttgtgaactttgttcatggtctttctgaaactttcaactctctgtttagttacaataaggctcattttatagcctttattgtcctcttttgagaagaggcagtataggtagataggaacatgggcttgggatcagatagactgggaatagaaatccatgcctgacgcttggacaaattgtttaaacttctgaatgttaatttcttaaccagtaaaatgggaataataatgcttaccttacaggcaaggggacaatttctttgtgtggaataaaaaaaggaaggtaagctgactcattttcagaaagatctttaaaaattaataaacatgccatattccttaatcttatttatgattacatttggtttatttaagttttaccatgcatatctacttagtgttatcaaactataaggaggaagggctcttggtaaaatcagtgagataatctcagagtctgtgctcttaggaaattaataaaaaaattaaatctgataaaaaagatctgttttaatagcaaattcctttttaagactaattgctgtattatctaaaaggaaacaagctgagtgcagtggcccatgcctgtaatccaaacacttcgggaggctgaagcgggaggattgcttgagctcaggagtctgagaccaccctggtcatcatagcgatatttcatctctatgtttttatgttaaaaaaatagctaagtgtggtgctatgtacctgtagtcccagctacttgggaggcagaagagggaggatagctttgagcccaggaattcgaggttacagtgagccaagattacatcactgcattccagactgggcgacagagtggcatcttgtcttaaaaaaaaaaaaaaaaaaaggaaacaaggggccaagggaaatggggagactaggaaattcaaaggattatttattggcaaacagcaaaacccttgattatttgaatgttttgctattttgagtaatgttatttactgattacagtgcagtctgagtaataacaaatccatcatccagagagtttttgaggctagaccactcagttttgactgttcacatacattattacatatttgtaaaagttgagtttcatgtgactgacacagaagaggtggagtaatcaaatgttcctctctaggatactatgcagtgatcataaggaaaggaaatgaaggttcccttttccctaatgcctatattgctcaggccagcactcctgaagatgcttgttctgttgaagctccataatgtgtcgatgaccctctttgcatctgaggctgggttaatccccagaggtacaaagacaagtcagggatggcatctgtcttggagatgaggttatcctgaaggggatgtggacattggcacaggggataccagtatcaaatgattggtgttgaacagggagctgggagatcatagaaaacagcctcttccctcatgtgagaagaagggaggttagggcaagacttcctggagaagtcgcctagacggagtcttgaacaatgggtaggacttagatgatgaacgggtgagagagaaggaggaaggcattgtaggctaagggaacagcatgagtgtcagtgcattaaacagtctgtgtatgcttgcaagggcaagcctttccatgtcaatagcatataaagcataagggtgggaatcaaggactataaaggggtagttgggggcccagccatgaaaagccaagtatactctatgaaggcttagagcatatgcttctagctgatggggaactgttgaaaaattttaagcaggggtgtaaatggccagattttcctggtttgctatggcagctcattgagtcatagatttgtggctggatagcaggaaccgatcatgataggctcaatgtgagatgatgaatatgtgtaagaaagcagtgaaagtcagggctggagaggagaagatgggtttgagaagtacacaagatttggagttgatacaattttgatcaactggctacggggagtggatgagatggaagagaccagaatgacacttgaagttctggtggccattttgaacctggggaatataggaggaagaatgggtatgtaggggccaaggtaatatactgattttaaaaagtgtccatctggcaattgaatgtgagtctgacgctctgggaagatggcgtctggagatgggaatctgggagccatcacctagaggtggtagttagagccatgtgagtaggttggtgcccaaagagaactctgaggatgaagaaggcaacgggcaggggatggagtccaagggaacaccagacagaagtggagggatggagggaagaggaaatttctagaaaagactcagaagaatgggtctggaggtagaatctgtggtgtcacagaagctggggcaggggacagttttatttttaataaaaattttttacatatatatgtaaaaatatgtaaatatataaaattttatatatatacgtgtgcatgtgtgtgtatatgtgtgtgtgtatatatatatttgtgtgtatatatatatttgtatatatataatatatatatatatatttgtgtgtatatatataaataaattgcccaggctggttttgaactcctggcctcaggcgatcctcctgccttggcctcccaaagtgctgggattataggtgtgaactaccatgcctggcctggagacacttttaggagatttatagctgagatagctaacccaagtcacccttagtatttgatgaagtagcaggcaagatagaatgggattgggaacttgaagagaatggagactgtttggaatatcccagtcactgaaggaaatgggagatgagatgattgaggaaaagtaaaagaagtgtgaagagatgctgaggctcagctgagattagaaactgaatttacagtggcccaagtgtgtgtggctccccagcctgtgtgtcagaggcagcagatactgagactggtccagggtggatttttaccagtcagatgtggcagaaagaaggtgtgaggacgtgtgtatgtgtttgcagggggtgcttttaagaataggaatggccaggtgtggtggttcacacctgtaatcctagcactttgggaggctgtggctggtgaattgctggagcctcaggagttcgagagaccagcctgggcaacatggtgaaaccccatctctaccaaaaagtacaaaaacttagccaggtatggtggtgtgtgcctgtagtcccaggtactagggaggctgaagtgggaggatcacctgagcccagggaggtccaggctgcagtgagccatgattgcaccattgcgctccagctcgggcaacagggtgagaccctgtctcaaaaaacaattaaaaataaaaataaggaacaggaaggagtgtggctaggagggacctaagaggatagaaggaagcagttcgtagacctggatggcttgtatggttaaaaagcagatgtaatagaagggcaggaggcggtagggtgatgtagtctccaaggtagagcagtttgagggagtggccatgggaatggctgagagaagtggcctggaagtgaaggccagtgaggtagaggatagcccacagggaaacctttgtagaaatgggacttttattccacttgtaagattcacactgaattatagcattggatgtgtagaataagaaacttcattttggtgtttgagaacacagtagataggtgtgtgtcctaaatgttttgagccatatgcaggggcaggtataggatagtgtatctgaagatgctgttgggattctattgtcatttatttatgatgtggtaaaaagtctgactttgtgtctctttaaaggaaagttttgacaatgaatataacttataataatacttttatgtatttacacttttcaaagtcatttcataatgtttgctattcagtttagtttagtggctctgggtaatctatttaaagtccattttcagtttgttagtttctgtagactacaagtgtagagggaaaatgtatttcacgtatttcactgggtaagagaatggattattagcaagaacttaaatctaaaatttaagcagtttctagtgctgagggacacgatagatttatgctgaattgtatatttctgtatttgatttttttttaaactgcaggcatctgtgtcttccaaggtgagaaaaaacgttaaaacatatcatgtattttctggcctcctactatgtaccaggtggtatgaggacataaagaggcagaagatacgattcttgcccctagatagcttcacatttagctgaagaaacaagacataaacacaggaaaagttagctaatcatgcagggtttaaatagcaaggcatgacatgactaatggggagatgcattgtttaggcagtaattcctacaggagttcagaagaaagagattattttaggctgtgacagtaaaggaagggtgtaaagacttaaaaggagaaaagagaaaaggcttatgtagaggaactgaaacttgggaatgactgaagccttgttctaccacttatgccttaccttgtgcctcaatttcccaatctgtataacataatgatgatgtgttacctcccagactgtcagaagatgagacagtgattgcagaaaagctctttgcaaataatgcctggtccctccatactgtgtagacagtaaaaatcgtacactttttgaaagtctttgaaaatttaggttactagggtataatttctgtcgttcaagtttgccaagtaggattttttaaattagcatattgccagaagtttgactttcttctttttcccagtaaggagagatttgtaagactctgaaaaaattttaagcaagcaattagacacattattactttgggaaaattgcttttatggccaggcatccttttctgtttctttatttccttgagcaaagataatgattgataaggaagtaaaactagaaagaagccagatccaaacttagaaggaaaatattttgtcacgtatggaagttcagtggaggttgcaggttggctgatgaccactttgggtgaacccagcctgacactcagcattttggagatgatagtctcagagttcacaggtttcctgtgtataaggaaatggatgtcggtcatttcaactgtactgttaattgctttgggaaaatgagtggtattcattaggcaaggaagcttgtagccagccctgtaattaatgtgaaaccttttcatacagccagtggctcttcagcatctctgtactttatgtttatgtgtatacttaggcttgcttcagtggccagaggcttcaaggcattcagggctctgggggctcttattataatggtaatgaaaattggaccctagaactttggacctccccagccttaaatccactgagaggagctctctgtctagggatgtggctccttctgctggcttcttcccttctctaagatagcagtgagatgcactaaacatgagatttctaaaacaaatacttcgatgagtaggaaagtctgttttcctgaatatatccactttcctacatattccattgcttgtggaagcaatgacccaagggttatatgcaggactttttcttactttggcagactggagacccagagctcagagaaggcagaaagtgtgttaaagaacaataggaaaagtggtgagagacaggcagatgaaggaagcatgaactaccatcacagagaaagggtagagtcagcaggtaattctcaaagggatgtgcatctgcccctaacccaatctaaatgcctgactcaatgtcctcagaggacacgaaccctggaaaacaagtatgagatgatactactcaggtattgcgtgtgtgtgtgtgtatgtgtgtgtgtgtgtgtgtgtgtgtcagaggtcagccctgatgtaattgccaccgaggtcaccgtggatgaggtcattgtgggtgaggttacagtgcaagagctgtcttttggtgctgttctggtcttgtgatttccctattttcagcacccagtaggtaggtgctcaataaatgtttgttggaggaatgggtgctggggccagccccctaactctggcctctgttggacgttttgtgacctggaatcattctagaaggaaagagactgcccagagtggatttgtgtcctgcttgtgactttcttggtaacaactacaatgaatatgctccccaggctcttaatctggagaactcctttttttttttttttttttaaacagtctcgctctttcacccaggctggagtgcagtggcgcaatctcggctcactgcaagctccgcctcccaggttcacgccattctcctgcctcagccttccaagtagctgggactacaggagcccaccaccacgcccggctaattttttgtatttttagtagagacggggtttcaccttgctaaccaggatggtctcgacctcctgacctcgtgatccgcctgccttagcctcccaaagtgctgggattacaggcgtgagccaccgcgcccagcctggagagctcttgatctgtaggtgaatcttagtatgagggccttggaggagcttccaagtgtctgagagcctcatgaaatgggatgcaaagttaggaatttctaaggagaaagtcagaggagcctctgattcccagccggctgctaagcccttccttaaccaaggttcaccctcccatgttgcctgctgggctgccttacagcagcctctagttccaacatctgctgtagatttctgacactcacagtctacccttcacctcttctctggctattaccagtacttcctcactatccctagtcatgggaaaaaaaaaaaagagaaccgtgtccccaagatgatcttgcctttgagccttgtgtgtttcctgacagggaaaaggccctgtactgccatgtcctcccctctggctgcttcatgccgggtcttctgcctaatacctgacacaaggagactcctccagactgaactgcgaggaaaggctttacaggcagaacaggctctgcagagttgctgctcagtaggccaggggtcagcagacttcatgctgtgtgccttaggccacatgagtgatcctcctgtagatatttcccatcagtgaaaacagagctggcactgatcacctcctctcttacagactgcggagctaaagtgggctgctggttggaatgtgctgtgaaagttggaatgtttttgcaaattttattttattttttgaatttgaagtagaaagctgtttgattataaatggtgacttttcccttctaaaatcatttaaaatttttgtaccctttgaaaatgacatttaattataggcactcaaagtgcagttgacaattattgttatttttggggaattgtttaaaggatgttcattcatgcatgcatttttttcattatttacttattcagaaagatgtggaagtctaatatgtgccaggcactgggaaacagtgatcctgctgctcatatttccattctacacccaagctgtgtacttggtcatgtggcttggatctttgtaaatctcctttaccctctttgccctgaagaacgttattagaacttggtatgcaaaatacaccattggctgattgttggaatacttttgagcaggtttgtaaccactttcagtggatgctgtgtgaagacccactaaagcagtggttctcaaggtgtagcttgcatcagtatcaccgggagggtttgttaaaacagcttgctggacccccatgcccagattctgtttcagtccctgactgcatttctaacaagttcccaggggatacttatgctgctggtcttggggatcacactttgagaacctctgcattagagacatttctttagacctaagggctttgaagtctcttctcctgagaaattggtgtggtttcattagggtttatcgtgaaccttgtttgtgaacctggttttctttttgtttgctttgcttcgcgtcagaaattcagattcaaatttgtagctcaactttaagaaaattttaacagttacatcttaacttttcccagccttgatttcctatttcattttccccattctgattttacatgtttacacaatataagttcctgtatactgactgttttgtggaatgtagtatatattgagaaatatgattgcagtcagtgttcttttcttggacatttgtctttcgaatcaactctaaagtattacatgttttgactgtttaatgcattagttatgggagtagattccccagaagaattatattattaatagcaactaaccaaaggattggaaagaaaaaattgggaagaaagtgacagaaagttcttggtaaaaaacagaactttatttttaaactattgatgcatagatagtatctacaagcagtaatacatatgcatatatctgtatgtttatatgtgtatatatatgtgtgtatgtatggttttttatttttatttttatttctttttgagacagagtcttgctctgtcacccaggttggagtgcagtggcgtgatctccgcctcccaggttcaagcgattctcctgtctcagcctcccaagtaattgggattacaggcgcccatcaccacacctggctaatttttgtatttttagtagagacaaggtttcaccatgttgctcaggctgcctcgaactcctgacctcaagtgatccgcctgcctcggcctcccaaagcgttgggattacaggcgtgagccaccgcacccggccatgtgtgttcttttaaaaactgagaaccctaatacataaacaatatactttctttggttgttggagaaaaagcgaagggatgaggtggtgatgagaacagtgaaggcaaactacagtggttgcccaactttactggagtcacctggagtttgttaagtgcgatgccagtttgctaggcctgggggtggggcctgcatttgtaataagtgtatcaggaaattctgacccacgagaggtgggagaggtttagcactgggtagaaaaatgaaaggcccaatctgtattaaacctgctccaaatctttgtatccatttttggatgaggagttcctgttcagattttctgcaacttttcctgaaatcagagtgtaatgggcacaatatcattcatattagtcagtcttagctccagaaagtactcattatgttagatgttcattggaagtagtttgtagctgatttttttctctttcttcgctctctgtatttctgtcttctacttctgtttttagttgaagagaagatactttaccaacagcttgtctgaaaacaatttgcagataggagtactcatagaaaactcttggggttctcactgtgggtcttctccaggggtgtggataacaccaaacactgcagtatggaaactagcgcaaaatgggatgtgctgtgacactggccagctggagacagttgggacaggggatgacttaacgttaacatgggaatgttacatacacagtctagaaaggccagatattcttttgcactgctgcctctggctctcttttcatctatttagtgaataaccaaatttatcacctgtagtaatcagttactaatttagaatttaatttctttaagagttacctggatttagggctcagtgaaggcagtttttatttaaaagcattttcttgaataaacattttagaacagttttagtattacagagaaactgtgaagatagtgcagagaattcccatatacccaacagtcagttttctgtattattaatgtcttaggttagtatgctacattgtcacagctaatgaatcaataatgatacattattactaattaaacttcatagtttatcagatttccttagattttacctactgttccatttctgtgttaggatcccattcaagataccacatcatgtttatatgtctgcttaggttcttctagtctgtgacagtttctcagactttccttggttttggtgagcttgacagcttgacaagtcctcgtcaggtattttatagaatgtccttcaaattgggtttgtctaatgtttttcctgtggttcaagggttttgggaggaagaccacacaggcaggcatagtaccacatttcattccatcatgtcatatcaattgcataattagcttttacatgcatacatgctatcaaaacgacctatcactgttgatgtgaaccttgattgcatggctaaaattatgtttgtcagatttctcacataaagttcctcttccccttctttccatactgtactcttgggaaggaagtcactgtacatagctcacactttagttgtggagaattatgctctacctccctgagggaggtagtatttagagaaattattgggaattcctctgcttgggagatttgtctattctcccccatttatttattctatcatttatttgtatcagtatggactcatgcatattttatattttaggttataatctaatatcacatgattgtgctcctcaaattgtttcagatttggtttttgggagctgtttcaataggctcctgtgtccctttgtgacatgccacccatcctggtgggtttttgttgttgcatgtgtgctttttaaaatcacatccttattctttctggcactaaaagatgcccctggctcactttgtatattctttgccccatccctagaatcagttatttctccagggaccctggttccttttgttggagaatggttttagaaaccaagttctgggcactgcgtgtccttgttgctactgaggtgtcattgcttttaggtctgttcagctgacggaacagagaaataggtgtatactcacccttgtatatacacatatctgtaaatatttctatatgtatccatctgtatctatattaagttgaacatgagttcatgctaatgttttcaactccgatacagtgttacagacctttttttactagcctttctcccttgtctgcaaactcctgctctaacagtgaaaaactggttcctaccacccaccatccatttacttacatgtatagtggtttcagaattgttaacttgtatcccttatgagaaagaactttattggctagagttcagtggttatgtgaaattcgttatgtaaaattcattttgcccttagatctagagtccatactcatttctgaaggtccttaagccagcatcttttccctcacttctttcagtgaggttatttcatgcattttgatacagttgattctcatgtcatagtctgcatttcatattccaccccaggatctcttgataccctaactttttaaattgcatatattcaagttctgtgtgctataaagttctatgggttttaacaaatgcttagtgttctctgtctaccattatagtatcatagagaacaatttcactgccctaaaaaaaattctctgataggcctcaactcatcatttggcttaacagtcctgctgagagagtcctgccagttgcatctgagagacagtcctgccagttgcacctgctgagagagtccttcagttgcatctgaaaccagtctggtttttaattttacctgatgttcagaaaatgctctcaggctgtcaccgggctgaagaactagttgggttgtagctgtggctgtgaatctggttcccaagaactggctgtattagtctgttctcacactgctataaagaactacttgagactgggtaatctatgaagaaagaggtttaatggactcacagttccacaggctgtacagaagcatgactgggaggcctcaggaaacttataatcatggtggaaggcaaaggggaagcaagcagcatgacggagcagggtagaaagagaaagggagagtaaaggggaaagtgccacacactttcaaccaaccagatgtcatgagaactcactatcatgagaacagcaagggggaagtctgcttccatgattcaataacttcccagcagcccctcccctgacaggtggagttacaatttgagatgagtggggacacagagccagaccatatcattccgcccctggcccctcccaaatctcatgtccttctcaaccaattatgcccttcccaacagtcccccaaagtcttcgtttttgtttttgtttttgagacagagcatcagtctgtcacccaggctggagtgcagtggtgtgatcttggctcactgaaacctctgcctcgcaggttcaagcaattcttctgcctcagcctcctgagtagttgggactacaggcatgcgccaccatgcccagctaatttttttgtatttttagtagagatgggattttgccatgttggccaggctggtcgcaaacttctgacctcaagtgatctgcctgccttggcctcccaaagtgctgggattacaggcatgagccaccatgcttggcctgtccaccaaagtatgaactcattgcagcattaatgagtccgcaatccaaagtctcatctgagacaaaggcaagtcccttccacctatgagcctgtaaaatcaaaaacaagttagttacttctaagatgcaatgggggtacaggcattgggtaaatgctcccactgcaaaagggagaaattggccaaaacaatggggctacaggccccatgcaagtccaaaacccagcagggtagtcattaaatcttaaagctccaaagtaatctcctttgactccatgtctcacatccagggcacaccgatgcaaggggtgggctccgaatgtcttgggcagttctactctgtgcctatgcagggtacagcccctgcgactgctttcgtggcgttgagtgcctgtggcttttccaggtgcaagatgcaagctgtcagtggatctaccattctggggtctggaggacaatgtctgtcttcccacagctccactaggtagtgccccaatggggactctgtgtgggggtttcagccccacatttcccctttgcagtgccctcatagaggttcaccatgagggctccatccctgcagcagacttctgcctggacgtccagatgtttccatacctcttctgaaatctaggtggaggctcctaaacctcaactcttgccttctgtacacccacaggcccaacactatatagaagttgccaaggcttgaggcttgcaccctctgaagccacagcccgagctgtacattggccccttttagccatggttgaagctggagtggctgggacacaggatgtcaggtctcaaggctgtacagagcagtgagggccctaggcttggcccccagaacaatttttctcttctaggcctcccagtctgtgatgagaaggggtactgtgaagatcttggaaatgccctggagatcttcccattatcttgcctattaacatttggctccttgttgctgatgcaaattcctgcagctggcttgaatttctccccagaaaatgggtttttcttttctactgcatggttgtactgcaaattttccaaacttgtatgctgtgcttcccttttaaatgtaagttccaatttcacaccatccctttcttcactcatatgagtgtacactttgagaaacagccaggccacatcttgaatgctttgctggtgaggaatttctactgccagttaccctaaattatctctctcaagtttagagttccacagatctctagggcagggccaaatgccaccagtctctttgctaaaacataggaagagtgacctttactccagtccagtaagttcctcagtctccatctgagaccacctcagcttggacttcattgtccatatcgctatcagcattttggtctcaaccattgaacaaatactaggaagttacaagctttcccatatctccctgtcttctgagccctccaaactgttccaacctctacctgttacccatttccaaagttgctaccatacttttcagatatctttatagcagtaccccactcttggtaccaattttctgtattagtctattctcacactgttatacagaactacgtgagactgggtaattcatgaagaaaataggtttaattgactcagatttctgcaggctgtacaacagcatggctaggaggtgagggggaagcaagcacgtcttatcatggcagagcagagagagagagagtgaagggggaagtgccacacactttcaaacaaccagatctcgtgagaactcactgactatcatgagaacagcaaaggggaagtctgcctccatgattcagtcacctcccagcaggccccttccccaacatgactggattacaattcgagatgagatttaggtgtgaacacagagccaaaccataccacgggcaaaaattgattttataagaagtgagagaatgagacaggtgaatattttgaaggcttgtgtggcaaatattcattagccaggtttattaaaaactcagctacttgggaggctgaggcaggagaatcacttgaacccgggaggtagaggttgcagtgagccaagatcatgccactgcactccagcctgggcaacaagagtgaaattctgtctcaaaaaaaaaaaaaaaaagctcataaatacattaagattttattcacagtgtggtgggtgtggtactcaaggcctttaatgggattttaataatccaaacctaattcagtctccagatgactgtgcaatataatggagataatgctgctttacttttccttactcagaaggtggttgtgaaggtctgctcagggtagccagcgtgcctttcccaacacccttctttctgttttgctggttctgctttctctcattctctaaacatggctttggtccttgattctttgctctttgaactgtacaattgttccttgagggtcagtcagctgtcttgtggttcagttattcctgtgtggatgactctacctgcagcccagccctttattttaagtttcaggtcccatttatctttttgtcacacatttctaatctccctacaaatcagtatttttaaaaaccagagtcatcccaaaccaactgaccctctagattgccttacttcttgcagatttagtcttaccgtcttccagatactacagctgcctttgggcttttcatcatcccttatccttagccaccaagtcctgctgagcttcttttgtaatacttctctcctgcctcctccactgcacacttgtaccactgagacagtctcttaattctgcccagcacctccagccccatctacacccctctagtttgtcctccagcatgttgttttaggactgttgctagcctaattatttgaaatgaaatttcagttcttaacttggcatccaaacctttcgtccattgcatttctagctttaccttctaatttctagctttaccttctaattcacttaaatgagatacaatttaattaaaccatgtattccttgcagcttctgtgctgttttccacatctgtctctttccccatgttggcagggtaaattttagaggtgtaatgaaatttgcaggtggaagttatggggatatagattgtctttagcttaatgtaaggatgacctttccaacagaattgctaatgatggggtgggtatcatggaagaagtctacctgtcatctcccaggtcatctactgtcatctcccctttaaagacctcatcttccatatctgcacatttggcttctcctctcttttgaagctgcttgtttccatgtcccatgatgctaaacttggggactcctcccacctctcagattgtattttctctggttctttctttcactcctttagtgaatttgctttttcttttcttcttttcctgtgctctttcttgaaaaatttcactgctcttagacttagtgtttaccttttgagaaaaattcccaaatgataaccccagccgtatgtttaactacatgatttgtctttatttccaacatcttgccagatatttctatttgagtacttttgtgtccaaatttaaactcatttctttccctttaaaacatgttctttccctgagttccctggctgattagtggcaacagagatgggcagatctttctgtaaagggccagagagtaatatttttgtcttcatgggccataaggtctcaatcacagctactcatcttgtagataatatgtaactaaagggttgtgactgtgtttcagtaaaactttacttatcaaaataggcagcagctggcattggcctttgggctgctgtttgctgaccctgatctaggatacccaggccccaaactccatactcctttggcctttccactgcttttgtttgctctcttcacatgattattaattttcactgatttcacccttagcaaaccattcatacttctagaccatagctgtctgtctattcattcatctagtagacaaaatcttccttttacatgttaatctctatcattttacataatcaaaaacctctagtggctccccttggcctgcaatctaaggttacagttctctgggtgtagctctttctgtgttttgcctccagccttctctcttactcctgtatggacattcctccaatgacactgatcaagtgtgtgttctgatattagttctatcacttctcacaggttgctcctgactcagaatggtctcacttcccactaattgaaacttgccttcaggcctcaattcagggtctcacttcccaggtaaagcttcgccctagcccagtgattgctcctctcctagggctttttttttctttttctttttctttttttttttttgagacagcatctctctctgtcacttaggctggaatgaagtggtgtgatcactgcagcctccaactccagggctcaggtgatcctcctgtttcagcctcccaagtagctgggattacaagcatgtaccaccacatctggctaattttttttatagagatggggtcttattttgttgcttaggctgttctggagctctggcctcaagtgatcttcctatcttggcctcccaaaatactgagattacagatgtgagccgccacacccagcactgaatagtgcttttgatgttgccactgacctattcagttgagaccgcattgggttgtaatttgtggtgttcctccctctccatctgaattttcagaagctgttaaggacagcccagtagatgctcagatgtcataggtaaaggtcatacattgaactctttgtctttcctccagttctgcttcccccttggagtccctgtctcagttaatggcaccagggatcatcattgccttgtgattctgactccttctctttcacctccaccctacctgcatcagttacgaaaagtccagctgctgctccctcctatgtctttctcctatctgccctctcctctccatcccttctactgctgccttagctcaggtcaccactgtctttcactcagaccattggacttgccttgaacatgaattcccaccaccagcttctctcctcttataatcccaacagttatgtatcgggatctgacatgtaggtatgaccttgtaactttcctgattgaaacccctcagtggctccccattgccctgggataaggaccagcctgccagcatgtcgtgaggccattattgattggatgcactttcctctgcagtcctatttctgacttgtctcatttacacagcttacatttgatcatctgtaacccctatacatcttctgtgcatttgcacactccccgtctctgtgtagatgccccccctccccaggtccacttggaaaaccatcacctgaatttctaggcattgtacaaacgttccctcttttgtggagctttcgtctccttccctccagaagaccaagaggagtaaaggtgttatcatagaataactgttgggatagagatataggcttcatctattttctaatgcctcctcagattcagagtcttccaaagtttccctgcagactgagcaatgaataattaagcaaacaagtctctaaaacatcttgaaatgcttatgtatgctaaatatgtagttttgagttcttgttttggttttgctggagcttttgccttcttcctccattacaatggatgatgagaatcaacaatgtagaattattctcggttagtttatatcttgtttttaacctggtatcttcagtgtgttaagacatttttcctttcttgtgggggttcccctgcaaagaaggaggctcacttgtggggccgatgaccactgtctctaggcaacccagagaggtgtgaaagaaagaagggggctgtgaggctgcagggagtatattccccatctccagccagggtcacacctgtcacttctgtttagtacctcttcctagtaaggagaacgtatgctccctttctggaagggtctacttagcagaaacgaggagtggcgagctcatgtggaaagtgcttttttgatgtgttctttcatgtaggggacacacggtgtggaggggatgcacaattactcttctgtggttcctctttcttactccagggtctcctttgccatgaggtccctagggacgtcttatcagaggagaagaaaagtaccttcttagttcttttttgttttgttttgttttgttttattatggggtttcactttgtcacctgggctctccggggtgcagtgttggaatcgtggttcattgcagccttgacctcccaggctcaagtgatcctcccacctcaacctcccaagcagctgggactacaggtgcatgccaccacacctggctattttttattttttatagagatgagatctccctgtgttgcgcagactaatcttgaactcctggactcaagtgatcctcctgccttggcctcccaaagtgttgggatttcaggtgtgccttggcctcccaaagtgttgggatttcaggtgtgagccactgcagccaaccccttcttagttctggagagcagagtcttgcctggcatcctggtgctataccaagagtcctctcctggtttccagagaggacatttgacttcttcaggagaactcaccccactccttttggtccattaggagcaccagaagctttggacctgatgggctgggcttggtctcttcagagcctctgtcctcattcacagaggaggtatcaggtaggccttccagcacagaattacattacctgggaatttaagtgggaggaattgcagtggagtattttgaagatcctaaggcatccttcatttaatttacattttcgattcttcagatattggaatcaaagattgagacacacacataacactagagcacacagtagaccatttctaccttgagctatctccttgttagagaaaaaatagttttgactgtttgtgattttttactacgggcagaaaaactttgaaaaattaatttcaatgtaaaagagttttacttttgccagatgataacacttcctatgctagaacctgggggtactgggatctgacttgaagtaattctaagtttaaatttatagcaaccatgtgggtctgttcagctgggaggggagaaatattgcgagccataaggatgtattttagagagtttctttagtagtcttcagatgtctacttgccctgtacaaagttcagaaactgtttaggacttggaaccttagaatatcagatagaaaaggattgacaggcttagtctactctgtttttgagatgccgaagccaggtgacttcccctagtggcaggtaggcaatgtcagagttgtgatcatggcctggggctcttttccaacctgctctctgacctcacataggatccggattgagcagggtaaagggtggaccagtaaaggctttaatcagtaaagtaatgacagtgttttccttcatttgaaaccagtcagatttgatactacttttctgttcagtttttgccatcattgttttctggaagtttttaatctgtaatacctcttagtatgctttaacacataacacctagtgtcattgttatagagatgaaagtagaaaattagcagggatgtagtatttgcctattgcaacttcttttcctttaaaccccttcccatgtcggggggataccttgtgtgtctgcagcatgtgatgctgactcggactctccaggcagctgactaacggcacctaaactgcctgctgcattttccctgccccagcacagacttgcttagcagctcccgcctcgggccctcattgagaaccatccagcggcacatcaggctggtgccactcccagtggccttggcagtgaggaggtgaggcgagagcaccctcaggtgctagtggcacgagtcttgcccaggctcccaggggaatgagtggtgtgatgacctcatgtgccagaagccagggcaggcatgcttgaggctgagagaaagcaacagatggacctcaggcagaagcagtcagagcagcctcaagggaggctggtgcggcaccagcgtggcatcttcccagcatctgaatgttggcttgaccttcgctgtttgtgtgacctcacccaattcagtaacctcactgagcctccctttttccatctgtgcaacggtgatggtagtacttcactctgcaagcggtggaggtgagagataatataggtcaagcatttagcagttggccaagctaaagacatagctgttgtttttgttattagaaacacagcctcagccaggcacagtggctcacaccagtaattttagcactttgggaggctgaggcaggtggatcactggagctcaggagttcgacaccagcctgggcaacataatgagacctatctctacaaaaaatacaaaaattagctgggcgtggtggtgtacacccataatcccagctacactggaggcttagttgagaggttggcttgagcccaggagatggaggtttcagtgagctgtgattgtgccactgcactctagcctgggtgacagagccagactctgtctcaaaacaaaaaaacaaaaacaaacaaaaaaaaacaagaaaaaccaatacaatctcatttttcctgttaggttattcatacaaacctgttggaattttttttctttaggaatttgaatgctcatttttaagccagacagtttcaggtggaagagaatcatgaaatgctttatcatgtttttgttatttatcgctagagtaagacttaggaaagctatagaaaagagccatccagccaagaatttgaattttgtcaacttctctattacagaggtttgctcaaagcccatagagtctagatgaaccttctacctttgcccccaaaattgcttttttcttttaatatgctagatccctttgcttattccaggctgaaatgaatgttatgtagctagaagtttcctgtctgtgatcaattctaatggcttttgtgaagggaaatggttgtaaattattaccagttaattaaatgagtgtttctcttgagtcctttgtgtaggcttttatccaagcctgtttagaatcatggaacattacagctagaatatttttagacaactcttgtttcatggacaaggagacttaaccagtgatataagtacttgcctaactcctgcaaagtgatgccaaggaaaagcaaactttggctgagggtgtaggagtggctgtgctggggatccggtgggtacatcaagctaacagagtataatttctaagcagtgagcccttgtcatccatatgtcaccggtattccttggagccatcttggagtgcttttattttttacaaagtgctatcttgtaggactattctatagtaaatattacctttcctatttttataggtgaggaaattgaggtggtcagatgaccttatttagctcttagatcaactcagcagatatgtattgagtgtttacttggttcaaggaactctgcgaggctccttgggaacataatgtcagatcctgctggaatggaggttacagacttattgcaagtgatgagatatgtgtatgaaaatgtaagtaattgttcaaggtatagataagtgttaataatagttgagatgtgaattttgagaccggagggatcaatgtgaatatcaaatcctggcaccagtttcttccttctgctgctcatgaagctgtgtcatcttctgtgctcggtaacccatccaacctgtagccctaggagctcctctggggagtcttgagtaccttgcagttgtcccgaccctgggagtcattcaataaaggttcaaatgaatgaatagataggtgcggtgaagagagacaggttttccaagcagagaacacggcatgagcaaatgtgtggctgagtgatagagccaggagaggggcctgactaggacagcaggttttaaaaagtgatttttttcttctttttgtattttaactttctaaagtgacaatggaaggaagggaattttgaaaacaaagtttggatagattagtgggaaggcagcaaaaggggagcccaagtggtcctgaaagccaggtggagcagggtgttttattctgaagactctcggagaccagcggaggctttagagggggaagttgatgagatcagcactttagaaaaggctgctttgtttttggtggggtgttccatgactgcaggagaaaggatgagggaggaggcctgcagtgacagggatcctagaatgatggagggaacgaagggaaaaacagatggtcacggtgcctcaagtcggagtggctccaggattttaagcctgggaacgcagaagaacagtggttctagtgattcagtgatgaccactggaagctttaggaggaaacatgggattggagccctttaaagctggaattggccccttagagagaatctggctcaggcttcccagatggtggtccgtggtctggctatatcagagttacctacagaacttttaaaaacagcagatgcctagaccccgttcccttgccccagaaaatttaaaatcagtagatcacctgtggggtctgggaatcttatatttaatccctttctgtgattctttggcaaagaagattgaatggccttcctgatgtcgcagattggtcaggacagagcaccaggacccaggtcttctctagcattgctattactcagccacaatgtgggagataggggataagttcagatggggaggtatagtatttgaggcagcgctgattcatgtgagttcaacactgatggctctttgaggaaggggttacttggcatgagaactcaagggttagatggctctgagggtgcacgttgggaatcattcagtcaagaaatgctttcccgagtggctgctgcaaaccaggcataggatattttcagtccacttcggggactcaaaagtgtagaacagagtagtagaaacaacatagagaaccctaaaggctgaagttgtgtttatgttttcttctctgagctgttttgagtaaatttaggtgtaagttacaatgtatgggttgaaattcattattttgggtatggatgtcccgttgttctagcaccatttgttgacactgagtttttatacttttgttcatttgtctatttgtatagaagaatcacatttttttaaagaccactgttatctgggtttcaacaagggcccaggagttgttctttttaccaagagaagtggtctgtaggggagggggttagtgtgtttattgctccttgaatgactgttatagtaagaatgctaagtgtgttcatttctatgtggggctgccctagactctgacctcagctctgttctattagacactctgtcagtgcattagccaatgacataggtagcctgaggccctgatttggggagccataaaactgagaaggggagtgaatgaactgactggatttgcgatccagtgaacgctatgacctgggacaagccaaaatattgcagaaaaaaaaaatgaagcacttaggtttttatgaaggttttgagcctaaccactgcacgagcacaggatgtgggaagcaaagccttatggcagctagaaaagatgcagaggttttagttcattgcaagctcagcctgggtcactggggcttctcagagcgcccatgtattctcgctgcattggtaaagggcactgtcactgtcaagatcaacgttaatgataatcttgctcttgctggtgaaagtcaggtcacacactcagcctgacttcaccctttaatgggggtgtgaagaaattggggcatgtcaggaggaaactgactagaatggtgaaggaggagaaaatcatgtcctacatgaagttgctgagagtttgagatacccaggtctattttatttactcatttgttccacaaaccattttctgtccccttatatgcaaggtagggtctcctttggggacagggcataatgactacaacatgatgtgggttccagcagtagtcttcataacaggtgtggagttgcccacctgtctgaaagaggtctggaaaggtccccctatacaggtgggtcttgaattgatggacaaataggagttggacaagtataaaaaggaagaaaggagtttccagccagaaagatcacataccccaaatcactaggcaataagctacagatgggtaatgtgtaattttcataattttgactatattccccagtatgctgcttgatccataatgcgtttggttgctctctcagaataaatgaaataacatacctccctggagagtgtacaagaattaagagatggggatactggttgtatgcagctgcagtggtgggaagagcttaggctgaaaggtaggaaggggtttagtgtctagggctatgtgctgtgctaaagaatttggaccttatcatggacaggagaggaaacactgacggtttctaagttaggaagccacatggtcagattttaatttttgaaacatgtcactggcagcagctggaggacagtagtctggaaatagaaggcagctagaagcccgttcagggaggccagatgaaccacggcagtaggagtggagcaggggtagatccaggagagacttcgagagtggacgtgttgggatctgagagcgattcaatgtacctgctgaggagctgggcttctggcgtggcctactgggtaaatacagggctcaggagtgagaggagggccaggaaagggtggtgtcctggaagtaaggaatgagagattcatgaagaggaagatgtcaagatcagatgcggcagagagatcaactgagatgaagacagacacatctttgtatctgacagtaggacttcataaaagttgctggagctgtttcagtgctggtgggaggcagggaggcagacggcaggggatagcacggatgttagaaggcatagagggatgtgataattgttgtcgaatatttgacctattctctttggctgacaatttgaatatgttttttgagtgcaagtgatagaaacccctactcaaactggctaagacaaaaggaatttataggctcaaataacaaaaaaaaatcccaaagaatcaagcaaggcttgatctaagggtttaaatgatgttacgaagagctgttctctttctgtccctcagctctcccctctttgttggcttcattctgtagctcagtggggggacaacacaggtgccggacactcccaagtttgtgtccttccagattgaagtttagcagaagcgagatcttgtcccttccttgtagatccaggattcctagttggacctacttggatttttgtgctcaaacctgaaccagtagatgctgataccgggtagggagttgtaattacactgatagccagagagaaggaatgtgcctgccccaggccagctgtgcagagttcagtcagtgctctgatctgctaggcctgctcacatgtccactctggagttaggggcagaatcccagatgagccatttggactacatgtgagggaggagtagttctcaaataaagctcaagtgttattcccagaagctgggatggatgtactagctagagacagtgtccactggagctgtagagggcgaaactaaggtaaatgagtggaaattattggtcttgctgcgtttgtattcatagagaaagatctgtctatattgtacaggaatgaaataggccagctgttaaggtagtgaattggttgtcactggggggtatctaagcaactaccgtgaataaatgataacagcccatcagcagtgtatagaaggaacaaataacctccaaagccacatttttcaaactgtttctctgtgacacagtaaggaatacatctttacattaaaacctactgtacccttttatatgtatacaaaactacacacaaaagttgcatgaaacagtgcttttccttactacctgtagcatgttcatattttctgttctgtttttattctactttgaaatccctattgtccgctgggtgtggtggctcatgcctgtaattccagcactttgggaggctgaggtggacagatctcctgaggtcagaagtttgagaccagccttgccaacatggcgaaaccccatctctactaaaattacaaaaatcagccaggtgtggtgacatgtgcctgtagtcccagctatgtgggaggctgaggcaggagaatcacttgaacccaggaggcagagattgcagtgagccgagatggtgctactgcacaccagcctgggtgacagagcgagactctgtctcaaaaaaaaaaaaaaaaaaaaagaaagaaatccccattgtgtgcaacccactaagttgctttcatgtctctctaaaaagtttcaacctgcagtttgtaaaaccctgttctaaggtccagtgtcttaccacatctgccctaggtggacaacacttgaagaccgtgtttaaatccggcttttccaccacagtgggtgacatgggtcaaaaatgcggaaggaaacctgttctacttgtgagagctcctgcttctaactggtggaatctcctgctgtctgtcagagtagctcctgacccatcttggggtggaaaggcctttgtgggccctcagggaagtgttgaagggagtttacgggctggctgtgggctgcaggatggcggaggcggccaggcagcaactgtgcctgtgccagcagtagtttatgttgtgaggtcgaatgtatgtgtatgtatgtattctctggcaggcctttatattgaagatgagggagtgtggcttttaaaaataatgtatttttgacttgaaacaagtcaaggcagagagtggagacaattagaggctgatatcctgtttagtcatctctctagagagctctattttcagagctgttctataaaggttcacaagtggtattaagatagttaagaggatattgttaacagtagtcatgatgcaagtagctgatttgaacagggaggtgatttatagtgtggtaaccacattggtaacaggttttatgcagagaaagggtgggttgtaagaataggttgttatacaggttaagctttctgaatctgaacaaagcaggcatcttttattttgaaaaagtatataatcagggtgtggtggtgacctagggtaagtccagtgcatttttgggggctttgtcatgggtagatacaataaattttaaaaaagtaaacagtactgttaagaatctttgagattggctgggcatggtggctctcgcctgtaatcccagcactctgggaggccaaggcgggcggattgcctggtctcaggagttcaagaccagtctgggcaacatgcctctctaagccaggcatgatggcatgtgcctgtggtcccagctacttggggggctgaggcaggaaaatcacttgaacccaggtggtcgaggctacagtgagtcatgattgcagcattgaagtccagcctgggtgacagagggagactctgtcttaaaaaaaaaaaaaatctttgagatcatatgtggaggctgtgttagaaacgctaggccaatgccaggcacagtgactcacacttgtaatcccagtgacttgagaggctgaggtgggaggattgcttgagcctaagagtttgagactgggcaacatagtgagaccttgtctctacatacatacatacatacctagataagcaggcaagctggttatggtggcacatgcctatagtcctagctacttgggaggctgaggcaggagaatcgcttgaggctgggagttcaaggctgcagtgagctatgattgtgccactgcactccagcctgggagacagtgagaccctgtctcaaaaaaaaaaaaaaagagaaaaaatgctaaataatgatgccatagacttttcagattggaagagtgaggctcagtgtggtaaaggaccttgcccagggtccagaaccagctgtgacagaatcagactagagttcttggcctggtctagtaggggggctctttccactgtaccatgtgactatttgcagcttattttaaatttaatatttgaccaaaaatggtcattcgtatctctagtgaaacttctctatatgccagtcttcctcttcagatgaaaggtcaaaggcagaaatggagccacagccaaagaaagagaaaaataaaataaaaatggagccatgggcagaatctgaaaagatttatttaaggacaattgtaaattcatgtatttgagtccacaagagcctcacaatgcaaggcttagaggtgttcatggatagtgaagttagcatccggtaggaagaggggagtccgcccacctaagctagtggtgatcagaacagagccagaggtgctgttcatcctgggcgccatgctgtatggggtctttcggaaactggactatatgcagaggacgacaccatatgaaaagacttcaagctgcattgcttgcagaatgcatgtcttgatatttcagctgataggtaacttcaaggtatgttgatactcccgtgactaattaagagtagcagtccgacacagtgtctcacgcctgtaatcccagcactttgggaggctgaggcgggaggatcatttgaagtcaggagttcgagaccagcctggccaacatggtgaaaccccatctctactaaaaaatacaaaaacagatcagatgtggtggcacacgcctgtaatcccagctactcaggagactgaggcagaattgcttgaacctaggagatggaggttgcagtgagctgagatcatgccactgcactccagcctgggcaacaaagtgaaactacctctctctctcaaaaaaaaaagagtagtgaatgcaaggctcctaaacttccttccctagtgcttccttaagattgaccagactttggtggaaatatgtagcagagactctttatactttttactccataaaactaaagatttgcagttgaccaagccacatgtgttcattaccttgtatgttgccgttatttctctatttcatattcttgccatgtggtttagtaaaatgctgctcttataagccatatgcataagatatggaggtctcaaaaacaattaccaagtatgtggatgtgcctgtctatattatgacaagccaaaaatgggagagaataaaattcaagaggaaggaaactgataaaatgtggtttcttttcagtctttacagttttttgagctttcacttgtttccctgccactctactatttaatgaaagacttagatttatttgatttgtggctgtgatttacacattaggcctctctgtgatgaattgtttaaggcccacaaaaatattttaaaactaacatataatatacatttttttttctctttgtaggtggatctcgagccagaggggaaagtatttgtggtaataacccttaccgggagtttcactgaaggtaagaatgagttttgggtagtttccagaatacatgtaatcttggtttacactcagtaggaatttctatcatggacattataaaaaagagcatgttgtaagagatgcttaaaaaatcactttcataagttgggctggctagtattttgttgcccagtggtctattggttcaggttgccaaattaaatatatttgctaaatctggcaatctcacgtttcatttaacacactcaatgagtttttgtttttagccagtgtcatcgtagctgaatggtttttgcgtctttttggttcatgactgtggaactctacgtctttggttttgtgccatcttttagtttgcctgtgaatgtctatgaaagaaatttagggatccagttatcttctttataatctctatctcatttgtgacctgtaagggattctgttcttcatctgtggctaccgtactccctactcccccatccaatattttttttacttgaggtaaaatttatatgggggtgaaatgatagatcagaagtgaacaatttgaattttgacaaatgcatacaactgcataaccagcaccccaatccaagatacaggacatttccattattgtgaacatttccctgtaccctttttcaatcccctgctcccagaggcaataagtaaagtgctttatttcaccacaggttagttttacctaccctagaagttcatatacatggaattatacagtatattctcttttatgtctggtttctttcactcagcatagtttttagaagattcatatcattgtgtatatcagtatttttttcattttatttctgagtagtagtatcccattatataaatgtagcatccatttgtttacccattctcctcttggtggacttttggggtttttcctattgttgtctattatgaataatgcttttattaaccttcttacacataaatttttctggacataacactttcatttatcttggataattatataggagtggaattgctgggtaataaagtaggtgtgtgtgtaacttcagaagaaacttccagatggtttccaaagtggttttattatactcccaccagcaatgcatgagagttccaattacttcatatcctcattaacactttctatggccattgcttttcatcgtagacattctagtgggtatgaaattatatcctgtgggtaaatttgcatttccctgatggtgagtactttctcacatgcttattggtcatttgtttgtttatttgataatttccagttccagtcttttgtcctgttttctaaaattggatttgtctttctattattgatttagaggagttctttgttttctggatatgagtcctttgtgagaaataggtattgtgattactttttcccagtctgtggcttgccttttcattttcttaatggtgtctttgagcaaaagttttaaatttctatgaagttcaatttgttaatctcatcttttgtagttcatatgttttatgtcttcagagatctctctgtcataggatcactaagatattctcctgtttctttttttgttttttttttttaagaagcaaatagttttaggttttatgtttaggtctgtatgccttcttaaattgatatttgtgtgtgatgttacagaggagttgaaacattttttttcaatacacgaatgcagttgttctagcaccatttattaaaagtctcccctggccccttgaatcaccctggaacctttgttgaaaatcaattgaccatataatgtgggtctgtttctggattatctgttctgtcctgttgatctgtttgtccatctgatctctctttcttttctctacattatgccagtattacactgtctcattactgttgctttatagtgagtcttatggttacatagtatgagccctccaactccgttcttttttgtatgtttaaggttattttagctattctcagtattttgcaatttgatatcagttttagagtcagcttatatatttccagacaaaatcctgctgtattttgaattgaaattgtgttggatctatagatcagtttgaggggaattaacatcttaacaatcttgagtatctttaaacccatctgtagtcaaattagtcaattctgtagtccgtggacatggtctttgctcgtaaggcatagccagtgtgaggtttcagtagaaatcccaaggtgttttaagcccattaattttatgtcactcaagcttctaactctttctcctatgggtgggaaacagctgaaatctcagttcctatctttcagcatcctagctcttgctcctgtctggacctcttagagtttcccttgcacatgcacagtttaggaagatgtgagggcttgaagagtttacatatgtggaggttcttctttctgtggccccatctttccaggttttctcccctcaatatccagtcatctggtaggcttgaattttgtcaattctgccttcaagccaataaaactgtggttccatattgagttctatttacccaatcctgcacaacctggggaataatctggagaaaagccctacaaatgtgggtctcacctaatgcggtttccctccttcacgtgtcagattctctctagtttgtatgtgtttttggttgttctctcacatcatcaactagttgtttaaaatatattttccaggtattttaatcttttggtgggagggttggtccatatcaagctacttcaccattactaaaacctcatgaagatttttaagcatgtggcttaattgtttgtatttttggtattggcattttgcaaaattggttacactttctttgagaaatagttttctccactcctttcagccaaccattcccattcatatgggtgaattgttttaatgttaaagtttttcaatatatcgtctgcattattaaatcttgtctttttgcacaaacctggatttagcagaaacctagaatacttgacataaaaaaaaaaactgttcaggttacaatttgggggggtgttctgcctgctccaaggtctttttgctttgcttggtatcttttatgtacagagaaaaatgagtctgttcctagcctagtcaaataaaatcaatgtagtattatggaacattgttgataaaacattctcatcatgcacgtagaacatggatcagctatggtagaaagaaacacaacagtgagaaagaggtcaggaggaggagtgggtaagattctctctcattcgagctgaatcaactctctgcattaagttacaagggactggcgaagtaaagcaatgcatgttagaccaggtctgattgtgccataatcattacatgacttttttagagccatgccaactctctaggactaaatgctcaccaaatacatctgattgttctcattgtatttatttcttagtttcagtgataataagaatgaaatggtaagtcatactagaggtgagttcttactaggtcattgcagttgtgtctttcagagctgaccctgggtaaaattgtgagatgagttgagtttatctttggtaattccatctttgctttaagctagtcctttgtctctgcctacagttgtcccttactgcagcaagaagcccagtggtccctgtccagaaagagttgctgataaggaaaacagttaattcataggctaattcacactacagtgatagagattgatgtcatagtactctattcctcttaggtgtgtttgcatattttaaaagatgctggaagagctgctttatccatgagaaatagacttttaatgctaaaattttaatattgaaatctacgggtggggtatattttaggaaccccatatctgttctctgtgtctctgtgcgtgcattgctttttcattttggctcctagactggggctcagcttgagcttgcacgttgctgctgcctttaaaacaccgctcccttgtcacatgcagaggacgtgatggctgcctgtctgtgttaagtaagaaggaaatggagcccccccccgcatttgcctgccacagctgtggcagcaacctggacctggcactgagagcatgtccctagcttgacctcgctcctggaagccaccttagattatgtccagccataatatgacaggttggctggtgcaacatttggagctctagttcccatcttggatactgaaagccttcatggaaaagcagtgtaaggtcaggcctgcccagtgtgttttggactgtgaaaagggcattgtcctaggatcctggaggcactgtcaaagctcaggaaatgttggctgatcctcagtctgtctcacatggttgtcttgaaggtcagatgatataatatatggggaagtgctttgcaaactataaagtactatatgaaggtatgttagtgggattttcatttccatgttcctattgtcacagcaaggagatcccagtcatttcccctacccctgccctgggaccatcttgtatactcagcaggttcgttttatcttaacattgactttatggccaggcgtggtgtctcacacctgtaatcccagcactttgggaggctgaggcaggcagattgcttgagctcaggagtttgagaccggcctgggcaacatggtgaaacaccatctctacaaaaaatacaaaaattaaccaggtgtggtggtgcacacttgtagtctcagctacttgggaggctgaggtgggaggattgcctgagcctgggaagtggaggttgcagtgagctgagatagtgccactgcactccagcttgggtgacagagtgaaaccttgtttcagaaaaaaaaaaaaaaaaagaaaagaaaagactttattttatacaagaagcctcaagaatttcatggacagtggctagcataatgttggcttatctccatgcctgttttcatgatctcctatgcgggttctgccataagctcagattctataatctcaaagcactcctttaaaaaaaattacttaaattggacggtggtctgtgatatacaaggctggtattggggctactgactgctacttacctcattttttaatttttcattaattatactgaattagctcaggcaaaactattttgttaaatgtaagacatgattgagaagtgacataagaaaaacctgctgggtgcagacctgtaatcacatcatagatgctggagagataaagatgaacgagacatagacactctcacaggagctcataggagggaaggcagatacatattatgtatgcaatgcagggagccaggtcccatggcaggaataagcccagtgcatagtgttggcacatgggactacataatcaatttggccaggagggtttagagaaagcttttctggggaggtgatgtttaaaacaagtctgaatgataaataggactgtgcctagaagggaacagagttcaagagagggagacagtttgtacaagaaacgaaaaggagtgtggaggtgctaaaggtagggggtgtggaggtgctgaagattggggagtgggatggggggatgtggccagagatttcggagggcttatgtgtgggcttgcccaggacaggctcagtttgttggttacaccagaataattatacaacagcgccactgttcactttcaaaagggtgccaggtcagacaataaattgcatgttcacaccacttgtaggctaatagaaatgataagataccagtgaagggttttaagcagagatctgatttggtggcagtaagttcaagggtggggaaggggtgttagttgataagactagatctaaggtgtggagaaccattatagagacttggaaggttgtctcagggcaagattattagggcctgaattaggttggaatatgtaggggtggagaggagggggacagctttgagagatgtctgtgtagtaaaatcagtaggaattagcaatccactggatgtggaggatgaagaaagaggagtctcagatgatgctcagatggtgcctcagagtcatttaccagggtagaaactgggagaagatgatgaatccagctttggacaagtggagtttgaggtgcttgtgggaaatctaagttgcaatgtctgggagaaattggaaataagattccggagtttggcaagatgcctgggcctgagatgtagctccaggtgccaggtggaagacaggcacatggataaagaggcccattgagaagatttagcaagaaaaccagcaaggctgaccagcagcagaactctgtggagcatcaacatttaagtactttggctcatgaattatagtttatcaaaccaaccaaactatgctgaaggtttacttaatgaacacccattttgctaagatattacttgtgaaatagtatctgagtgcttgctgtatgccagggactgtttcaccagattgtttaccgtcttccaaattggcaccaaaatgtttgataatgaagttagaagaaagaacagaacacaaaaggctttgaaaagtaatgtttgcattggtggtaacagtggtttcttcaaagtttgatgatacaatgtgctgtgtgaaggtttatgcctaatgcgggggtaaaaagaacagatgaacctactcaaaacctgcagtgaggggtcttcactgaacttagatagagcaagaaaaactcttttacattcattgctttgtggaagtctctcacagagctcaaggcgtataaaattatcaactggatcagaaacccctcaccactgttcatcttgttaaaggtgtcactctgcatctgtgcagaattcccctaggcactgaggcagaagtagaagtgatttattattttgaaaaagctgcctaatgtcaatctttattctaactaagccttcctgaagctaagaactggatctgaagtctgatcaaattgaaatttattatagtgatgaaacagccctggatttttaatgcagccttcagattccatcattgttgccatgtgtgtgattgtcactatgttggactaatttttgtctggaagagtggagtagcaaaaaaaagaatagattgaaacaatggaaactgaggaaaatgcattaaactaaattcataactgctttaattggaagagaaacaacagaaagaaattaaagtatgacatcatcttatgtgaggacaaaaagatgtagctggattattatgctactaagaaatatggtgtaagattttacgatttgaagagaacatagtttgcagtaaatgaagtttgcttggactcagggaaccacaaacttaaatggttggcccacaaataaaaaaccagacatgatgtgtctcctgatggaagcccacacaacatcgtgatcttgccaaaaagtagaggtagttttgcccaaaactcaagccttagaccagtcaggcttccagatccaaccaccagttaagaggaaatataggggacagaggagcattttaagttacaccatgggatgtaatcagcaaaatccagactgtggaaaaattttacaggaaaagagacttggtttcttctaccaaacattggaagaaaaaagtaaaggaaagagaaccaaagtaacaagagagaggcatattaatcatttgcaatatatgggccacattttatcccaattcaaacacaaattataaaagaaacattaactcccaggaggcaagtgaagaaatggaaaccgtgcctggatctgtgaggatattacagaattgttgatgttatttaggtgtgattgtggtattgtggttacttaaaacaaaaagaacatccattagaaatacacttaaaaatatttactgatgatatgatatgacatctgggctttacttcagaataatgcagaggtgggcagaggagatgggatagaattgaaacccgattagccatgagttgtttactgaagctgggtgatgattatatgttgcatgtggtttattatagtattctacttttgcatgtatttgaaattttcattaataagttaaaaagtaaaataaaatgacaaatttcaagaatatctgcttcttaaacaaaaaccagaatctgggttatgacatcaaaatgatgcttgaacttgaacattttacctctttccacttacaaattaaagctggagggttttttaatgtatatgttttatccatgattctcagtttttatgtatgatgaaaaagtaagttaaaaattttaaatgactaaagtactgtgcttcagaaagacttttttaaattgctaaataaataataagctgtgagtcaaaaactgcaggtaggaacaggtgagtaagataattccttttgttccgtcataaagttctcactcacagtgaatgacaagtagattatctcctactaataattacataacattttgcagttgcgaagtttaattttaaggtagtttcctaaaagaataaagtaaatcagaaggattaatggtagaagtatctttataaagatagtaagaaaaaggttcttagtgtacttgtttcttccccagagttcccaaggcaaacataaaggtattctattttgtacaagtttttggggaaggaaaacttcctcaaaaacaaaaccctgacaaagaacctgttatttgtgaatttgaagcttgtttagaaaaaaaaggccttttacttctgctaaaaccttgaattgttccttatttgagacatttaatatgtaacttggaaaagatatacatttgtcctggggagacaatggaaaggcacttgaattttggcatctgctttttctctctactaaggcagtgcacaatggtgcagaataagagtctgatctttttctttttgtcccattgcctcagtttttagctcacatttcttgtctcaagcccactggtttacaaataattacgttctctgctaagtcatgtggcacatggaccatcaaggcagatgaagcatgtgttactgctttgaagctgcagcccacagttaccccctgtatcaacacttcagatgcatgtcatttttaaagagaaaaagtgatttctggtggtagttgatttatagcattcctttctcagatttcaagcctggtgacaagttgttgatttaatttttttaaaatgtagctttaaaaaaatttattcttttggcatattagcttgaagaatgagtgaccactttagtttttgtgtttgttttttgctggtctaagcaattgtggctatcaggttgaagacagggtaggagagaaagaaaggaattgagggaatgggagaataggaactggaaacgggcgaatgatgtttttaaaggattgagactaattgtcccttgtcatagatgctctctcgtcttctccataatatctagctcatttgttgaatgccttctgaggaccagacactggagttggcttgtaatttagcaaatagcaatgggagccctcattttattttctggtagcaggataaactcttacctagtaactgagtacctctacgtgttcataccatgctatatattattccattttctctctataacaaatttctgaggctgttgtaattctcagtatgcaaatggtgaaccagactcagagacgctaatttactatggtctttcctggatagtaagtgccagagcccagacacaagctcagattgcaatgctgaggtccaagatctttctacaccatccagctatctgaggagttgggggtgggggggcagcattttagtttttttctttattccatcttagaggaaaactgtcctcaggatagcataatcccaccctccagagagtcttgtcttttgggatgatgtctttttgcaaggcttcccttgagttcctcctccttaaactggaggaccaacattcacccaggaaaggtgcagcattctcagacatcaggcatggatgggccagaaagctctaggcagattgagtttaagatttgctcaggttttgttgtcagtaggttctcttaatgtacatcttaagctagaactcagaagatgaaaatacaatcagtgagttcagcataggtatgatagctctatttgcctttttataccccagtcatcattggcttcactgtacctacttctcttattttgactgactgtaagtgaaaaaactaggtggtggctttgttggaaattttaaaattcattctcaaagtgtgatcctgcagacttctgagagttccagagacattttcaggaagtctgcagttccaaactgttttccttataatacgaagattttattcatccttttttccccactgtgttgacatttgccccaatggtgcaaaagagaaatggtgggtaaaagcatggcaccaaactataaagtcatcattgtattcttgatggccacgtagttgcaggaggaagaaatctagtttcacttaagaatgtctttgatggaacagtaaacattattcatgttattaaaggtcaatccttgactatatacctttgtaacattctgtgtgacaaaatgggaaatatgctaaaagcattcctgcttcatactgaaatactgttgtgtctcaaggaaaagcacttgtgtgattgagttgttagctgagctagccactttttgcatggaacaccatttttactttgaaagaatgacagacaaaccatactgtggaactggcagatttttcagacattgtctaaaaaacgaatgaactgcgcctgttacttcagggaaaacaactgtaagtatttggtgccagtgataaaattagagccttcaaaacataattcgaattttggaaagtttatatccaccattgtgagcttgacaacttcccagtacttattcttttctcatgagtttgttgttattaacgattgtaatttttaaaaattgtgttatgagatatgtcaacatttagaagatgacttccaatgattcagtgaacacgtattttcacaatggccagtacgagatgttataaaatcatttatgggtcaaggatctcttgaaagcgtaaggtagactcatgtatattaatttaaagtatgaaaagttcattgatacagttttatattgcaaccaacttttgagaaactacgccttgtttacttttgtgtggtattaaagaagaatatctgcaattatctgaaaaatctattaaaattatatttttaaattactctgtgtgaggctggactgtattcatgtacttcaactagaacaacattacagtggcttgaatacagaagcagatatgagaatctagctgtcaggctgggcgcagtggctcacgcctgtaatcccagcactttgggaggccgaggcgggcagatcacgaggtcaggagatcaagaccatcctggccaacatggtgaaaccccgtctctactaaaaatacaaaaaaaaattagctgggtgtggtggtgcgtgcctgtaatcccagctactcgggaggctgaggcaggagaatcacttgaaccagggagtcagaggttgcagtgagccaatattgtgccactgcactccagcctggtgacagagcgaaactctgtctcaaaaaaaaagaaaaaaagaaaaaagaaagaatctagctgtctttttttttaattaattaattaatttatttattttatttttatttattattattagactttaagttttagggtacatgtgcacaatgtgcaggttagttacatatatatacatgtgccatgctggtgcgctgcacccactaactcatcctctagcattaggtatatctcccaatgctatccctcccgcctccccactagctgtcttcttttaagtcagacattaaagagatttgcaaattgtaaaataatgccactctctctatctttggggggatgtttgaaaatgtagttatattttattaaaatgtgtatactaacatgtaatggaattgttattgtttttaataaatgataaatatttttaaatgtctccatttaaatttctaatttgacaaatatcagtagaatccattcaaaggggtacttggaccaaaaaattttacaatttctaggttatttttttcttacattctttcaaaagcccagtgctttaaattttaatgaccacagggagaaggaactgacacatatttgtgtatgttataatcagaaaaaaatatgtacagttaggtgatacaggtgacagaattgtcatttttttgaaactttctttttgtttctgattatttctgctgtgcagtgtactttttcagccagtttttgttataagcctgttctcataaaaataaggtcaggaagtgacaccaaaacaactcagaagcctgtggtggtttctaactttagagctgcctgttacagatagcttcatgctaaacctttgcttgatttgagcagaacaaggcagtcacgatacttctgaacaagtgatcagtgctgtgagcactaaaagctgaacctcaaaaacagctcaagatccatggacagagcctcaggagacacatttctatggcactcgcttactgactagcattctccttttctaatcaaggttcttgaaaaacagaggctgactcgtttgttaatttttttcaagctttattgttttttccttgaaattatagtgatgtggtattctctctatggaactgaggtttgggtaaaacaagaatgatttaattttttgatagaaaagttaattgctccagtgtctgttttcattatacttccattttatttccagcaaccccttatctctctgctctctttgtttcaaatgaacaagacagtagagtttgttttccaggccacttgtgttggtaacccttttcctaagctttccctaataacaccctgtgtcagtggacaggtagtaggtaggaagacctgcttcttcccttctaccgtgaaactcgtcttcagcatcattctttcatcctgatggctgagagttgtgttctggtctcaagtcagcagtggataacccactgcatgaagttgatggggagtgtgggcatggacaacagtggcctgaggttgcagatacattctttgtatatgtaagagaccaccttatattttgtaagtggaaacttagttctcataggattttggagaaaatcagttgcctcctctaggaattttcatttgtttacaaaatgtcctgggtcaagcaatacttttatgttatccccacttaggtttagtggatccatccatccatccatccacccacccacccacccacagagtatttatgtagaaaactatgtaatggatgtatatattcatgcatgtgtgtatgcatgtacttagtaatgacactggtttgttctcacagaactcaaaatttggtgtgtatgtggagacataaacaattagaaaggttaacataatatgtacctccacaggtggtacatgctatggagaaaataaaacagagtaagaggacagagatgggtcctatgtgtatgctgttttgttcaaatcagatggtcagggaaggcccctctgatgaggtatcatttgagccagaggtctgaagaaagggagggagtggaccttgagtctgtctattgggatggggaacaggaagtgcaaatactgtaagggttgcagcagggagaggagtgtagctgggccttgaggtcaggggaggtgcccacatggttgttggcacaactttggtgccctgctaatgtcactttcctcttcaagaatacccttgtcacttaagtgatgttcacttatgcttgctgctggcttaccatttggctcactgagcacgtcttttcccctttggttaggggcttgaagagcacagcatcacatctatttatgacttgatgtattttgctaatgcggaaaccattccaaattcatgataacaactttctccagttctgtgaattccctcatggtttctttttgttctaagccaaattaggagccaatccccagcttaataagcattaaaagttcaaattgactgtctggaaatctataacaagtccatgcactcctaaatataattagctgtaattcagttctagttatggattattaagaaattactcttatttgagcacctcactcatcaaaaataaagtcagaaaatttaggcgcagctggaatcttctgctcttttttttttttttgagacggagtctcactcttgtcgcccaggctggagtgcagtggcgcaatctcagctcactgcaacctccacctcccgggttcaagcgattctgctgcctcagcctcctgagtagctgggattacaggcgcgcagcaccacgcccagctaatttttgtatttttagtagagatggggcttcaccatgttggccaggctggtctcgaactcctgatctcaggtgatcggcaccccttggcctcccagagtgctgggattataggtgagcgccaccatgcctggccaaatcttctattcttgaacttgtggtgaactatcatttgttgaggagttttaataagtgttagtgatagatctctactaaataactggagaggtaagtaggttggagctcagtcttggtaccttatagggacttagtatatagcttttggaaagttaattcttactgaattttgatgatacttcttgtttcatgtaaatgtggatgcttccgttatgtgagtcctaagatttgggatttaccaagtactgagaataggaccttcaaaaaatatgaaatgccaagaggatctgttttaaagcaatggaattatttgagaattttgaaaaatacagattctcaggacccagtctgaatgagaatctctggggaagaggccaaggaaacagaattcaggtaagcaccttggctgcttccagtggttggccaatttggatatccctgttgtgtcctaaattatacctaatttgattaaagttttggtggctgggaggtttgctagttgaaaaacacatacaggaaaaaaaaaatgtacaggggagtgtattgctttggtgtagtcgtttaagagttgacaaaaaccccaaatgtattcttttaagaaccttttaaaatgctgcgacaagggtcaggttacagtttttgcgttgttaggggggcacatgagactcagcagctacaggccttgttaatgtctgcaaacactcagtgctaatgtggagactcaagccaggcttgaaagtgataaaatcaggatgggaatgttggctttgctgcccatcaactgttagactggagacaagttacaggcatttccttttttgtggggtaactgagaccaggaaaagacaattgaaagtggttccagttaaaatgggagccacagttttttcgtagtatatatctttaaaaaggtttgattaatactgttcttaaaatgacaacaacaattgtgaaaggaaatttcattcatcttatatttatcagtgtttgggttccagtggcacctgtgtgctaattcttagaaccaagaatggatcacataactcagtaggtatttctctgactgatttgaaagcatgataacagcttccacttcacgctgactttctcagcattgtgccgagcagagttatttttgcaaaaaggtttgaagatttcatcagtttttccagtagacaggcatggctccaccagtgttggtctcctctttgttggtgatgaactcgacatccgagatttactctgtcaggggtttgctgtgattggagtagtgtattagtcaatttcatgacttcccgcatccactacaagatctcactttttgatccggggctgatttttgtggcacagtttgtattatgggatgtatctgctactcagaaagggagaacaacagccatttacatggtgggcaggaatagggtagttttaagcaaggaggggtgttagagtagggactgatttaaaagtggtcattctgttcatcagagactattctcatgctctgaccatttagtttatctaaatcttaggattatagggattttaataattaatactcagatgatgagttcaggtgtctctgtaaaatgaataatgcatttattattaagtctaaataccctaccattctgaaggcgggactgcatgtctaataccaccatcttatctaatggttccttgggatccacccaggcacaggagaacataacaatgcttggaggggttctaacctaggacttcagaaagaattcatcgacaaagactgaagcttaactctaggagggaactgtattgatttccttaaacatactaaggaatggcaattcagtaggactctgctgtccccttccagcccctcctcagtgaggacctggtggggacactcagccagagtgtgaaaggaacagcttcagggccctgctcaaatgtgtctgggagctgtcactttttccatgcctctttctcgggtgttggacgtcctcatttgagacttttaattcctacattcttggtctttgcctctctgaatgcttgaaggtcacacttaggtacagcctttatagaaccttttgtctgatatgcagaatattgactgcatgctggctgtgtctgtctgtctgtgcctctgtctttctctagccagggattacagactgcccatgggctgaaatcagcctgcagaccagttttgctttgtatgcagcatggaataatgcttttgaggttttccaacttgagctcttcagacagggcagggttctccagtgtcccacatcccctgttgtctgaatttcctctgaattcacacctctatgcctccttctctggcctcagtttgcaatcctgaatctgagcatttgtcccatgtgtttactgggcagtgtgcagtggccttgggggagactttgaaacatgttttagtgagaaggatcacttctttactgaagtcaaaactgaaaatactttcccttcgtggaataccatacaggcgtctctcttgcactgttcagcatcccatcctactcagtggcattcccactctaggttttgggtagtacagagtctcactgctttggggagcttttgggggcatggtggagagagaaatctcttcattttttcaatttgtttggatcagaagattagcctgctttcaggtaataggtctacttttagtgatgcctacagttccctgaatgccccccaaaagttaatttctggtgtcactgttaatccttacagtcaaaatttcctgggaattgctattggggatctgtagctgtgctggagataggggcatgggtaggggaggaccatcagttttggatcagatggacttggttctgctgcctgtccttccttgctgcgtgaccttaagcaatggttgccttatgtgtaaaacaaggggctaatgatacctaaacccagggttgctgcaaaggttacatgagcttatgcacacaagcacacacccacaaagtgtagcattaggatctgatgcagactatgttcccacccacttgggaaggaaatccgtgccccatttacttccatgtacttggtggtgaatcatctaaaagatactggaaaaatgtgattacagatgccccctttctcggccattgcttcaaatcctagacagctattgaacgtcaccggatagacgtcatattctaggagggtgtcaagtacatacaggtctgtgtttctatgtgctttttgtaggagctatcaactataaagctgtgggtatgagaatttcagggcaaggtcgggaaggtgtaggagggattcactaactctggggaaagtgtgtgctgctttgtcagtttcctgttcgctaggccacagggaatatgttggctctttctgaatctgcccaccagagccaatgtcataccttttcccaagccactgcttgagggtccagctaattgatgccaccgcattgcctctcctggtgaggaccgactgtgccatgggggtggtggctgtgggcgtagacagccctgttcatgggcatgcacactgccatgggtgctccatgggaatgctggtagatagcagaacatggatcaggagttctactctccaggatagcatgacccagccatgggctcaaggaattgctctttgggatatgtttgaaactcatcccctactctggccgattctttcagtacagatacagaaatgcaatgagaaccttctccctgtagttctgttaagataaatgagtggtagtggctcatacctgtaatcctaatactctgggaggctgaagcaggaggattgcttgagcccaggagttcaagaccagctgggcaacatagtgagatgccaggcatctccaccaaaaaaagaaaaaaaaatccaggcatggtggtgtgcacctgtattcccagttacttgggaggcaagaagattgcctgaacccagaggtttgaggctgcagtgagccatgattgtgccactgtgctccaacctgagtaacatgagtgacacagtgagaccctgtctcaaaaaaaaaaaaaaaaaaaaaaaaagagttaatgtttataaggtgtttctaggtcccaggaaaaagaaatgttttaaaagtagattgtatatgctacttgttattaatttcttatctctagagattgaatggtaagagccagggccagcattgtacattgtcaggcagcattgcccctgtcgtctgccttttcctcctgttactaggagcttgttaggtttggtcaccagcctgatgacctgatcaaatgttgcctgtcaacttggagtgactgtggttgtttattttgttatttattcaccaataaattgagttggttcactctgtgtatttttacagcatttggccttttcccaaatatttgccttagtttattaaattagcttctcagttataagttaaagtgtgtgttgacttttatgattttaattttacaggcttggttggctttgaatgaccagatggcatctcttgagtctgtgagcaggttttgtttcacttaggacttcacccccaccccgttcttaaaaatggtgatatgttaaatccactttaaatctagtatttgattattaattaaaatatctcttatgcattttgaaggtaaaattacaattttgttccatgtgaaatgggagcatgtgttgacaaaccgttgattaacttgagtggatttgggttaatctttttactctgctccatgctgcctgcctgtagggtaatataaatccgttgggctgttgctaggctcagctgcttctgagtagtttgacaggtttcatcctgttaaaggctctttttctctaggccctagattctaggggtattggggtgatgctggtgaatggagtctaactgcgtatttgcttcttgcttccagcaccaattgtggccaatggagtgaggcaaagagcactggtgtggctaaattactccttctgcagtccccagcatattattggatgctctttttccctctcccagagctttccttatcttctaatttcaaagataagcgttacctgtaggcaacgcacccgacctctatccctgttgtggtagctacacataaacatagccatcatggccaggtcccttgggtggtcacatttcctactgttctgatcaccttccactatcaacactgaccagtgtgcctggctaattccaaaccgtgcgaatggctgtgttgcctgggctcatgaagcctgtcaggaagagctgtggacagatgatttttgaaaatgagggtgattgcaaagggacagaaagtatgagacatcgtggatgctgtcttttccttaggccttcagtcatttgaagtcaggacttccaagcctggatatccagtgggcttctggggaaagtggatcagagctcagcaaggattgagccccagcgacttccaacaaaccatcccatccaacagaggctgtcttcactatgcagacctttgagccacctcagaagacaccagccttcatgctcatcctttacacgtctctttggttcatgtaccagtcccttgtcctcctcggtgaccaagataggaatggtgtcaacggatgattatggcatgacatagagtaactctttgcataaaagagtggacagggcaggcacttaacacttgaggacccctgttccagtcagccacagatgtatttattaggccttaaactgatgggatggttcttggatttttcagtttaaaacctatagggggactttacttttggccaaatgctgaaacaagtattggatttatcttcccatgtgaaaaacaaaatatggacaaaataaatgaaacaatgatttgtaagacactggatacatcagacaacaaaggccaatgattcctgagagataggaaacaaatgaggtgagacctctgagttttttcaaactgccttaaaagagtttccaagctatagcacaggaaaagggaaccatgtggagcccagcagactccctgagttgaggattggatctgagagtccagagagactaaggccactagagatcatgggatacagtactagagaagagacagctgcaccaagacataactctggaggtgtacaaagttctgagaactgatcagtgtaaagaagctgcctgagtctggggaaagcaccattcaaaaggagcaaagataactgtttctggtgctcacacggggccagaaatagtgcttctgccaccaaccagactggaaaacttcaagagtcatggagcattgggtagagtagagtacatagaagggccttgcttgcttagtggggaataactaacccaactgagcatggctttaaatctaaaaagcaagatctgatagggccgaactatttctgagtaacttagctgtgtcccagatcaaagctgattttatagaaatacaaaactatcactcaataggcaaaaaccagtgtctggcatccaaccaaaaattaccagatgtacaaagaagcaagaaagtacaacccataatgggagcaaatcaaccaatcaaaactgacccagaattaacgcagatgttacaattagcagataaggacattaaaatggttattataactatattccatatgttaagcagaaacatacttgtctttaaaaagacaagtagaaaagtgaaaatggagaaaataaacaaaaagaccccaattggatttgaaacatgggttgcttttctatgactccatccttatgttacttcaaccgaacccatatgacctgaacctggcccctgctaatttatctgaaccataagctcctacttatcttctcagtgctctctctagccaggactgtggggtcatccctgcagtgctaactcagtgatgcccaggggtcacttgaccctttaatcttccttcatgcctgctgtgccaatgcctgacctgagcaatcatctcacagatgattggatgttgctggctggacccatggcatataaatttttggcattaagcagatacttagcaaaaacggaagcattcttcttgtgttggtttctcagcaattctaaaacttttacacctgaaagccccttcccactttttttcccactcatattctctttctcttactctgctgaaaaaatcctgcaagatctgccatctttatgtgcctgctgtccctcagtgtggccatctcttttcttcctttctgctggctgccagggaacctctcttcctacagaagctacaccttttcctgggtggatccatcctctctggcctcttaacacattctcacatgttcatttacctggactgaccacactttgtttagtcccttgctctcctttggctgcttctcctgtggtgatttaaacagaaaaaaaaaattcttcacctgatcatagtatcctcagctaccatcctatttctttcccccctttgcagccaactatcttgacaaacgttttgtatctgcgtctcaccaccaactttctactcagctcctgcttcgctcttgcccagacactttctaattacaaagtgtacctctcctttctctgcaatctttcgtgtgaccgtgatgctgcatttggttctgtttcatgttctccctttgggcacctcaaacgactgcaaacccttggcctctattctgagtggtggtccccagcaccccagctccttttctcccattcccttcagtgatgacaaccttcatcatttctttttaagcgccccccccccgccccgcccatgtaccctgtgcctatattctaagcaagtggcttagatcctacttaatctggaaaattgcatcaggtgtgagtgacttccctcaactacactgactttatctgcattcccacccatcctgagtccttagcctctgttccagaggatagttgtcattgcttttgctaaagacctgtgcttcctcacgaactttgcttccctttctttaacttctccatttccttctctcattttctttctctgatctgtaaacatggccaggcctcctcctcctaaaaatctccttgggtactttctaatttgtctcctttttttcatccggatatgttgagagtacagcctacatactaattcttcacttcattgccttctattttctcttccagccgctacttaagctctctggcttccctcaccactattctgctcaagtagcgcttgataaggtcactgagggcatctatattgccaaatccagtaagcagtttccaggccccatcttattggacatctctgttgtgtttggcagtgctcatcactcttccacctcagagcccacactttttgacttctgcaactctgaagtctggatcatcccattcttcccttctcttcctttctcgtatctttgggcttctctaccaccctctgcagtttgtatccttgggggatccatcttcagcccgccgctgtccccattcacatctctggtcatctgtttcagtctgggatttcactctgcctgttgctctccactcctccgtctatatctgcagcccaggtctctcccctgagttccagcttcctgtgtccagtcgtgtgctgggcactctcaatgggcttcatttaatcttttttttttttttttgaaatggagtctcactctgtcacccaggctggagtgtagtggtgtgaccttggctcactacatcctccgcctcccaggttcaagctactcttctgtctcagcctccctggtagctgggattacaggtgcccaccctcatgcccagctaatttttgtatttttgatagagtcgaggtttcaccagattggtcaggctggtcttaaactcctgaccccaagtgatctgcctgcctcagtctcccaaagtgctaggattacaggcatgagccactgtgcccggcatgggcttcatttattcttttttttttttttttgagatggagtctcactctgttgcccaggctgcactggctaagttttttgtatatttagtagagacggggtttcatcatgctggctgggctggtcttgaactcctaacctcgtgatccgcctgcctcagcctcccaaagtgctgggattacaggcatgagccactgtgcctggcccatttaatctttcagttagcaaacatgcatcttctgtccccacactcttgaatatgaaatgttgaatataatgaataaaagcattccccctctgccaagcaccatactatcctgattctgtttctatccctttgtccttcctctgtttccttcctgggctcttgtgttcttcactatcttagaagtgggcgcccattctcatagggcctttcatctgcagggacactctcagtggttaccttcaggccccatttttcctgtgagccctggttctgtgctgtctttcaaactcctctggctcagaccccagttgtcattttcctcccatatcagcactgtcttcactccatttctgtcattgccttcttctgaacactgaagcttgaacacacacattttccccacctacacattttgtctttcctactaacttaaaagcaatttgaagtgtgtgttctattgtgtacctgtgcacctctccctccccaacatggtgatatgtgagggtataaagtgaggcaaagaaaaggcaaaaagatgaagttcctgtcatttcccattttaacaagagttgcagagggtccccctaccccccatctcccacagcaactttgacattaagtgatcacttcaggggtggtatttgtggaagaggtttcacccacacttccatttccttaggagagctgaggaagggggttagccattgaaggatgaagatatgtaatcaatttaatgaggactgtcatttggggattttacaggaatttttgacagcatttactttaggctacactatgtggaatcttcctttccctttgggtagtggatcccttaatgccatatttgtctggttccatatctttcctgtcaccttcagttttttaaaaaaattgtgataaaatgcacataaaaatctaccttctgaaccatttgtaagtgtatagtccagtggtattaggtacactcacattattgtaaaaccatcaccaccatccatctccagaattcttttcatattgcaaaactgaaattctatacccattgaatactaattctccattccctctccctccagcccttagcaaacaccattctgctttctgtctctatagatttgactactctaagtacctcctataagtggaatcatacagtctttatccttttgtgattggcttgttttgctttgcataatgtcttcagggttcacccgtgtggtagcatgtgtcaagattcccctcccttgcctcttttttcttttcttttcttttctttttttttttttttttttttgagacggggtgtcactgtcaccctggttggtgcagtggcatgatcttggctcactgcaacctctgccccgcccccgggctcaagccatcctcccacccagcttcctgagtagctgggactacaggtgtgcaccaccaagcccagctaatttttgtattttttgtagagacaggattttgctatttgcccaggctagtcttgaactcctgggctcaagtgatccactggcctctgcctcccaaagtgctggcattacaggtgtaagccaccatgcccagtcaatttcctccctttttaaggctgaataatatcccattgttagtatagatcacatgttgtttgtttattcttccatcagtgggtgcttgggttattcactttcagttttaaaacaatctcttgttagtatttaatattggattttgtttatgttgaaaactttggtctcaaactcagttgagatctccttggcatatatctcccagcttggctcagctgctgggcgtgaagaagatgatgaggccttgtcctgagatacaacaccccctaacctcttcccagctctccctcctctctctttcctctccccacccctgcttctctctcctgtccctttccccctcccccaagagtgatagtaagtaaactcacattgtggcaacacccgttggagtctcctgcccttagctttctgttggggagagaatagtctgccacctgaaacactgcatgccctctaaggccaacacccctttcctttctcagactcattctgactttgaggaagtagtccagagtagtggaagggcttagcggtcctgtctccaggaagcccttatgggaggaggctctcagaacttaaattgtggggtactttgtgcctttgtcctcaggtgaaattctgggacaacaggaaaattgccacccaacattgttttaacacttaaaaattagaggggacctagactgatatgatatttataagggctgtacataggagccctgaaattctgtcttctctctccatccctttttcagtatccttcatacttgaagaggaggggttggggtccagtatagaatgggattttaaagtccctttattaatcattatttccagaggcgagactgctccttaaggatagacgtctttgaaagggcttccttcctgttgtctggacccaattgctttaccacatagaaccgtcattactttccctctttttggcggtcttttttgagctctcattgttggtctaactgaaagcacctgatttctagggctttaactgaaagcacctgatttctagggctgtcagtgcagcacagcagagactgctcttcaaatggtctggcttagtggtttctaacccttttgattaagaagaccactgctaaatttcccagagcctcacctaagtgttgtactttgtgtctcttttgactaatcatatacttaatgacaaaaatttggtaaattagtgaagcctttaattgggcatatttttaatttatgaaagtatatcggcacttgtgcatatgttaggcttatttttcattcggagacagtgcttggtgcattgtagatttatggttccttataaggagtcctccttctgtctttgaagtcttagacacacagcttgggaatggtcctaatagactgtttcctttaaaaaaagaaagaaagaggagcctgtagtgtgattgaatctctatctgacaaggcttaacagtctaaatgaaaacatctaggttgaaagtgtgtttgtgtttgcagtacatttgtgtatgagggtttttgtggatgttttcaaggactgatgaggaagccacacatgggttatttctctactgaaagggtagaggccaggtcatctgacctactgattaaacttgaaaagggagagtgtgtcttttgccatctcaaaggccagctgtttattgaatttctccaccctgcaattgtcttacatacggaatagttcctggagaaagatctaacatctgcgcaggtctatcctgttctgtggctgtgtttactaaagtgagttctgcgcttacattcacacactgcaaactgcacgtacgatgtaagtgtacttgtcatgtagagttttaccaaaactatattagattatactctgaagcatgttttgcatctgacaggtcgagctcattcattcagtattaagtccctcatgggccaggctctagcctgtgtcctggtgataaggaggtgaatgtgacagaattcctattttcaataaactcactgtctggagaggaaggtgatcatcaaaataaattttagcacgatgtgtaatgattaatgcacagaggatctttggaatctccaggaagaaggcctgacaacctctggatgaaggatgggatggaagataaagtggacttagagagatgtatcgtgtggctctgtctttatccctggaaaggttagcctaagcatggggtaggtgctggtttcttttgctgagaaatgtctcagagaacctcagagtagcaggaggcctttgtgatagattggccagcagtttttatttccctgacctttcagcatcaaaaagtgccagttggaccctgggttttgccttggaattagtaaatagatagttcaacagcaatggttgaaaagcctcttggagtctgtcccatgagagtaaggatgttaattctgaagcctgggccattttccatcctgggaattatactctgccccttcctaaattcccattgtggtttcaaatgaagaggccattgttcactttccttcctaaaagaagcaatatatttaacttctggctctttgcctgactgatggcgagttgatctctctgaagccaacacccgtggcttcctatcaagagaaacactctgcctccatctgatttccttcttgggttgaagttatttagatcctacactggctcagtaggaggcttgcctgccgttatgtcctactaggtggtgacagggcccttgattccctccctgtgtttaatagaaataaagacagagtcttagcgctttagggcagctagttgttctcccaaagacctattataggaatttaaaagcaaatgtctgatgtgaaaatctatgctattttagggactttgaagcacaacacaaaagagtatcactttgttgaatagtttgggtccaggcaggtgtcctagagcagaagttttcatttatttttaagcaacaaaattctttctttcccaaatgaaatctcctacagaatccaaatactgaagggtttctcaaccccagcatgcttggtattttgggccagataattcttgttgtagaagctgttgtgtgtgttggaagatgcttagcagcattcctggcttctaccctccagatgacataagtggcacccacattctctagttgtgacaacaaaaatgtctccagacattgcaaaatgtccactggggagcaagatcacctccagttgagaatcaatgcaatataatctagaaaacagacttttaattaagctcctcctttagaactctgcccagggtccctgactgttagtgtttgagacctggtggggcgttctgggctacacagatgcactatcctagagggttaagttgtcattttaaaaacctgggacatagagaacttgttataaacaaagcaaaagagctaaaattagacaaatccacaagtactttgaacccacatgtacactaaatatttctgtctatgtattatgtatacattgtgtacttggatgtgtagcataagggaagagtcgaagggtggtgtctgccttactccttatgtgttgaggtttggctaccacaatttgccctgttttgccagagatgccagttgaaggcctgtgactgacagcccagtgatagagtcaccctcactgcacaaaatactcagcttctgtgggattcagtggccctggccctgctcatgggcattccgtggtgagtgggccagcacctgcagcctctttcaaccagactggttggttggagcttggaccatggttattccaaggtggatttttatccttctgccctttgtactaaatgggtcatgtgtgcctctgtacgtgtgtgtgtgcgtgtatgtgtgtgactacacgtgtctgtgtctgctcttctcctttcagaagcccagagccactctgggcctggccactctgagcattggttgtgtgggggatgctgggagcttggcacatgctactcctcctttttcctcccttagaatgatgaaagtgttgttggagcctgtcccacagacagaaactgtacctcatttatgtgggcatcagtataaacaagaacaataccactatgtgagtcaccctcacctgcggggagacgcataggctcagggagggaatttgctgccagagggtctcagcttcagtctgtctccccggcagactcatcctaacttcattccacagctcaagtgcagtgtgaatcagcaggcagcctgtgcctagctaaaggactctctctgtgttttgtttgtttggttgcttgtgaagatctctgggcacatacagcagtgttttattttcccaaaagatcgcatgaccactacagttagccttgggaacagattgagtaagcacaattcatttgatctatctgcagatctccagcccttctaagaaactcacttccaaaaatgtttcaggagtcctgtagaagtttgcttagagttccttaaagaggctaagcgtcagttgcaatatctctctatcaaccccatttcccccagtgccactgccatgggctggaggagtgggtaacttgcttaggaacttgggtaagggacctgaagctccccacccactctggccctagataggctaaagatttgaaattagtttgatttatgtaaatctctggtgtgaattattgctatcagataaatacacagaccattgaactgaaaacagagcctcaacacaggttgccattgctaatgttagtttatagtagccattatctagtagtgcctttatcagtgaccccaggtgtataattggtttgttgtgaaagaggagtggagttcccaggatgctttttgtcccccatggttcccttataagtgactgtatttcctgagctctctgcacttttgtcaccttttgtcatcaatatatacaatcagtttcaggcaatattgatagggatgtgaaaactaaacactataagattgaatggacttaatagctaggagttgcagaaaatattcctacatgtatacataacttttataatgtacaaattgttcttatgtgcatactcttgcataatcatcacaagtcagccttgtgacttaggctctctcttggccttatcttgagagaatttatgaaatctgataatattgcagccccgtaggaaaacttttcagtgccttgctatgatctctgaaggcctatactcctccttcccttcctaggctggtattgacctgctttttaaatctcatctcctaccagaccttcatattcattgtagttctagcagtagtgtactacttgtaggtacctgaatgtggcaagctcttttctacttcttactaatttatggaaacaccaatctacccattcattctttcactgctacttgtatgctaggcattggtgatatcccctaaccccctggtccttggtctaagcaggcataggtggtgctgtgtggtaagagctttggtcttggtgctaggggagctgtaaggagggcaccaagccttgacttgaagggattagggaggcttctccagtaaggcatctccaaagtaagtcattttagtgtgaggtggatgggagagttaggagaggagaggaagaaagagattagggcaggtgtggaccccaggctagacagggatggatgagtgataaggtcttgatagtgggtagtgccagatgcaggtgtatagttttgaggactttgccctaaggcctgaaggcagccattcaatgtttttgttttttgtttttttgagacagggtcttactctgtcacccaggctggagtacagtggcgcaacaatggatcactgcaacctcgaactcctgggctcaagtgatcttcccacctcagcctcatgagtagctggggctataggcatgtactaccatgcccagctaaatattttgtttttctgtagagacagggtctctctatgttgcccaggctggcctcaaactcctggcctcaagcgatcctcccctcctgccatggccttacaaagtgctgggattataggcgtgagccacagtgcctggccaattaaatgctttttaagtaggagcatagcagggtgcagattgctgcaaagcacctttctagaatatatcctgttcccctcattctccctctagtactttctagtatataccccgttcccctcatcctccctctagtactctgctgcttaggctttaggttcaattcaggcatcactgtctctgtatgtgctccagattccccgggcaccatcgggggtccctctgccccacagcaccctggacatgcatactggagataaagcagcaattgcttttgtattttaaccgtctagttgtgtgtccttcctcctagaccactggttttcaggatttaaaagtgtagattcttgttgcccaccccagatattcttacttactgtgggatagagtctaggcatccccattttttttaaaagaagcagaaacattgcagtaggctaatcttattgagggcctggtttatacattatgtgtgtgcacacacgtatgcacacacccccacatacttgatctcattcatgcttatatctgtatttcttttatttttattttctttgatcctgtcattcaaatatccatatttcttaagaatgtccggtataaatttgctatgctacaaatgtttgattgaatgaatgaatgaagttgcccaaatttacgtgtgaagatgtgttggagcctaagttaaaattcataggtgattccgaggcaaggccctttcacagcatcactcttacaccacagttgctacactgagatggcctttgaaaagcaggcagtcccactgaaccacagtatcctagagactaagaaacggggacaagagatctttaacttgcattttataattttcagtggcacatcaataatctgcagggatacactaataagatgggtattggacactcattacgacagaccctggaggatccaaaactgtaaaatctagctctgatctcctacaaatttttggtctacttgagggtaaaaggcagaaatacacagacagttgaatgactgtgccagatcgtgacagttacctggagtaccgtgcacagaagggcaatagaatgatgcagtgactgagtaagaaagagcatgccattagctggagtggtctgcagatacctttggatgaggaagcacttttatgaggtttggctttagaaaagtgagaagccattccaagtgggaggagtgacatgagtggaatcctggcaggagatgggctatgaatggtgagggcatcagtttgacaggaacataggtttgtttgtgtaggggagtgatggttgacacctaaagggagtgctggttcaggattgggagggccttaaatgataggtggggctataatacagttggggatgtgtggcacattcagcaatgtaaaagtctgttgtcctcgaccccagatccattcaccttattaatgaaggtcatgaatttttaaatataataactgatatggataggttttgtgtcctcacccaaatctcatcttgaatcataatccccaggtgttgagggagagacctggtgggaggtgattggatcatgggagcagtttgctctttgctgttcttgtgatagtgagggaattctcacgagaactgatggttttataaggggctcttcccccttcacttctcccacatactctctttctcacctgctgtcatgtaagacatatctgcttccccttatgccatgattataagtttcctgaggcctccctagccatgtggaactatgagtcaattaaacctcttttctttataaattacccagtttcagtatgtctttatagcagtgtgagaatggactaatatagtaaattggtactgatagagtggggtactgctataaagatacccaaaaatatggaagcaactttggagctggataacaggcagaggttggaacagtttggagggctcagaagaatataggaagatgtggaaaagtttggaacttcctagagacttattgaatggctttgaccaaaatgctgatagcgacatggacaatggagtccagggagaagtagcttcagatggagatgaggaacttcttgggaattggagtaaaggtgactcttgctatgctttagcaaagagactgacagcattttgcccacaccctagagatctgtggaactttgaacttgagagagatgatctgaaattggaacttatttaaaagggaagcagagtatagaagtttggaaaatttgcagtctgacaatgcagtagaaaagaaaaacccattttctggggagaaattaaagctggctgcagaaatttgcgtaagtaacaaggagccaaatgttaatcaccaagacaatggggaaaatgttcctagggcatgtgaaggacttttgcagcagcccctcccattacaggccccgaggcctagaagggaaaagtggtttcatggactgggcccaggaccctgctgctctgtgcagcctaggacttagtaccctgcttcccagccactccagtcatggctaaaatgggcaaatttttaaaaagtcagctcaggctgtttgcttcagagggtgcaagccccaatccttggtggcttccatgtggtgttgggcctgcaggtatacaaaagtcaagaattgaggtttgggagcctcagctgagatttcagaggatgtatggaaatacctggatgtccagtcagaagtctgctgcaggggcaaagccctcatagagaacctctgctagggcagtgcaaagggaaagtgaggggttggagcccccacacagagaccccaccgtggcactgcttagttcagctgtgagaaaagggccaccatcctccagaccccagcagatggtaaatccatctgcttgcactgggcacctgaaaaagccacaagcactcaacaccagcctatgaaagcagccaggagggggatataccctgcagagccacagtggtagagctgcccaaggctatgggagcccaccccttgtatccacatgacctagatgtgagacatggagtcaaaggagatcattttggagctttaagatttaataactgccccactggatttttgacttgcatcaacctgtagcccctttgttttggccaatttatcccatttggaatgggtgttcttatccagtgcctgtaccaccattgtatcttggaaggaactaacttgattttgattttacaggcttataggcagaagggacttgccttgtctcagatgagactttggactgtggacttttgagttaatgctgaaatgagttaagactttggtgaactgttgggaagccatgattggttttgaaatgtgaaaagatatgagatttgggaagggccagggctggaatgatgtggttaggctttgtgtccccacctaaacctcatcttgaattctaatccccaagtattgactagagacctggtgggaggtgattagatcatggggggtggtttcgtccatgctgttcttgtgatattgagtgagttctcatgagatctgttggttttataaggggctcttctcccttcacttctcccacacactctctgtctcacctgctgccatgtaagacatgcctgcttccccttctgccatgattgtaagtttcttgaggcctttccagccatgtgtaactgtgagtcaattaaacttcttttctttataaattacccagtctcaggtatgtctttacagcagtgtgagaacagactaatacaataaccatgttctcttctttctggagatctccagccacatttgacttccaggtctgtgggaagcagtccaaggtgcaacctggaacactttcatttggcttcttcatgtagaggaacatttacatgtcgctgcttgttccttctacccatggcctacacacactgccaagctgtcaccttccctgttgtgcaatgtgtttgccatcaccttcaatgaaaacaatttttttaatgtcagaattttcttagttattaatcccaaacacagacaccagaaacatgatccagaataaagttttcagttcacactgagcttgtcattgctgaagtaagactcttagctctttcacaagtatggacaaaattcagtaggaatgttttcatcacaagtcttacttcttaataatgctttgatctagggtaatttctctttagtcttggatggtaattttgcctgaggaaagtccaagaggtcttatgtgaagatttctgttttgtttagagtttgccacaaatactggaaggagaaagttttctgtaatttatacagctttacattagaaggctatagcttattttaaaatggtttctgttcaaaaaattttcacctacaattatagtataaagtgccttgtccttgtattcacagaggaattttctcatacaactacaagaaaatgtggaaagtttcgtctgagaaaattcaactttttcatctctcataatttactgcttcaggaatgcaatttaccaaagtggattagaaactgtttgtaatggggaaatacgtgcactctttgaaggcagttgtcgacaaagagtcaaactctaaaatatttgaagaggtttattctgagccaaatatgagtgaccacagcccaaggcacagtctcaagagatcctgagaacatgtgcccagggtggttgggttacagcttgattttatacatttcagagggacataagacatcaatcagtacatgtgaggtatacattggtttggtctggaaaggcaggacaacttgaagcaaggggtggggagttgtatgggggagggtgcttataggttacaggtggattcaaagatctgcttattggcagttagttgaaaggataaattagttattatctaaggacttagaatcaatagaaaggagtgtctgggttaagctaaggggttgtggaggctgagattcttattatgtagatgaagtctcataggtgtcagcccttagagacaatagatggcaaatgtttcctatatagacctaggaaaagtgctagactcaacagttaatctctttaggattgggaggacctggaagaggaaagatctagttatgttaaagagattctttacggatgcaaattttcctccacaaaaagatgctttgcagggtcatttcaaaatatggcagagaaacatattttgggataaaatattttgattttcttctttggttgttttgtttgtttgtttttgagacagggtctcactctgtctcccaggctggagtgcagtggcgtgacaatggctcattgcagcttcaaccttctgggcttaagtaatccttctgcctcagctgcccaagtagctgggactacaggcatgcaccaccatgcccagctaatttttgtatttttgtagagacagggtttcatcatgttacccaggccggtctcaaactcctgggctcaagtgatccacctgcctcagcctcctggagtgctgcaattacaggcatgagccacttcacccagctgttacctttatctatcatgtgatgctagctgagtgtggtggctcacacctataatcctagcactttgggagactgaggcaagtggatcgtttaagaccaggaatttgagaccaacctgggcaacatggtgaaacctcatctccacaaatatatatatatagatagatagatagatagatagatagatagatacacacacacacacacacacatatatatatacacacatatatatatatatatatatgtatctcacacgatgctataccagagtcaggttgagttggtatttttgtagagacagggtttcaccatgttacccagactggtctcaaactcctgggatcaagcagtctacctgcctcaccctccgaaagtgctgggattataggtgctctgcactctagcctttgtaacaataagggtctattctgtcggttttaggtctctattttagtgttaatgctggtcagttgagtctaaactccaaaagggagaggatataatgaggcatgtctgactccctctttgcgtcatggctttcactagtttttcaggggttttttttaatccccttggttgagaaggggtccattcagtcagtagggggagcttaaaattttatttttggtttacaaagtgaagagctttcctcttttaagtcctcaccatataaccagtctctaccagatgctgagaatagcttaaactttcttactgtcttatttgagcctggggtggtttgttgtaggaccttatcaacatagattttttgataattgatctactttacttcgatgtctgagtaaagctttaacctggcccttaaacaccaaaaatgctttagtgggagctcttgttttgggaaaatgaaaaatttctgtgtctatcaatcacggaaagtattccccactggtttgattctgaaattcaatcattgcctatgaaagttaaaaacatttttttttccctgtagctagcttttactctgtctctttaaaatacctttttttggaggagaggtggagcaagatatgtgtaactatagttttttctttttttgcttagatggtttaaagaattctgcatgtcatagttgacattccatcattatcctgtgttccacagtcaaggccaaaggttaaaaataagttcttaaaggaaacaaaattaaagcaagagggaattacctctgaattgttttagggactcctagcattttgcatgagtttctgttggtctggagaatagaaggaagcatgaaaggtttcattccttgcaaatcaagtgaaactggctcctaccctcttcttcaatacaaacatgaaacagaaaaagtagactggaagaccagaaagggcacagatttttataccattttcatcaggattactatgttcatgttatggaaccaatttgtaagttttgggtaacagcttaaatagaaacctatagaactgaggcaaccttctgtttctcaaagacagatggtgaagcaacatttataaatgctttacagttagagagcatatgctctcgtccactgttttttgtctttgtgatcaaagaaggatttgaggaatttcttttaaaaatcagtctgtacaataactgagtacattactttcagataatggagaatagtcacacccattgttttcagggcctcagggaatcctagaatgtgtgtcttgtggactgtgtcatagttggctagttacagtggcagttactaaaatcaaatctgtttcaattaataaagaacttgacaatgaaactaacaagacccattctaaagacgccaggaaaataaaataaaaacccatatgtactaggaattgtaaatagagaggaagcagaaacaatgtaatttgaattatcttattaaaattttaaaatattaaaatttaactagtttctcttattcagctagagacggtataaaaacttggcagaagtgtgatttttgtctatctgctggccagaataatactatatagatgggattttgtaggttttagtctctctaccccgctgtcttccaatatgtatgcagaaaaagtaaacatgatccctaacctttctgaaaccttctttaccttcagtctacacatacatagtcttgggcaaagagttatcaggtaaattccatggaatcaagagtagaggcatatgttgcttttcttaataggaaaaacagtgactgtgtccccctaaataaagtcatgattcaatgaaaagacaaacagcccaattttaaaaaaatgagcaaaagatttgaacagacattttctcaaaagaaatatgaatgggcaatacacacatagaaacatgctcagcaattttaggctttagggatatgcaaattaagaccacaatgagataccactagaaaggctaaaatgaaaaagaccaacaacactaaatgttggtgagactgtggagcactagaacttttcatatttttagtgggagttcaaaatggtacaaccgctttgaaaaatggtctggcagtttcttacagaactaaacagaccactaccttgttacccagcagttcttaggtatttacccaagacaaatgaagcatatctctgtcaatagaaaagcagatgccagccatggtatgattttgaacagccagtggaataaaagaatagggactatatctgaccttgctgttagagtagttaggcagatatgagcggggcaggagaggcccccctcccccacaggaatgtcaggcaaccatcaggtgatggtcaggtggttgttaaactgtctcactaacatactagttggtcacagcttgcaccagggaaagcagactcccagtagatagaaaacaccttaagctcttaatcagcagcttcctttttttttttttgagatggagtcttgctctgttgcccaggctagaatgcggtgtcgtgatctcagctcactgcaatcgctgcctcccgggttcaagcgattctcctgcctcagcctcccgagtagctgggactacaggcacgtgccaccacgcctggctaattttttatatttttagtagagatggggtttcgccatgttggccaggatggtctggatctcctgacctcgcgatccgcccgcctcggcctcccaaaatgctgggattacaggcgtgagccgcggcacccggccaatcagtagcttcctcataggatctcaggcgttggatgagtgggctcaaacttgcatgctaagagacaaaatggtggagtttagctggtgtatgaccttcctctaggaacactcaattggtaagggaaaaatgcctcaaatgaacatgtgcacagcttcagtaaacacactgtacatgcggcccttcccaagtgctggcaggccactgcacatgcggacagcccaccccaaggaaaaaccaagggaggagagacacaaacctcagcaccatgccattgtgtaaaaatcccaagtcaagcgtcggacagggtcctcggatctctcaaattgcccacttggccctcttccacgtgtactttgcttcctttcattcctgttctcaaactttttaatatactttaactcctgctctaaaacttgccttggtctcattctaccttatcctctctggccaaattctttcctccaaggaagcaagaatcgagttgctgcagacccatatggattcgctgctgctaatgttgccatttggatttttttttctttttagagtgttctagaatgcatgcttagagaagggaatgtaatcctaggacaccactcagctctgcaacagtatagctctgcagtaatgagtaaatgctgtttgttggtttactttaaagctctgctactgaatatatacaaatatactgttatattttcctggtaaaaccttttattatacaatcacttctttttatttctagcaattctttcttttacagtgtattttatctgacgttaatgtggctgcattgcatgtcttttggctagtatttgccctgctttgcatcttctttaattcatttactttctactttttctacctatgtcttaggtttgtgctttataaacaacaggtggttagatttcctatttctagaagtttattgagattctccctctaccactgtctctaccaattccattttttcccacctctattggtttggaagatagaatctctctctctttttttttttttttaagtgattatacttggaattttaacatgtctgtgtaactaagtctaaagttagctaccactttaccctcctactgagcaatctaaggatgttagaatgtttttaactccagtcactttcctcctggcttatgtgcatttccttgatatttttgatatctttttatttttcttttgaagctccattaactagatgttattagttattccatccttctttgtttctatttacttacatgtttataattttttaacataccactttcttgtatagctcaaaccttccctcgaacatttccctccttcttcaagtagattctcttcaagtacattctttatttagcgaaggtatttggtagtgaacaatctcagttttctgaaatatctttattttgccctcattctggaaagctagtttcttactttatttttttaatagacagagggtcttgctttgttgcccaggctggtcttaaacttctggcttcaagcagtcctcctgccttggcctctcaaagtgctgggattacaggcacgagccactgcgcccagcagtaacgctagtttcactgggatcatggactcttaagagctagaaggaacttcactgattatttgactcagccttttccatttccagaaaagcctgccaccaggcacagaaagaatacatgacttccagagtccctcgctatattgtccagactggttttgtactcctggcctcaagtgatcctcccacttcagcctcccaaagtcctgagataataggcgtgagccaccgtgatcccctttacctttttctttttttttttcctttatttcttcttaataaaaaaaaagtgggggggatacatgtgcagagcgtacaggtttgttacataagtatacgtgtaccatggtggtttgctgcacctattgacctgtcctctaagttccctcccctcaccccccaacctcttcaaaaaaaaaaaaaaaaaactatcaaaaaatggtggccgaggttcaaagctctcaccttggttttgtgataaaggtggttaatctttggtgttggatttcaaattagtctgtttacagtgagcaacagtacagcagttttaaaaatcatgttgaatcagaaacatgaagaaggcagcagagctttctctccaccatgcacttggagaaggaaatgactcggcagcatactcctcatggctaatatcctttaagatttttccaaaatcatgaaaccagaacttgagagcttaaaagggactttagaagtctaccagtggataagagagaaaaaaaaatcaaaagggaaatggaataagccaaactaaagggcaggattcttttagttctcagcaggaaacatatgtttatctggaaaagattttggttggacaggttgtttgtgtaagaatcttttttgtgaggaaggaagatcaacctgggcttgaaggctggggtgggggtagagagaacagtccctgagcttcaagtaaatgagaaaaatacacagattttaaacagaggagccctgctttcacggggatcatatgatcgtgctatcagcttacttttaagttgtgataatgtatacatactttatgaaatatgattaaatggtaactttagtattagtggctacaagaacagaaacagcaacttttaaaaagatatgaaaagatgttttgggtgaaagtagttggctgcgcaacacatagagtataacatacatcattaatttaagactgtagatgtacagtatatatttggcatgtacaccaggattttcagtgattattgatgtaataagatttatgatttttaaaaagaaactcttcatgatagttttctgtaccacttacattttccatagtgatcatcatattgtctttataaacaatgacaacaataaatcaaaaagagagatcttacatggtgcctcttctctgacagctgagaccacatcatagctacgttgttcccttacattgcatttacattacatttaaaatgttatcaggaggacagaggctcatgaatgagacatgttctctccagttaaatttagtaaagaagaatcagagaaaaatctccagataactggaaaatgtttacattttcaagtatataaaaccaggatacattatcttgtttaagcttggagttgacaataataccattttgagatgtttttcagatagaatgacagtgagagtcatagtggggttgcacctccacatgatgcaacccaaatgtgatggaacagaaacatttttcttcatcatcctgaaaccgagcagtgatgatccgctgaggaatgtttaattttcatgtattaaaaaatgaagaatgtctgacctactgttaatgagaaaaaaaaacaccaaaaaggaagaaagaagaagtggcagctaaaagcctttttatggatgacgtcaatagaggaaaatgaaatattcatagaatcacagcaagagaataggaattctgaacatttttgtagaaggaaactgtaggattcttgcaattgatagtaggacaggagggaatttccatccttatgtgtgcagaaaggagtagacacagtgaaatttgaagactattgtaaacattttctacttcacttcaccttgaagaagtctacagaaagcatatatggcatagctgggcagagtggctcatgcctgtaatctagcactttgcgagaccaaagagagaggatcacctgagcccaggagtttgagaccagccagggcaacacagtgagaccccaactctactttttaaaagattttttaaaagcatatatggcagttaaatttcagtgagaaatcaggaccagggtaaatgtaaatacattactatagcagataaataaatatggatgccccacccatatttcctttcatcccacaacagaaagctggaaatgctgaaaaattaatacctcccacccctgaagcagccatcagccagtgaggaatgggagccagaggataaataacccaacttcctcacccgctgagggtgttcaaccaggtccttgaaattcccgacaggaatcgagcctcagttgcccaccctggaaacctgctcagtaatacgcttatcgttggtttccttccctttcctgtctcacttctgtaatcccctggtgcatctgggggttccttcccgaataaactacttgcaacttaagtccctatcttgaactctgctcctgggggaatccaaacaagaacaggtggagacagagtagaacaaggataagcaaagcaagagaggagatctgaagacgtctctaaggttgtttgagtgactccaaggatagtggtacaattagctaggagaaagagagggtggaggaggccgagaagagggttcagcccaacaaatgccaagttttaggtagcttggggataccttgaagagatgctgacaagctacttagaaataagtttattagctagaagccggagctggccaggcacagtggtatgcacctgtagtcccagctactctggaggctcaggtgggaggatggcttgagtccagaagctgtttgaggtcagcctgggcaatgtaatgagacctcatctcaatatcaacaaaccttatctcaatataaatgaatgaatgaatgaatgaatgaatgaatgaatgaaaccagagctatagctgtatatttgggaatcctcagtgtacaggcagttgatgaatgaacatccagaaagactagaagcatggtatgcagggaaccttggagcatacacatatttaaaaattgggtggaggagaaaagccagtgaaggagactaagaaagacgattatagagagaagaaccagagctgttattggagccaaggcctctttcttcaaggactgagaaggggagagtttgtactttggagtttgcacagatcacagacatgaaaaaggaaagatgatgatgagtggaaaatgggaggtcaggactctcctcccatcctgatgtggcaagaggcttttctcatggttctggatggaactttggccctgttgcagatgctcacatgcaacgttctgttctaatcactgttctgctggcagaggaggctggagtgatgagtgagcatgggctcagcttgcgtggatgctatgagccgtaggtcctactcaagagagtcagtctagtaacaaattattttcctctccttcttttgccatcccatttagtttgcaggatggttggtgtttgtgtgggctgagattcctcagagggaaccaaagccctgagaaacatgtgtagcagctgttgatttgggtctccacagtgagatccgggtctaatacagtgagtccaaccactttatctgagtttggaaataactatgagtacatagttaagctgttttcaaaaaacacagaggattctgtactgctagtgccattgagggggcttttgctgccatttattttcaacttatttttttgaggtggagtctcactctgtcgcccaggttggagtataatggcgtgatctcagctcacagcaacctctgcctcccaggttcaagcaatcctcctgcctcagcctcctgagtagctgggattacaggtgcccgccaccaggcctggctaatttttgtatttttaatagagatggggtttcaccatgttggccagacggtcttgaactcctgacctcaggtcatctgcccgcctcagccttccaaagtgctgggattacaggcatgagccgccacacccggccttgctgccatttttaaataccaaaaccttttgttgcagtctttgtcacaggtgctggcacaaaattcctggtaccttctccctgctctaattcaccaagttctccttcctcttttccaaagactactaacatggaagtcttccttaattagttacaggactatatctgcaactcctgtgatttattcgctcagtgcccgtgtcactgtcacccactggtggggtgtgcttgttgtaaatacccatttaaatgtttacattttcaagtatataaaaccaggattgtaaaataccgttgtatttccagttgtaaatagccgtttagttaagttaggcatttgtttatcacgcgtcctaatctctgtttgtgtcgttactgtctcagagatcatcatcatctgtgtttacatttttatgcatcattctttatgcaagtagttcttattcagtgtttttgatgatgttaagcaaaattctgttgctaccttacctcattaccttcccgggatatattttgcagatataaaccaataatattttctggttctttcttgactagtagcttttggttaactctaaggtttttctgtttgtttttctcacagttgttttctcccacgtgtacaaatgataaaacaaattatctcaggaagaagaaaaaagacatttgatagtatatccagtagttcaacaatagtcaacggagtctggtgtcctcacttctgtcattggctgcttgacctcacttaaccttcctgttagtttctgtttcctcactagaaaatttattactttctagggataccaggagacctggtgttaataaagggcacagtgcagggtgtgtggaagattttagtgtcagttctagcacaagctagctaaatgtgtctcggggtacattaacttctctaggccccaatttcctaggtattcattcttcttctagacaatagacagttgaattaaaaaatcctttctatcgaccaggtgcaatggctcacacctgtaatcccagcagtttgggaggccgaggcaggaggatcacttgagcccgtgagtttgagaccagcctagcaacacagcaagaccctgtctcttaaaaaaaaaaatcctttctattcctagaactctagggtagtgtgaagtaagggttttcacagttacactaggtaagttactacctgtcgggtacttctctaattatgctgtgcttattaacttatcaagtcctcaaatggccctatgaggaacatatcctttatgttctatagatgaggaaactgaagcattggatgttaaacaacttgcccagggccaccgagcttataagggaagaagccgtctgcacaccccaggctccagattccacagcctcaaccaccaaactctcttgtctgtcgtcatatagaaggctgttctgttttctcagtgtagcccccttaaagataagccacagtaaaccacagtgcttttgatattaggcaaattaaacttgagttcaatcgtatgttacactgaatcaaagttatattcgctgtgcattttacgccagtaattctggaaactaaaaagtgccatgccagaaattttctctgatttaatttgcttacaatcattttaaaaatgaggagctgtgatccacgcttttgccccaggttggaatattttagaagtactttcaaatatatatttctgctgctgggatataaaaccataaattcgagcagatagaacaaaagaccaaagaggatgatgtatttactgtttttgagttaaagttacaacagtttacagaatcacagcaaccgagaataggagttctcagagacatactcctcatccacagaagcctcacatgaccaacacaagtttcagtccagtgcaactttttgcaaatgaaaacttaccctggggttgtttggtgactcctagtcacatgtgctttctaaagttctcaaaacaagcatggggtgacagtccagttttatgaaatataattttagttcagaagagatgggattttagaatagttaatcttcattatatttgacataattactctgcaccctgtggatggggtggcttttcaaaacccacttctggtgaggcagaccagggctccaggccagcacccctctggagattggaatgtgaatttccgtgctgggacacagagccagcttcctatttatttagagccattgggcacctaaggagccaaacagaagttgtgatgcaagttttggctgcagagcatgttagggttgcctgacgtgtctaactaaaacatgatctgagagatttctcaaagccctggttgatttaagcaccatagtattcaatagggtttttttttagtccttttaactcagtcctaagtaaacaggaggcggtgcaaacaatgaggaagttccctctgcattccgatggtgaagtggggttggagtctgtaggcaagtgaagagcgtgtgggagagctgtttccttttgctcatggcagcagtctagaacatggtgacagtgaaagtcattggaagccatgggggcccattttctttatgtgaccaaatgtcttgcaaagtcccaggtgtgtgtgtaggtgcatgagtgtgtatgtttgttttctaaacgaagcacacgtgcaaaataatgtaaaagggcagagtgaagtttgtccatgtccctgtatgaaagtgcatgggaagtgcctggggcagaagtgaaagagacacggccccaggtcgtgagagaagacattgaggtgcactcccggcctgctgtgggaacagtgggttagcatgtcaccggtgcactcccaggctgctgtggcaacagtgggttagcatgtcacccggctttaggatttgggggagtttgctcaggctctgaggcaggtaggttaaggctaatttaactcttaatggttggaaggaaagagggaagggccgtttaggaaggtgaaaaggcaggagtgaaggtggcaagaaatgattggcatgcagttttttcctaaatcctcctctggttataaggaatcaactggaaaattgcagtggcaatagctgttaagaaaaaaaataggattcagttgatgaaatattaaacatgcaagtgggctggtcttttaaccaatctttgtagtattaagggattaaaaagttaattcttggtaattagatccccagggagaacttaatttgcatctatacatgataagtgtttactattaataattcaagacaagttttgctttggccggtattgagctgggtctcaggctggtgataacagaggctggatagagagtgataccattagcctaattttgtcatctgcaagcaaaggaatgttaaaatctgttcacttcgtggtttctaaatgacttctagaagtatcatgagtggaagagggcagtgtagtgtagtaacttttgttcttccgcagtccttagaacctgtcaggattattggttatgacactgttcccacagggtggacaacaggggcatttttatcttcttgagacatatgggaaacttaagaaggaaagtaactaggctgtttgccaaagattacacctacctccaaacaaaaactgaggcaggtataattttaactgtgctggaatctctgaagatgttggtgtcttggccaaattcatttggactctttctgcatttcactctttgagatctattgtgtagactctaatttctttgacaggtattgtcacattggtctccacaaaaattattattgaaagccaggcatggtggctcacgcctgtaatcccagcactttgggaggctgaggcgggtggatcacaaggtcaagagatcaagaccatcctggccaacatggtgaaaccctgtctctactaaaaatacgaaaattagctgggcttggtggtgtgcacctgtagtcccagctgcttgggaggctgaggcaggagaatagcttgaacctgggaggtggaggttgcaatgagctgagaacacgccactgcactccagcctggtgacagagttaaactctatccaaaaataaaaataaaaaataaaaaattattattgaaataactacattttttttcttttttttttggagagaaagtcttgctctgttgcccagctgaagtgcagaggtgcaatcatggctcattatagcctcaacctcctgggctcaagtgatcctccctagtagctgagaccacaggtgcacacttggctttttttaaaattttttttggtagagaaggagtttcattatgttgccagactggtctccaattcctaggctcaagtgatctcccacctcagcctcccaaatttctagaattaaagatgtgagccactgcacttgccctaaataactacatttttttgaatgctgcgatgtgcctagctttgtgctaagctctttgaatgtgttacctgattcagtccttgggaaaaccctaggaagaaggggccacctgatttctagatgggaaccctgaggcttagcaagaaaaagagagccggtgtggtagggtcaggactggagcccggtttatactcctactgacaggatggggatgcctgtttcacctcacccttgttaaaaaggacactttagcaatccttttaagtatttgccagcttaagaggtaaaaatgtgatttagcttctggttcttatgcgtccgtcttgggtagcattggacatcttggcatggttattggctgtttgcacttacagttttaggaattgcctcttcacatcctctgccccatttttactggattgttcatacttttaaaaattgatttctgtgtattataaatagtaaccctttgtcatgtgttacaagtcctcttctccctcagtttctttctttcaattttctgctttgtatttttttttttttttttgccaaatagaactttaaatttcttaaattgcaaatctgtgaactttggatgcctttagagtttattatccctttaaaaaaatttttttaagagatggggcctcagtatattgtccaggtggtcttgaactcctggactcaagcagtcctcctgcctcagcctcccaaagtgttggtattacagacatgagctactgtacccggccaagttttattatccttatcttatcctaggagtataatatttttctgtgttttcttattgttctataatttcctttgtaacaggtatctgagattatctttgaaatcttctgtctcttccagggtttaaaattttttagcaaattattatttcatggtttcttaaatttcctttgtttcaatgattaaagcattattgaggaaataagctatattttattaatcacaagtctctgcatacactagaaaaattctagtataattatttggaagacataatgatgtagttttcagagtcctcagattagaagccactgttttaaaagcgtgaggttagaaaaggaattttgcacctattccaggttaatttctacctattccaggttaacagaggtgatcctgtaccaatgggttttggacagagctctcatagtctgtgctgtgggcgattccctcatttagtttgcgaggataccagaattaaaggaaaataatgagaaatgcttatagctcatagatagacgcgaggtcacagacagccagactggagctaggagaccatgctgatgtcacatactgccctatcagaaccctgggaaacccttggtctgtgctacaagagattggcccatgatagccagttataaccaggcagtgggcatctcaggggtttgcataggtctaaccttaaaaagccacatgactgggtgcggtgacacacacttgtaatcccagcactttgggaggccaagacacaaggatcacctgaacctgggagttggagaccagctctggcatcacagtgagacctccatctctattaaaaaaaaattatttttaattagctgggtatggtggtgcatgcctgtagtcccagcaccttgggttgctgaggtaggagcatcacttgggcctgagagttcaaggctgcagtaagccatgattgagccactgcacttcagcttgggtgacagagtgaggtcctgtctcaaagtaaagagtcctgttaggaagccataatgattttaggggggatggtttagatcttgaagaaagaaaaaataatttgaggagtgagcacttgaactatcaaactttctcatctattaggtgcgttaggttccttacatcttattctttttttccttccttttaatatatagctactctccagagagaccggatcttcaaacattttaccaggaagcgccaaagggctatgcgaaggcgagtccaccagatcaatggacacaagttcatggccacgtatctgaggcagcccacctactgctctcactgcagggagtttatctggtaaggggttcccttacttctgtcctcctcagagcttccatctaataggcttcctctggttatgtatgacttcagcagaatgcatgattatttaagaattctttcaggatctgatttttgcctcttactctagtatgttgacccagtaatttaaatctccattgcaaaaacatctaaataatttacagatccaagttttagataccatttctttttaaaatcatcttggtaaagatgctaatgaatcctaaactggtcaacaagcataaatcagagaaaaaggctaataagtcaataaacaatcagtaaattggataatcagcccctaaggaccaaagaataatcaacagtattgctttaagaaggcatgaatcgcataatgacttatggaaattaatggttgcgagaaaactaaacacaaagtagtcttcggcctcttggtatgtaacagaagataatagccttcagtgatcatatactgtaatctaatccctaggaattagtaggaactaagataattcaacattgagaaattctagagatttggggcaatatcttactagacatacaactgaagcttaagtctcagtctcagtggcaaatgtaaaataaatttaagcagtagttatctttagtgataaattaagcatacttatttggaaagggaagaaagaaagatgccctcacacacccatctcagaaggagaaaacacagtttggtagcgtgaaaggagatctatatttttgttgtcaactttaattattttgtttagtgaaggcagaagcccttggatcagagcagtttctgaatgttgatcaattactttgtattttgttttctgtgattattttggattttatatcttcaacagtcagaacctagggctagttagtatttctgacatttttaatcaagaaacaacgattttgagatgctaaaccagctgtagatatgaagccaacaaatgtgtcataacatttattgtatttagggaaaaaattgtattacttttttttgggaaaaaattagcagccctggcgtctttgagttcacgtttcctctttgcatgaggctgcactcgacttagccacagccccacctctctgtggtttgctcacttgtgacctaagggtgcttgcctcttgcagtgtatttcatgtcacacttttctgtttcttttacatgacctgccaggcccctgtaggcattagtggtgatggcccctgacctgaactgacattcataatggaaacttatttgatcatttcactgacttttttccaccagagaaacattaactgtacccaaccagcctttaacgctccccccctccacacccatacactgtcaccctcatactctctctctcacacacacttaaaatattggtgtatatattaatatatatggctaagagtatggactctgacatccagtctcatcaccaactgggtgtgtgacttagtcaagttgcgtagcctgtcaatgtctcttcatttgcaaaatagacacaacaatcttattttacttgtataataaactttcatatagtacttaaagggccaggcactattgtgagcattttatattacaacttttaatcttcattagagccctgtgcagtaggaacggttatcattagtcccttttatggatgaggaaactgtggctcaaagcatcaggtcatctggcttcagagtctgtgctcttaaccatgttattttgtgtgctgcctcccgtggctttttgtgaggattaaatgaaatggtatatatcagctgcttggttcagtgcctggcacatcctatgggcttagttactgtggtctttgttaatgagaatgagaatactcctaatgttaccatcattatcatcacccatagaatatatttgggagaggcaaagatggaagtggtgggcctgaagggcatattgtggcagcaactctgcccacctgtggactccaggggtgatatggacacagggacaagggcaggtcccctgggacaggcagctgcggtagactcatctgtgcacttccacagtgtatctgtgtccgtttacttcagcatctgaacatctttatgtgagagagaataaggtgggaactcttcaggccaaggcttaatcacacgtacagatgaggatttattgccactgaggacttaggaaattgccatggaggtagatggaatgggaatggtttttacccacccatttgtatcatacagcacattctaatccagcacatggttttttctggtgtctcatagtaacaaacaatggctcagaaagcacatgatctttgcttcttccctgaaattgtgtttttcataaaggaggagaggatgaaatttgttttccttaaggactataagagggttattgctgaaatacttgactgatggtagttttcttctcttcaacaggggagtgtttgggaaacagggttatcagtgccaaggtaaggaaacatttttaaaaccatgtttcattttgttcctatgttaaaagaaatgattataccaagagaaaacagggtatcttcccttaatattgtgataaataactctctgtaggtcaaaggaaacccctgtgtagatacaactctttagtttggtgagatcttggccatattttagacaatgtaaaggggacgtttttatttctaaagccaggatacctaataaattttcattgtttaaagtcttgtctctgcagtaacatgagagtactaaaaggtaatgtgattttgtgagcatactcttaaattttgaagataaacttttgttttttacaatcctattgataatagatagggatgaaaagtagcacactgctgttttctctttttccccgtccagggaacataagctattatccaagttgttttttgaaatgttatgatttcaaaaaaaaaaaaaaaaagtgagaaatgttcaaagttaagctgtcagtgatcttgtaagttactacatgttatatttagttttcacaatctaagatgaaaccaatttactagtgtttctagcataattggaaagaaatacaatggcaggaatggaagaagagccctcagtcaggtggtttagccaggcccatcaggcttgcctgtcatttgggttcccccttaacctttgacatgagtatcatcacatagtttatacacatggtacctgtttcactatgtggatgattgataaaatagcaccacatatcctagagcagtagcctatgtgtggataagaaaatctcaccttctcttctggaagatgtgaggtaaaacattacttcccttggatggactgaataagacatactcttggatctaattttgactttactatgtatgaacaattccattgaactttcaaagttaggaaaaaacaaatatataatcaatatgacagcaataattgacctgtatgctgttaatctcagtcccaagtgagaagacagttcacaagccagaatcgctgtcactttgtggcatgggcctgtgagcacaggaatatgccctgcagtccatggtagcccatcttatgcacaccaagataagttgagaagctctggataaacaagattatggttttgagtttaaaacatgggatttaagatacatctctattgttattttatttctttttctctttgtcctatagtgcctggatatttgatggcctgattttcagtgggtcacctgctatgtaaagagcagggaagactattagttaggagacatgcagacaccactttggtgatgtctccctaaggcatataaaaccaaatgcctggttggagagaggtatgccattctaacactgatcaaaagcaaactggcataggtatttcagacagagcagacttcagaaaaaggaaaattatcaggaataaagaggggacaacaataaaggggtcagttttccaagaagacttaacatttttatttgttttgttttatttaaagaccagtgtagtagtacataacaatttttaacatgtatgtatgtacctagcaacaggaatcaaaatacatgggacaaactgatagaatcacaaggaaaaatgaacaaatccacttctatagttggagacttcaatatctcagtaattgatagatccagcaggcagggaatcagtagggatataggtgatctaaacagcattatcacaactaggtgaaattgacgtttatagaatacttcatccaacaacagcagttttcacattcttctcgggctcacaggggacatttaccaacatagaccacattctgggccataaaacataccttaccaaatttaaaagaagagaaaccataaacggtatcttcttagaccacaatggaattaaactagaaatcaattactgtaagatagctggaaaatccccaaatattggaaggttaaatgtcacattctaagtaacacatgggtcaaagaagaagactcaagagaacataaaaaatatttagagtcaagtgaaaatgaaaatataacttataaaaatatgtgtgatccagcaaaagcagtgctcagatgggaatgtatatatcattaaatgcatacagtaggaaagtagaaagatctaaaaccaagattcgaaatttccaccttaggaaactagagaaggaagataaatttaagcctcaagcgagcataagaaaagaaataatacaattagaacagaaatcagtgaagttgaaaataggaaaacaacagagaaaatccatgaaatcaaatgctgattctttgaaaggattaattgataagcctttaccaagctaaccaggaaaaaaccaaatacctcaaaaaataaagtatttctgtgtgaaggatggttttgagatcccctcatataaaaagaccagttctctgggcactttcaatttggttctcctgagaattgaatctgatgaaagctagatttgttttaaggtatgatgctatttactgacatgtcacctctctttatgtagttaatcctaaaaccttccacatgtcttgaaagatcttaagatgatatacatttttatactgcttcattgcatgtgtttatcctttgatgacaagctcaactatctgcagtgtatcacttatctagatgagaatgaaaaaaatgttattccgaaagttctaaatatttcaacagttgattaagccattcagcaaacatttattgaatgcctcctctgttcaaggcatcatgcaaggaattctgagggcattacaaggctgggtggaaggtttgaaatgaaggggcaggctaagggttgtgggagatcagaggagggcaggtggtttcagtctagaagtggggatggggtagagtattttcatggaagagacattttctgagttacatcttgtcctaaacttaagatttggttagttgataggcaaaaaggatatcccagggagagaaaagggcatcgatagtttgttggaagggtccaggaagagcaacccatgtagtttttactggaacaagtagatcccatagaagaaaggtgacaggtagcttggagcagcctctggagggcctggaacctgggtgggaaatttgaactttgttgatcggcagtgaattaccatggaatgttttcgattatgggggcaggactagagtgttagaagagtcctctggtggtgggtgcaggatggaataaagtcaggaaggaagaaataggcccaggacttgataagggatagtttgagcctgagcaaaggtctgtgttaggatggtggcgaaggcaataggaaggatgggcgcaccagctgctgtcaagggggccagacgagtccagtcttgttggcacggtgcagccctggttgactctgctgtaactggctggactgtgagcttctgataaatgtataattgctggatttaatttcctagtgtgcacctgtgtcgtccataaacgctgccatcatctaattgttacagcctgtacttgccaaaacaatattaacaaagtggattcaaaggtaagaggatagcagtttgctgattaaatgtgcgtgtgtattgtgtatgctgtgtaccgccgtctctctccctccctccctcctttcctccccctcttttccttctccccgtccccaaacctctgctttcctccccctgccacctcccttccacattctttgaagccaagggttgtattagaatagaaatgtctctctccctttttttaaattatggcatttatatttctgtatttatgtggcatcatccctcctttgtgaggaccccattagtggttggctgggtataagctatatggattggttctacttatttggagagacttttggcagagtgaaaggagccctgaacttggcatctgacagcctggatttgaatgctgaatccagcctctgttagccatcttctctatgagctgcggcaaggcctacaatctctcttttcctcagtcttaaaacaggatcaatgtttccctcacacagtttttgtaagttaaacaacatagaattgatgtgatacatatgttaataactgtaaattatgtttcctaagtaaaaagattgctggctttctccagcctcttaagaaatttcagggaagatgtctctctctctctctctctctctctctctctctctctctctctctgtgtgtgtgtgtgtgtgtgtgtatgtgtataagcttcaacatcattcttgccactcatattgcattcatctgcaataggcatacattttaaattctagaggtaaaagcagatggagtgttgctgacatttagcagtagatttgcagaggcattggaagaatgactctggaacacaatggttctttatagtacacatataggattgctaaagagtatacctagaggtataaaccacagcttttccaagaaagaggccataaaagtttcaagaggagtaatgattgccctactccttgtcatgcatggatctgttgttatagcatcaaattgtggtatggactgcagagtacatgcctagtggaattatttgctggaaactgagatttaactcagattgtcagattgcaaatgccaggcaaagaaaggctggaagagctgaataagtagttactttaatgtcactttggaataaattccttctgtggttccatggcctctgagtctcttctttttatttttcttcccgtgacacaatgtctggaagaacttacagtgatagcaagtatatatagtgtataaaagacccatttaatcctgaagttaaaaggttctgggaaatagatgggggtgttaggggattggcaaggagagaaatatggcctgaatatgaaagatgaagtgaaaatcttaatttttatttctcaaaatggcaaatgatctaatgtgtttcccacatttctgtcttgtcctgttcattagaaaatgtgtttagtctggttcgtaagacctgagtaattaatcagggctgagtacagtaaaataatatacctagctcaggtgtcatagtgacactttgcatttgatgggctcctattacagtttttacaaaggacattggtatgacattttagctcttgtccctttatttccttttttacagattgcagaacagaggttcgggatcaacatcccacacaagttcagcatccacaactacaaagtgccaacattctgcgatcactgtggctcactgctctggggaataatgcgacaaggacttcagtgtaaaagtgagatgctgaggtgctgggtacccacctcttcatgggaacactatgccctaagctttcagaattctgtggactcagaatctgtcctagaactgatggttttagatatgttgtaaatcaacatcttagtcattttaaacttacatgtttcttgtcaggcatgtaaagagaacttcatctgatgccaacattttctaatcataggacattaagtcaaatggtatattcagtgatctagctcgctagctgacaaatacagcctagacactgtattttaataggtgtttggaagagaaaaagatgggatcttagtcagaaatggaagatggttgagtcaggtgagacactaaaaagaaaaaaataaataaaaatttcaaagaaatggaagttaggaggaggtgaggaggtgagatggccaaatgagaaggttgggttaagagtaagaaatggcagaatagatctgatgatctcaccagaaatcagcaggaatggagttgtcacagcataaaaagagctgccctgggtcttgtgaaagagattggagacaggggtagaatgaaggaagataaagccttgattgtaagcttgcatctcaccagctgtgcccagtggagtgagagtttggagctttggccctagcaaaggctctgagtgggtgagagctgatccctgtcctgttaggagttagggagctgttggccttgtgccatcttgtatggaaatgtaatgatctgactgccgtggggtgcacctgaagcctttcttatcagacacaccccaagtcgccagttgaggagaacaatggtgaggtagaattggcatgagtatagccagacaacttccattgactgcttggacttacagagcctgcttctgtcaacaaaaaggggccagtcacttgtctttaagaagggcacattcttctatctctgtagaacactaataatttttttctcataaaaccaaaacagtagccagctcatggataacttgtagggcgttggtccaggtgcagcttgatcttagcgtgacggtctcacctgggtatgggttcccagtgggaaatccctttctgccttgcattgttgctgatgcgcagagccatgcatggggctcatctgcattgtcctcttccctagtggcctgagggtagcacacctgcagcaatccggctcttgtgatttttgcctttatggtcacttggtggttttgaaaggcttctgtaggctcgtgtgtcttacacctgtcttcctgagaggggtgggtttcccatgaagcttaagtctcagggctcctctctctcaagggcaccttccaaagccctctacttgatttggtgttctttttcttaaagaaggcctcctaaattatgtaaattcaggccccacaaaacctggatctgtgtgtgcttccaagatggactgactccataaaacaggaatgtgttgcttgtcgcttcagtttcacctcccatcagcagggcccatgtcaaaaaactgtctcagaatttattccagctgataacgcctcagatccttcattgtccccaggcagcttccggtgcctcaggagcttagctttctttgctcgcctcttcaactgccatttgtactctgaccttcagaaagttttaaaagttgcctttccccactatgaagcagttagaaccacaggctgcaaatgctgagaaccacaggctcacaggatgcccatctctgtgctgtgaggcctgcccaaccacaacaatactcagaaagaaagctgcagatagaggtttttcttgtagaaacaccatttccatcctgtttgaacagtgatctacatgtggcatttaaactgctaccttttatttcactgttgagagacagaaaaaaatacagttgacatgattctttgttatttaattgcctgtgaattgccgctacgataaaggttttaatcttagatcatactaaggcagcaatgcctgttacatgtgatttagatgaatgggtttcatcaaatcatggtggaaaaaatgtatttgaaatatattattctttagtatgcttgcctttctgcttctgcagaaaacagaaatagataaaatgtcaggaactattactagtgtgagcttaattttatgagaaaatgatactgttcagccggtataattcctctgttataatcttttaggctattaaagttctctgttgcagcacatgttgaattggttcctttctgaacatggattctgttttccttttccctctagtatgtaaaatgaatgtgcatattcgatgtcaagcgaacgtggcccctaactgtggggtaaatgcggtggaacttgccaagaccctggcagggatgggtctccaacccggaaatatttctccaacctcggtgagactttgctttttttccatgtctcgtaatttagaagttgctcagatgtgatgagcccaaatgagagcatgtggcctcatcaaagttcctaatcttagcaaatacaataaacagacttattgcctttctttctttctttctctttctttctttcttttttcttttctttctttctctttctttctttcttcctttctttctttctctctttctcccttttttttctctctctctcctctcctttcctctcctttcctttttccttccttcctcccttccccttccccttccccttccctgtcttcattcctttttgagatggggtcttcctctgtcacccaggctggagtgcagtggcacaattatggttctctgcagactcgactgcctaggctcaagtgatcctcctacctcagtctcccaagtaggtgggactgcaggtgtgcaccactatgtcagggtaattttttatttttttttttgtagagatggagtctcactttgttgcgcaggctggtctcaaactcctgggctcaagcgatcctctcgctttggcctcccaaagtgttgggattgcacaggtgtgagccactgtgtctggctgaaatagcatttttaatagcaatttgtttcacggataagattgtatatacagttatatgacaagaaataatgagcatgagcaacaagtaataaacagaaagcaaaagaaggacttttttcctttctttccttttttttttcttttttcttttttctatttgttttttgagacagagtctcgctttgtcacccagcctggagtgcagtgatattcgctcactgcaacctccacctcccaggttcaagcaattctcctgcctcagcctcccgagcagctggaattacaggtgcccactaccgcgcctggctgatttttgtatttttagtaagacggagtttctccatgttggccaggctggtctcaaacttctgatctcaagtgatctgcccaccttggcttcccaaagtgctggaattacaggcatgagctgccacgcccagcctttcttttctgttttaaaatcagcttcctgtcactgtggtctggtgaaagcctaaaacccaggatcctgggttatgcttttgtctggggaccaggcaggacaggtgaccagtaactatgggcgtcagcgtcctcacctctaaagcggttcaacttgaagatctcagaggctctgcacagccctggagtccagcagttctgaagttttggtttatggattgtgaatttatcattcacattcagcaggagacaggagtctctccctctggactctcaggagtgagtggagttgtgtcagttgcagtgcacatgtttttgtcagcactctccctgaatgacctccacctgctgtcatccagttgagccttggctgcttcccaagcccatgtcttactgttgccttcctggtcagcgtctagagatgggaaatagccatgtaagatctgaacggtgtagcttggtgtccagttcaggaaaattatcgactcaactaattaatctctgggtgctgaggaagggaagtgcaattactgtgagattcttgataatcctgaaaatgtcagcaccaaccacctcatttcctttttactgaaggactcctgcctagtagatcagggactttcattgacaatttttttttttttttgagacggagtctggctctgtcgcccaggctggagtgcagtggcacaatctcagctcactgcaagctccgcctccctggttcacgccattctcctgcctcagccttccgagtagctgggactataggcacccgccaccacgcccagctaattttttgtattttttttttttttagtagagatggggggtttcaacgtgttacccaggatggtctcgatctcctgaccttgtcatcctcccgtctcggcctcccaacgtgctgggattacaggcttgagccaccgcgcctggcctattgacaatttattgaattgccactacgataaatgttttaatccttatattagatcatactaaatcagcaatgactgttacatgtgatttagatgaatgggtttcatcaaatcatggtgaaaaaatgtatttgaaacctattatgtaaaaaaatgtatttgaaatccggtctgtctgtcttgtgggtaggcgggcaggatgccaatattgtgcggggattgctaatgcatgggacagttatccctgaagagcagagattaaagatatcagcctgaactagggcttctgagatacaatgggaataagataagaataggaataaagatcatgcagcacgatctttaggaatggacagtgcacttgtcatttgaatcaagtatccttaatccatgacatccggtgcctggctggatgttagacttttgatctgttgtctagtggtagcttatcttataaatgtctcaaggtgggccagctgcaaaagtcaccttgcctttaggtagcaacatcctcaggtactcagtaggatggaactggaaagccaactgaggcaggcacacttaccttccattcattgtgttgaaactagaactctcatcatgctggtgagagtgtagattggtcagtcttattgtagacggtaagttggctgtgtatcagaagtcttcaaaattagcactttggcccaaggaattccatttgcaggaagttatcttaagaaactgaataatgataatgacaatacagcttaagtttattgaatgtgccaggcaccaatctaagtgctttacatgcatttgttcatttaggcctcctaatgactcatgtggcagatgctttaaccttctctttgtcagaagaggaaactgaggtagggagaggctgggtaggtaacttgctcagggtcttaggttagcttgcagagctgttattgaatccaggcagcttgcttgagagctagacccttaattactctgttttgaagatttgcatgaagtgtattcactccagtgttattcactgtggtgaaaaaggggagatgcctcatccttctaatggcaggggaattaataccttgtgagatatccatgaaatggatattgaatagccgttagaactcatattcttgaaagaaatttaaaggcatgaaaaatacccaggacaaatttttgaatacaaatgtatgttatgaaaccataatttgattatgtttttaaaaattaaccaagtataaaaacgtgtgcgtgtgtgttatttatacatggatatagatatctttggcagagggctggtgagattttaggtatttagatttttattcttcatgcttttgatcattgttctaatattcacattggacttttatttctcctatataatttaaaatattgattaaaaaacgttgcttcattcgtgtcctggtgctgaatgatgcttgaatctctgagtagacatgagaactgctctctgtaaaaagtggacactaggtggcgctcgtggaatgggaccttcccgtggaaagccaccgcagaaggcacccaagggaccacacaaggcattggtgtttccatgcacttccacttgagcgctaactgtaactccatggcttagacgtatttttaattgaccttttacacaaagcagtaagcacagattcagaagctgatactgagggagtttcgagtggcagaaccgatcatctgtcaaactgagttgatctttcccccacgttatactgggggtgagactgctcccagccaataaggtcttcttcgtgcatgggtgctccatgcttctgctgcaatttctgacttaatgtgttcttactctttcagaaactcgtttccagatcgaccctaagacgacagggaaaggagagcagcaaagaaggaaatgggattggggttaattcttccaaccgacttggtatcgacaactttgagttcatccgagtgttggggaaggggagttttgggaaggtgagtcttggctttaactgtttgggttgaagtaagtgtgctctgtgtatggggggtgtgtgtgtgtgtgcacgcatgcgcacatactcacatttctcatgtgccattctttcttcctgttgtgtgcacacaccctaagacccccaagaggactccctcatgctccctccttttgctttgccataggtgatgcttgcaagagtaaaagaaacaggagacctctatgctgtgaaggtgctgaagaaggacgtgattctgcaggatgatgatgtggaatgcaccatgaccgagaaaaggatcctgtctctggcccgcaatcaccccttcctcactcagttgttctgctgctttcagacccccgtaagtatgaatcacattcactgcaccaacagcctcttttcttacagagctgagacagtaagatactggagatttcataaagttgagtatcagaaattttgggggatgggctcccaaggcagggtcatatggaggtattggtgacttctgccaacctctggaggaaaaatggaagcttatgaattcaccccttccccttgtgctgtcctggggaaggagcaccgtgagggttgtgtgtcccaggattgaaaaggtcatcatacataaatcttctgtaggtgaagtgaaggtgaatgaaagttacagcagtctaagaacagagaaaatgccatgggctcattgtcttgatgaatttggctgtgactctgctcctaaatgctgggctggttctgacctgggcacaggagtttagaagaggggtctgagaggacccagagaggtaccttgatttggaacatcccagggcattgcttctggccttagcaacgaccctttgcctgaaaccatggactggtcttaagaattgaatctgtctgccctgtaatggcgtgcgtttaggaatgcttctggctgcagttaatggaacacttgaccagcggtggattaaacaataaatagaaaggatgagtttggttcattagtacaaactttttacttgttgtttcacataatgagaagtctggtggtaacagtgctacggttggatttgttgctcagtgacattggacatgtctttcccttggggtcccaaggtatttgctgcagccctagatgccacaccttggcatgatagcatccaaagcagaaagcataagggcaggggctgaagggcttcatggccagtccccttttctcagggagggaagatctttcctagacttgggtcaactgccctgtatgtctgttctcacattgctacaaagaactacctgagacggggtaatttatgaagaaaaaatgtttaattgactcacagttccacaggccgtacaggaggcatggctggggaggcctcaagaaacttacagtcatagcggaagggtgaaggagaagcaagcagggtttcacgtgacagcaggagagagagagagtgaagggggaaaagctacacactttcaaacagccagatctcatgagagctcactatcatgagaagatcaaggggggaaatctgcctcatgatccaatcacctcccaccaggcccttccccaacattagagattccaattcaacatgagatctgggtggggacacacagccaaaccatatcatgcccttagcaagggaggctggaagagcaaatatcaggccaagataagctggcagaccatgattggttcacaccaaccttgattcagcccctggagcagggcattctgcttttatttagaatcaggctcaaaattgggcttttggtatcaatgaagagggaaaatggccctggagaaggcaccaagagggagggtctgccacagatgtgtcagaatcttgctgtcaaaaggcattctgggagagtgaattctgggcatgttcctggcctgtgccaccatcaaggaagtaggggattccacgagagcgggataggggcatctgactggtcagggaggctggcaatacacctctagggaaggtaaagccatgctgggaccaaacgagtgaattagaattagttaggcagagaatgaaggtgaatatgtcatacagggtcaacagcacactatgggtctgctggtgagacagagcatcaggtgtgaaggaggctcagcacacacagcatatcgaggttgaacaggggccttgagaactgaggcagccgaggtgggccagggccaggccatgaagagccttgtaggctgtgttaaggggtttgggtttagtcctgagagcaatggaaagtcatggaagaagtggaagcagaggaatgacgtatcaggttgtatgttttaattatgaaaatctaatttcttgcgataggtaatataagtatcctccaaatattcatatcctttctccgaaagaaacaagtattgctcgttttatttatagcctttgagagaattttctgtacataaaagcatatatatacagcacatatatgcatacatgtttatcttttaaaaacacaaataatagtatactttgcccatgattctgtatttttaaaatttaattaatctattttttgagacagggtctcactttgtcaccaggctggagtgcagtgacggttatggctcactgcagcctcaagctcccaggctaaagctatcctcccacctcagccccctgagaaactgggacttacaggcacatgccaccacacctggctaatttttgttatttttttgtagagatggggttttgccatgtttcccaggctggtctcaaactcctgggctaaagcaatccacccacctcagtcactcaaagttctgggattacaggcgtgagccactgtacctggccactttatttttttaagacataatattaatagtatatattggaaattgttttgtatttctatataccaagctgcctcatttttaatggctgcatagtactccattttagaacatgacataattaatttaacttttcctcctctgttgctatgtattgtgttcctagtcttttatttcagtcattgttgcagtgagtccccttgtacttttgtctttgtgtgcttatgctggtgtttctgtatgacacattattagtagtagtattgcttggtcaaagggtatatgcatttcacattttgattgagttcaattgccccctcccccattgtggttaaagatagtgaacgttttattgtccatgtaccacacattgttctaagtgctttatgtctgttatttaatccttatagtaaccctctgaaataagttctgttattatcaccccatttcacagaggagaaaagttaggtacaaagaagcttagttcctaagtggcagagagcgtttgaagccaggtggtctgacggcagagtccaggcaggctcttcctatttgctgggctgcgtctctaaattcacactcccaaagcttgagtgagaaggtgcatttccccgccttcccatcatggcatgctctctgtcatttggatcatctcagagttagaaaaatggtatatttgaagttccaacttgcattcctctaactgtgagtgaagctgggcgttttcatacatttcagggtcactagtattcaaatctgtgttgggagggccacatgcagcctggagaatgggtggagcagagaagtctgggagcttggtgacaggacgcactgaaggagatacatggcttggactcccacgccaccccagcgttatcaagagaaaaaaaaatggggaggcagctaatggcttcgtgggcctcggctcccctgcgcgcctctcccttcccctctgctcctcattggtcctcagtggctcttgatggccctggagcccatgctgctcctgcccccatcctctgctttccctctgctggattggtccttggttcccctggagctccagttctccctgccccacactgctccctggagtagccttgaaacgacttccttggctgggcactttgccaacgtaaagcccctcccctgccctcacccccttgttgggctcttttcttggaatagaggagtggagttacagcttgaggcttgagagggatagctggtagctgatactggttgcccgccggggtttcaagcgccagcctcctgaacaccaccatgaacaccatgagtcaagccgcagagccaggtgacctctcagatcttcttcctagggcctgagccaaacatcacatggtttcctatgacatgaggttagatcatcttcaccaggtggtaacctttgagtcaagcagtcaactgatatttagtgagcttacctggtcttgcagcagcaatggttccaagttactactgctgaagcaaagaaagaagtatctcatacctaacaggggaatttgatctgtaaaaggaaattctggtgattataagcaaagatctcatcaacagatcatgttatggtagagtaaaatgaggaagtaacctggaacagattgggaacccaatcaatatagcatatgcaatcaaaatgttccaggaaaatgtataaattctacagtataccaaaattttagcggccacatgagattcccagtgtttagtgggtgaagcctttactagcattgaagtctatttttcctagtggaagttttatgtttgaccacaaggtggcagtcattaccgcaaagttacttttatttctccaccagagaaaccaaaggcatggaactgccattgcggtttaagatgtgtgtgttgtagtagatgtctccaaagcaaaggataaagggaatgtacccctgctttaggctaaatgataaagaagtagtgggaacccacttcaaagaagcaagtgaggctgggcgcaggcagcactttgggaggccgaggtggggcaatcacttgagcctaagtgtttgagaccagcctggccaacgtggtgaaaccccgtctactaaaaatacaaaaagtagcttggtgtggtggtgcatgcctgcaattccacctactccagaggctgagacaggaggatcgctggaacccgggaggcagaggttgcagtgagccaagatcgtgccattgcactccaacctgggtgacagagcacgactttttctcaaaaaagaaaagaaaaaaaagcagcaaaggagattttctaatgctgagatagaggtatacaattttagttttgctgtcgttgttgccttctttgaggtttgcaaggtatcggactccacagtacacatagcatttgctcgctgtgcattcgtctgttggaagtccttatttactgttgtaaaactatccccatttactgttggaaaactaactataaagaacagaaagtgttacttgctatgagaagttacagcagaaagatgcttactttttagctgcccagtgttgcaggccctggcttctcaagtaagatgctaatcagtgtgtaatgctgaactgtgacagtctcccctggagaatttaggagtgagagggggtgttggagccactctacctgcaaagcatttcattgtgagggcctttgtaaaaacagcactctcctcatgcagccctgtggaatcagtctctctgaagcccagagcagggcagtaactagccgaggatcccttagattgtaagtggcagagacaaagttcaagtttaggtcaggctgactctgactccatatgttgtcttattccgcatttagttggttgattcagcctcggcttaagcacctcctatctgtcttggctcccctccaacctgacaatatggaaatggcattgcccttgggaacagaaaacctgaactgtgttttagctttgttttccaccatctaaatggcttgagtctgtcctaaaattcctttgacccttaaagttcttatcattaaaatgaaaacaggatcgctgtgagggtcaaatgagagaatgcagaatattttgtacagtgcgaagtgctgttcaaaagtgagtcagttcaactgtggtgatgaccccctccatcctcacaccaaaggaaaaatgtcccagggcttcccaatggccagcccagacacccacatggaggggacagcaaacattgagaaggtaagtattttataggtccttttgttcttggcaaaaaggaaatagtaagcaaatttcaaatatttgataatttatcaagattgctacaaaggtttatgaacccatagattatttcccctttttttttataatcatatacactgcttacaagtatataaatgggcatccttatctgtttctgatagcactgcaaatcctaatagtttgtgactaatttgataacctgtactaaaactcacaaaatgtatactcctggatctgtttttctgataatctggactacaaaaataatataaagaataaaatgttattcataaagatgtttaattttcagtgctttgtttatatatatttttttggtcaacatctctctaatcctccagcctctggtaaccactattctattctgtttctatgagtttggctttatttgattacacatatcagtgagattaagctgcatttgtctttctgtgactggcttatttcaaataatacaatgtcctccaggttgatccatgttgcaaatgacaggatgtctttctttttaaaagctgaacagtattctattgtgtatatattccgttgtttctttgtccattcatccactggtgaacacttaggttgattccatatcttggctattgtgagtaatgctgcagtgaacatgagagtgcaggcatcttttcgacatgctgatttcattttctttggatgtatatccagtattggaattgctggagcatatggtagttctattttaattttttgaggagcctccataccgttttccaaatgagtatactaatttacattcccaccaacagtgtacaagggttcccttttctccacatcctcttcaacacctgttatttttcatcttttcaataatagctgttctgacaggtatgacataatatctcattgtggttttaatctgcatatccccaatgattagtgatattgagcattttttctatacctgttggccatttgtgtgtgtggttttgttttgtttttttttttacttttcatttatttttactttaagttctgggatacatgtgctgaacttgcaggtttgttacataggtgtacatgtgccatggtggtctgctgcacctatcaactggtcatccaggttttaagccccgaatgcattaggtatttgtcctaatgctctccttgcccttgccctcccacccaacaggctctggcatgtgatgttcccctccctgtgttctcattgttcaacttatgagtgagaacatgtggtgtttgattttctgttcctgtgttagtttgctgagaatgatggtttccagcttcatccatgtccctgcaaaggacatgagctcattcttttttatggctgcatagtattccatggtgtatatgtgctacattttctttatccagtctgtcattgatgggcatttgtgttggttccaagtctttggtattgtaaatagtgctgcaataaacatacatgtgcatgtgtctttatagtagaatgatttattaatcctttgggtatatacccagtaatgggattgctgggtcaaatggtatttctggttctagatccttgaggagtcgccacatggttttccacaatggttgaactaatttacattcccaccacctgttggccatttgtatgtcttcttttgagaaatgtctattcaggtccattaaccattttaaaattgggttgtttcttactattaagttgtttgagtttcctctgtatttggatattaactccttatccagatatgtgttttacaaatattttctcccattccacaggttgtctcttcactctgttgattgcagaaactttgcagaagctttttagtttgatatagttccatttgtctatttttgcttttgttgcctgtgcttttacggtcatattttaaaaagccattgcctatgcctgtgtcacagatttcttcccctaagtcatcatttggtaattttacagttttaggtcttacatttaagtctttagtccatttttcagtgatttttttatgtgacgtgagatgagggtctgtttttattcttctgcatgtagatatccagttttttcaacaccatttattgaagggacagtcctttctttgttgtgtgtccttgggatctttgttgataattaattgattgtaaaggtgtggatttatttctgagctctgtattctgtcccattggtctatatatctgtttttatgccagtaccataatgttttgattactgtagctttgtagtagattttgaaatcaggtagtataatgcctccagctttgttctttttggtcaagattgctttgatgtcgtgcattatttatagtaggaaaatattagaaacaacttcagcatttagcaatgggggtacacttcaataatatactatttgatgagaattttcagccagtcaagagataattttatgttacgtagttaaattgtcaggtaccgtcgtaagcacctaacatgtattgtttattgcacgtgattcctataacagccttataagataggtgcaattattatcctcattatgtcaaatggaaaagtgagacactgagcagttaagtcatttgcctaaaatctatcacagaaaatggtaaaaataggaggttagaatccaggaaataatacagaggttatgatgatgaacagtctgtatccaagtcaggttctgcccaagatagtgaattggcagacccgttcccctccccagcctcaaaaaagactgccaggaaattatgccagtaagctatcagggactggattaaggtagtggaattatgaaggatttttttcctatttaccaaatttggtaataggattacatttcttcaacaatgggggtaggaggaataagccattattaagtcagggaccagacccctggtctctcagaacctgggatacggcctagtacatgctgtctccctgactcatttatggcgaaattcacatcacactccttttatctgaatcagtgagggttgtgtcagcagctgagtccctggcatggatgtgctggaatccaggcctcccatcccccatccccggctcgcaggggcctccccttcggttctcctcctggagagagaggaacaaagactagggggtgagggatggaggggggctatcacaggaagggggagcagcaaagtaaatattggtctgaggctttgttcggagacccagtttatggaagcaaaggtttccatttggaaaacagaagacacttgtggccagtgcccgaaacagcctctcactagcaggccctgggactgggtgagagggctgagcgaagtactcctcattgttttgggaatgccttaagtttgagtttaggatccaccgctttcaggtgggccacaggacgctccgatgccggtcgcttttgcctcctcccgctcctctgcctgctggggcgtctttacgatgtcagcctgcaaggatggagttcctggcaggaccatagctttccgtaagaaaccacttctcaaatggccaacaaagttgaaatcctggtttttgaaggtcagaatatcttggaatcttgtgaaataaatgccatcgctgcatacatgctggcacaaaatgatctcacgtgtgctcagtgtacctgcagcttgagtgcaaaggaacattctttcctttgtattactttctccattgttgttgtattaaatattagcgaagaagtgggagaggcagagagcagccaggcagcaaggtagtcatgtggccctggaattcatctttcagaattttcccaggcagggaactgcactgtgaccttcagcacaagagctctgagttctaattctggcttagctggcccacttgtctttaagaagttcccctgccttttattttgagataagcctctccacctaaatgtgtgttccttacttctggacctgttggccaacgtacctttagggagtgcccctccagctggcttcaacatgtggggtcgtagcggggctgcagcctgccctgtccagctctgatgcttcccagcgcctccagctcccctttcccttcctgaggcctcactgagcatttggctgagcccctgccagccgctggatgtggggaggagaaggcatgctcagaccctacagtggcattactgcttgtgctctgtgttgctgtgacacccagcgcaaggggaagaggccctgtgacagagggttagacaaggagaaggggaagtatagccgaaaggctgggagactttcccctttacaggcatgggaattctgaagaagcctctgttcatgccttggggtagttggttgattcctggggactgaatggtgcccactttgcaggaggggatgagcgaagaaggaaagggcagttcatgagaccctagcatatgtcctaggtgctcatattcattaccaatgtctatgaaactaaactgcacattggcattccgtaaatatccattgaacaaaatatctcatttaatacccaaagcatccagggaagagtatcatcctcattttaaaggcctagaaactgagatccagagaaattaaacaacttgccccagatcacacagtaagccagagtcagtgcatggattcctgacctgactgtcctgccaaataatatacaagccatttccattatatcacaaatagaagttttgagtctctaatatgtacaactgagaatactgtcattagacgggaatagaggcagttttccacaataggtggtttttggccttttgggaaatacctaaggatatttcctctgatctgtttggaaccaggtttccccctttccctgagcagtggctgctacaaatacaatctggtttgctgcgggtcatttgttgcagtttgcctttggctcagatcaaaatagaaaatgagccagaacatggtgtttcctgtctctgcatgttcctaccttattcatagtgttccatcttttttttaggttattaattgtggatttatttccatagtaagacaggatctgactttggggccaacatatgttggacccgcctccttctctgctgaagattctctgaagacaaaatgtgcataggccttctccaggatctggatttttgggggattatttgggacctttgcttctgtcctctccggctaccaggctttctgaccttctgtagctaaatagggccacaaaaatgaataggaataagagaacctgaagttcaagctgtgtctttggctctgtctctttggacgcgactgccaagatatttggtgtgacaaaaggatttgaaatagttggcctgtttttttcagtttgaggttgttctgttgtaactggtcttgtttttggtagccatcattatcactgacaacctagagactgagtagaccgccacctccatgtctgctaagatagtataatttaaatctttgatgtaaccagaacacaacccaggtcacactttgcccctgtgtctcatgatgactgaaagcttttggggtgatgattgcttggttatggttttcctggacccaacttggaacccttaaagcctgccaagttatagatactctggcttcagtagggccctgtattgaaacaccaagtgccaggactgctcaaaaggtgaaaatgagatgggtgttctgccaggtggtttagtgaaaaatcagtcaatccaggatcccactgactgaatgctaggcaaaagaaacagttcttttatttgttttcattttttgcagagttggaggtcttgctatgttgcccacactggtcttgaactcctgacctcaagcaatcctactgccttggcctcccaaagtattaggattacaggcatgagccaccgtgcctggctagaaacagttttttaaaaactcattctaattaggaagagaagaccaatacacatggaagaaaagtgtacagtagatagcatgtagtaaatatagtccttatgctacaaaaggaaaggtagttgaaaatgaacattgggttctaggggaaactcttaagtatgtgccagtctgtgctcagaagtacaacctgattggctgtgagactaaagccaactgattgctttaagcagcccctcgggtgtgggctgcagatggttccctaggaagctgggttgagtcctgctgtgatgagctgggactgccaggtaggacctgaagcggctgccaaggggctgccaccccaccctgaagacaaaatcatacagtctaaaaacctgactgctttggatcaaaatcataccctgtaatatgttctagtttttaaataacttgggttttccttaattacttaatctctgctgagaacccagctgcatccatctcttctaggtccggaattatccacagcatctcatgagcagaaacagccatgtcaacataaagttagcagactcgtcgtgtagagagttgtgcactggcaggttaggggggaaggtgttcattcattcagcagatatgcactgagtgcttgcaaggcatagggctcgccttcaagccttgaggacgcagcagtgagcaaaacagaaaagagtccctgccctcatgaaactgacattctttgggaagcttataagcctgaagctcatgaacagattgttcatcttatagtctcagctggtgaccctccatggcagctgctccctgtggcaattcctggattttcctttcagacaggctcagagccgtcatctgcttgaagagtctggggggcttgtctgaagctgcatttgcatatcaagtgctccgttatattttttgtaggatgcagtgagattactggggggaggcgtagctcgagtccttggtccttggtactgtctctggttagtggtgggttctgggtcactattataggggttgggaggtttaaagcaagaggcagaatggcaagagtagcagccccagtaggctgcatttgctcccgttgccacttgcacgatctttctcatcccgctggcaagactagtctgttcactggcagcccctgcatcaggctgtgaggacgccctgtctacctcccgtctccatccctgtattaacccatgtgctatcaagagcgactgactctttctttacaaggttctttttccttccttccccgtaagctaatagtttggctcaggctcgccagcagaccctccccttttttgctggagggctttggcatgccctgtcttttctttggggccacccagggagttcctgtttcctttctgtgggaggcttccaattcttagttatagcaaaagagcctgtattttttagctcactcctgcccacttctggtcttgaatgacttatggcttaggtgttacaaatgggagtcctggaactcttcccagaatctcttaattccattcttgtggtatatgacgttctaaacattaaaatgatgtaatatataactcccaaccaaaacaaaagaggagatccctgctagccaaattcttccctcctctccatacacgtttttccgtcgctgtgcagtgaatcctgggatgtgtttgtcagtcagcttccttgttcttctggctcctcactccccagggaccaccgagccacagactccacggttttctctgagggcatgcgaagtggaaactaacctatccctgcagccagcccagaccttctacaatcatatctaccagtggtgaaaggcagttcaagatgagttggacacaatcaagaaaaatagggaacaaatatgtcatagctcctctctgtctgctgtctatagaaggaggctaatagcagcagatctggtgagggccagtggcccatggacctgcctgccccaaggcagcaatcatgggagtggggtcaaggaaacactaaggaggtacacctgataggactttttaaagaggagtggccagggttctggccggtttgaagcctggagagaatggaatggcatgagttcagttttggggacattcagtggtaagactggtttctgttttctcttctggaagctcatagatacaggatctgctcattcacttgatttgtgcctcttatttgggcttcaggacacatctctggccaatcgcaattaaaacaccatgcccagttagccatcatcgccactcagagctgtctgctttaccgggctaaaaaaaatgatctttatcaccagttgtaagtgacttaaaaaaaaaaagtacccttccacattgctcagaactttgccgtcaccttcttgaccctcaccaacaggtcaggttgttttaataatctagtggctggtaagctttcatcctttacaattaaaaaaaaaatcactgatttgcataatgcagtgccatttgcctactttgttgggggtgggggctgtcctgttcattgtggatgtttagcagcatcccaaaataccagcagcacctctccagttataacaaccaaacatatcgccagacattggttcccaggggggaagaatctcccctggctcccttacatgactgtcaggtgattgtctttggtatgaaaagtcaaatgggttagacgatcacttttctttttatagaagccaaagccaaatgtgtcagaccttctttatgaaaatataagcgttattttttttctgagtttgtagaaaggcaaagttcctgttgggggctcattacagctgttggtgcctgcactgacagtggcattgttagggatggagcccctgagctcgggggagacagcggaagcgtgcagcgtctgtttaatgtgagtgagggctggcatgctgctggcagctctcaacagtgaagcctgctgctcgataaggcattattatcagagcctgggggcatccagggagcaaaagattagctgactgagcatatatctaaaatgggttatttttaaaaagcaagcagtacaaatactgcagcttgtcttgttttagcatttaataattacactttcactttaccagcaaggcattgagtcagtggcattttatgaaaagcatcctcccaaacctgaactttgtgagtcagattcccatcctgtgtgtggtacatgtggttggattgtacaaacagataatcagagttttgcaaaatgtttcccaaccagcatgggaaaacgtgctgatagcaatatgattgggctttgagggagagccacttgctggctttttttcttttgtttcccatacatggaaatgccatttcaacttgaaatgtggataccttaccagaggattgcttgagcccgggaggttgaggctgcattagcgaactgggactgcaccactgcattccagcctggatgacaaagtgagactcctgtctcaattttttaaaaacccacacacaaaaaaaacaacaaaacaaaaagtagaaccttaaatgctatcttaaggctgaatagtctctaaatattgaaagtagaccctagccaaaagagacattacctgtttctgtaatataatgaatggtattagtgtacttatcttgcattttaaattcaattctgtaaatgtttatggagcatgcattatgtgccagggatgaagacacaagaacaaaatgtggacctgccttttaattgcttacagtcaaaggtcatgataacaccatgtgatggagagaagaaagtcatgattgatcctcgtggaggttggaaggacttcccagaggaggggctgtgtgagctgtgttttgaagatgaatagggatcttatagtcacaagaggagggcatagactcccagacagaggtaacagcagtgcaaaggcacagaggcttaaaattgcaggatgtgcccaggaaaccccaaatgactagatgaggcagatttgtaagaagggaaatggtggtggttggcggcgggggtaggggggtggtgatgaagaagcaaagtcataatgggtctgatgtcctttgctgaggagcttagactaaactgtttaggtaaaaggagccagcaaaatctttaagtgagggagtaacataagatttgcatgttagaaggctctctctggctgctatgtacagagggaggctaatggcagcagatctggtgaggatgctgggcccgtgatctgggaacttgcctgccccaaggcagcaatcatgggagtggagtcaaggaaacactaaagaagtagacatgataggactttttaagtgggaatggccagggctctggccatttggaagcctaaagagaatggaatagcatgagttcggtttgggggaaattcagtggtaagatgcttgtttgtcagaaacacacttgagatgggagatcagtttggtgtcatccatgtcctcttggtaagtggaaactataatataaaatctttcaggccaggtgcagtggctcacacctgtaatcccagcactttgggaggccaaggtgagtggatcacctgaggtcaggagttcgagaccagcctggccaacatggcaaaaccctgtctctactaaaaatacaaaaattagccgggcatggtggcacgcacctgtaatcccagctactcaggaggttgaggcagggagaatcgcttgcacccgggaggcaaaggttgcagtgaaccaagatcacgccattgcactccagcctgggcaacagagcgagactctgtcttaaaaaaaaaaaaaatcaaaaatcttttagtagatgtttatagagagagaagagaggagacttgaagaaggaattctaagtaagggttaaggttgagtggaaaaaagaagaagaatcagaaggaagtggtttcatagtaggataaatcaagtgctgagatgaagtcagttcactaacagactcagagttctattggatacggcatgaggttcttggtgtcaccatcttaggatctgctcatttttggggttttaagaacctgtctgaactccacttagccaactgaagcttgccttcaaagttaacacaatgtgctttctcccatataaaccttttaagctgtttctgatgactgttccccttcctgttagagctccacctcttttaatttagcctccatacctttagagtaaggtctgcaactttcttccttaattgacagtggagatcaatatgtaacccagattgcaaaaatggtttgggaacactgcatgttctcactcataggtgggagttgaacacatggacacagggtgggaaacatcacacactggggcctggcaggggatggggggctgggggagggatagcattaggagaaatacctaatgtaaatgacgagttgatgggtacagcaaaccaacatggcacatatatacctatgtaacaaacctgcacgttgtgcacatgtaccctagaacttaaagtataattttaaaaaaattttttaatagtttgggaagaaattgtgggcatgtcatttgcttgaacagattttgttccccagccagaggaccagagaagagtttgtcatggctacagtggaggaatcaaactcagaatagcatgtgaaaggcacattccacacagaaacttcggcccgtgcatcagcactgcagacagggggagaggaaatgaattctcagccagtagattcccaggcatcaccttgaggcagatatggcatattcttggccatagtctctacttctctaactgggcaaagtgtctaatcaactataacccaaaatatcttcccacatggcataagtgtcgaattcatacatagatcagagggagaaatgaaattgtggttgtcttaaaagtttacacagtttagggatctccatcatgaaaaatgatctaaataaatgaaatggtatttttactctttatcctacaagccctatacaaactaagtccataaatatcctatttgatgcttaaaccaaaagctttataaagagaatttcactatgtgaaataatgacttgaagaaatcctattgtggatgcttttgttaagttgctaaaccttttttaaaaagtagataatcatccaagatatcttctttgtgactcttaagttttagtgtatttcaaatgtggatagtttttgactaggaggtttgttcaaacgttcttctcgaccactagggggtgctctaaaggttagtgatgtctaaatgattgaccaatcaattaaaacaccgtgcccagttagcaatcatctccactgagagatgcctgctttaccaggctaaaaaaatgatctttatcatggcatagagactataaaagctgtgtccttttattttcattaacctaattagaagtcaagctaattgtaggacttcatagaactggcatcgggaatagcatgcaactgttaaaaaaatcatggtcttgatgactaattatatcaggaaataatatgcaatataaatgaaaagagaagtgtatgttttttactttttcctttctgtttttaaaacatgctataaaatgttaagtataattaggacacaaaggaaaaattaaatctagttaacattaccttgaaaacttcttatttgccctgaaatctccagttctttggaagctaaaagcttgagacttctatatctggttgtcaggattagggtgattttatttgaattttctttattttcttctcaattttctatctatttactttgtaattacatttgaactatggatatgtaattagttttataaatagaaaaatcaaagctttataaaggaaaatatagcatcagcagacctgattgtcctacttaactcttccacaaactgttttaactatgggcaaggtacttcacttctttgccctttgcttctgtaaaatggttgggtgaaacgaatcttggcagtttgttccagctcttctaaagttccattttaaattttaccaggagacaaaaatggttcctattatgttcactcttgaagcatttattaaccctcacaattggccaggcactgtgcttggtgctattaaagatatctcacttagtatctgggctctgccttcaagggtttccggtcccccatggaaaagaagaccaagtgcacagatccatcccagccctacacaatgatactggaaagctgtatgtggaccagaaatgccaaaggaggttccatcaggaagaggggacttgtgctctgactctgctgtacccctgatcatatgttaccacttatttatgctttaaagaacatcctggcctggatgtttcacagtgtgttaaactgcaaggtagatttcctctttgtttccctggtctactgtatatatgccagtaagccttgtcaggtttcattatgagagatggctataatgcatccagattactaggaaaacacttggtctttgaaaagagctgtgtgtccctctaggtttgaaatgcaaagtcctaaggctttgttatattcaggacatatttcaccttcccaaagactagtctcagctcagacaggatgtatcttgcctgtgggcttgacacaggggttgctgggtgattgaattaacctctgacatcttctgggctgtgcaaaatgataagttcaaaaaaaaaatgcagccattagactccttctcattgtttcttccttgaagcctttgtaatctttcttaatgtggttaaattcaagttatttccagttcagacatggtgcaatcagatttcctcatgcgggtgcttttccactgtgacctctttgacgtcagtaactgtttcctgtttatttgaactccctgctcaccctgtagatgactttgtctgagaaaaataataaagcaacggtacttaggagaagttcaacactgctatctgttacggagatttccttctcctttcccccagccgtcaatagcactctgcagcttttcatacagcatgagcttgttattcatgtagaaatactccaaggcagttcttagaacttgggtaagtaagaatagatgtggctcccagcttaacattgccttaaagcaatagctacatttttcataacttttacgtgttatgtctatctttgaattatttccaaaaggtaatctgcatcctcactataattctgagtatggtggctatttcctactgccttggtttctggaatgatacatcttcaaatgcagtctttaaatcatagagacaacagattttttctttaaatggagacaaatctttgcaatctggttctgagattgaatcaactttatagaaaggaagaataactgctataaaaagtctcgcttacagtaatatgtttttagtacataaggagggcatttgttttgcaataataattattataaagcccctaaaatagaaaatatgaattaccagtcagtgttagaaaacttatcagaactgaaacctttgttagtatgttttggttatcaaatctagttttgtaaccccttgcttagcaagcatttcccagaaagaaaagtccttacccggtcaaggccattaccatatagcatcgggaaacatccctgtgtcccaacagctgggctaggactccttccacctccttcgaccctctatacccttgtcccacactgagggttgggggagctgctgcagttgctgtttcggctgctgtttcattcctgtccacttgtgagtgtgtgtgtacctccgccagtcttggaggtctgtgaaggaggcctcgagacccagtgcatgcagctcactgccacgtgtgccacagccacagccaaggggccttcctatgcctcatgcatcaggccctttggagccctgggagcagacggccatggcggctgaagctgcagtggatgcactcatgatgatgaggataataatagttgctaacatttcttgagcatttcacttatggtatgccagacactattcaaagcccttagcttaaatcatttaatcctcacaaacctgtgagttgggttgtcttattatccccattttgcagaagtgagttttgtgagagagaagctaaatacagcacagcaggagttgctcttggacctcaagcatcctggcccagagcccaggtgtcgccactgccctgggcttcctcttagtcataccagggacttgggcactgggcacaaaatctcctctttatataatgtagtggtaccaatagcttctattgattgagattcttttctgggcttggcactgtatgaggcacttggcttctggtttaatctttacatgatcactgtagttatagatgttattatcccagatttataaataaataaggaaacttcttaccccttaaaaatgggtgtgtgtgccatgcatggttgctcacgcctgtaatcccagcactttgggaggccgaggtaggattgcttgagcctaggagttcaagaccagcctgtgcaacacaaagatacccagtctatacaaaaaattagccagatgtggtggcacaaacctgtggtcccagccgcacaggaggctgaggttggaaggatcacttaagcccagaagttcagcgctgcagtgagccatgatcctgccactgccctccagcctgggtgacagagcaagaccctgtctcaaaaagaaaaacaaaaattgtgtgtattttagctgaaattctcctggtagcagaaaatttacttcaggtagtaagaaaactttcttaaggctatgcaaaaaaaagaactaaaaataaagattcagaggtacaacggatgtctcatgcaacccaagggcaggagttggccagctctctcggctgatctgaaaccagaaagacatgaggaaccctggcagttttgctcttggctcactcaccctccctgatctcttgtctctgcctcactctatgtttctgcttcattcttctccttcacccacccacctgtccatccacccacccagtctttctccactctcttatacccaggcatttcccacgtttacactgcaaaagcagtttccgtttcctaactcatgtttcctcagttcctgcacacagcctagactaaattaaaagctttttacctcagtttcagttttctggaaaagagactctgagcaggtgcagcttgatctaactggctgtgcacagatgctgagcgtttacccatgcggccaggctggagcatgggtaaatgctgaggaagggatcaccatgagctgagcagatgcctccaaagatgtttgccccagtgaccttacaggatcttgccctgcctggtccatgctcgctctccagtcactttccttagttagtatcatcttgtcactggtaccatcctggcatagcactttcatccacccggatgttatgtctcttgttcatacaaattgcccatcagctttaactcctatcgaacagcccttaatgagggggccttagggaatgcaccttacttatactgacagccattattcgggggatatttttagccccttgggcctggggaaggaatagttctgaactgatagccagggcagagagtggacccagactgcagcaggtcagtggcatcagagcaagtgacgacaggaattctattatcaccaggcagcagctcctctgcctcccacacctgtaactcacaccaggtgtgggacaaagggatttctgagttgctttcactcccaccggtgttcatcaccccatgttaatgacttgtacttgtggttggctgaatcagggacaaaagagaggagcagggacaaagggcttagccacttggctttagaagtgatgttaaaccggtctcctggccttgagatttcctaccacacaggtcagggcagacttcacctgacagaagccaaaagcctcaggtaaagctgtacagatgtgcaggctcagtttctaggaaaatggactttagaaaaaccaaaatggttctatgcacaggtttaaatacagaaacagtcatctttgccatctctgtctagagtgggatttgggaaacccctctctgccataggagtgactcactacaaccataatccatcttccagtacttccctaaatgcaggatttccaaaaaatgcttcacctagttgcttcacaattgaatttgtgaagcatgatttggtgtttgttgagtcatcagtgatactaattcttaaatagcacagactgagagtagagctgtaggtgagaggttatcttttgcctccttttagagcttcaaatacaggtctttgctttgtaaagggcattcactaaatatgagaagttttactcctttggaattaattttgctggagtgatttgcttttgtagctgatgttgttttattctatgtggcaagttccaacattactggagtctttttcaagccaagcaccatagctgcacctgttttaccccaggcactgggcttataattctagtagagactggtagtgagtgatcatgtttattaatggcagcagagaccctgcacttctcatttgtgggtgacctgtgaaagcacccctaagtagctttttgctttttctgcatttcattttgaaaacagcagtacagttacagcgaagcctcacactcacccactccagcgcttgacaacctgcctgccttcgcagtccctcccgtctgcctgacatcttacacttcaactgcacagtcttcctgacacctcccacctcagtccccactccagcctgacttgcataccctcatccttctaggctggggaattgactcctctcagaagcttccccccaaaccccacctgccaaattccacctccacctccaggctgctcagatgccctgctcggtgtccccataacaccttctgtacctctccactgcacttaacacactgtggcgatgtgctgtgtctgcatgtccatgagcttactgagagcagtgtggagtcatattagttttaggagactgggtccttacccaggccctggcgtaccacgtgtgtgtttagtaaacatttgtctttgttcagaaccttaaaggaaccaagaagatctctgcaagctgtagtagatgtcgtaaagcctgcgcaccaggctccaagtggagctgctgggacctgaaccagagccagccgattttcactgtggatgccattccaacaagcctggttacctcaggcagcagaaaggccattatgggacatgggtggttactcgtgtcccttaataatgggcaacaaggatgcaacaatttctttttgtagctgctttctgactcccattgcctaaacaagggctctctcaaacagcctcacaactgtgtctttcccatgtcttatcttccatctttcagatgaaaataagaaaaacatggaggaagcacatgtgactttagtttgcttctaattgcaagagtaatacacactcatcatagaaactttgaaagatactgaaaggtagaaaaaagaaatgtcaccccgatcccacaacaaaaaactgacttctgtcactctatagccatcttttttatcctttctatgcatctgtctgcatttttggctataactaaaatcatcctgcacattcacgtttgtgatctttttttaaattgaaaatacctacatgagagcacaagcattggcagcttcagcagcagctatcacttactgcacacttgcccgaagggacctgaggacatacttaatacaattttacttctgatgatgactcctcaccccaccacccaccacctgatgatgtgtgggtcttctttccttttcctttttttttttttttttttttttgagacagagtccccctctgtctcccaggctggagtgcatggcgcgatcttggctcactgcaacctctgcatcccgggttcaagtgattctcctgcctcagcctcccaagtagctggaattagaggtgcatgccaccatgcccagctaattttcttgtacttttagtagagacggggtttcaccacgttgcccaggctggttttgaacttctgacctcgagtgatctgcccgcctcagcctcccaaagtgctgggatgacaggcatgagccaccacgcctggcctggatcttcttttctaaacactagagattttttgtcgtttatctccttctcttcaaaagtaatcttggagaaattgctgccaaatctttgcctctctgcagcaaacattttaaaatggggtgaacagaagtgcaggtcaacagagggtttcctcacagcaaaaacattttgcttgttgataaacatgtctttgttttttatacctggtgacgttatttgaggtctttgataggatggaccagtactctgcattaagtcgtcgtcgtgtctcagctggcctgtgtctcctgcctgcttcaagagttgctcataacctgagggctgtgaattacactctgtgttccaggtggtgccagacaggaggttagaaatgagactctgaatgaaaagaaacaggtacagcagaacccatctttctggaattctaaagcttatggtccctcactgtgtagcagaggtgaatctgccagagtctggcattatctgagaatctgcctccagggctgtagatggggctgggctaaagcaagactagagggcaggattttctccccccagatctggaatttagcccacagtctggcttttagattttaggctttcgatgcctactgccttaaaactcttgccaagtgcgccacttatagcagcctaaggaatggccacttccccactgacccagttccagtagccaggtgttcagagcaattggaattcatgtgactgccagtcagatccacgaggaagatgaacaggctggttaacgaaaacatgtaagactgacctccttgcccagagatgattcagggtggctttttgtcttagtcttcctcaggccatcagtggccatccctccaaatggacagatacagcattggcataaaaccttactatgcagatgcagctttttgggatgtttccggtgtgtgtatatcctccgcccaacctgttgctaacctgctaattctaccttaatccttcccatttagaaaatacaggacagccattgctcatcaaagcttgtcccacccaattctgcctctccccttgtcagtcaccctcaaatgaaggccaggagcttaggcagatggcttgctgtatttacatagtttgcctgttggcttacattggccaacccgaagagttgttttggtggtggtggtttttgttttgtgaatcttgccattccttcttcactattaaattcttgcttcgcttttagcagaaagaagtgtttaataaattcaggggatttttttttcttctaattaaggcgttagttaaaatagggcataggaggtcataagccgtgcttccttctgataggggtctgcgtggttacaccaggcttgcaatgggagctgagcaggagcacgcaccctgctctgcccattgttcagctgtgaatgtgtggaaacaccctgtgcaaagccggtggcacttacaaccacaaataaagataggttcaaggctgggtgtggtagctcatgcctgtaatcccagcactttgggaggttgaggtgggagtattgcttgagctcaggactcgagaccagcctgggcaatataatgagaccccatctctactaaaaatcaaagccgggtgtggtggcgcacgcctgtagtcccaactactccagaggctgaggtaggaggattgcttgagccctggaggtcaaggctgcagtgagccaagatcgtgccactgcacttcagcttgggtgacagaatgagaccctgtctcacccaaaaataatgataggttctgtgtatctgcatccgttggtaaaataccactttcctcgcaaaataatctgcaatcccacaaaatggtatcacggggtcccaagtcgatggcactcatcctgtgggccttagctcatgtttcccttgctcagagacgtcgcctgacccccaggcaggtgaccagatatcacgcttcctctgcttttccttcacaggatttaccagaatttgtcaatctgcttgtgtcacttttttttttttttttttttttgagtaatgtgtttctcacaccaaactctgtatggggagaggctgtgtctgctctactctctatgggatcccggctccgaactcagcaccagctaatcaggaatttcataaatgtcacaggaaggagtgaggaaacccatttatcttagaggtgcttgaagcaaaacgttttacacttagataaatcttggatcactttttaaatgagacctacacgtttctttcatgaagcagtcatgatttccatagcactttattcacactacttgcatagtatttagtacactgcatagtgacttttaagagtccacttttacctgctaggttgagagtcacttaagggggagatggcatctcgctcatttctacattccgactcttgactcaatcttttgaaggactgagtggtatttccaatgtggatgctactgtgaggctgtcatttggcttcctttttttttttttttttttggaagaaggagtcttactcctgtcgctcaggtgggagtgccgtggcacaatcacagctcattgcagcctttacttcccgggctcaggtgatcctcctgcctaattttttttttatttttttgtatagacaacctcttgctatattgcccaggctggtcttgaacccctgggctcaagggatccacccacataggcctcccaaattggtaggattacaggcatgagccactgcacccggcctccacttctgtttggctgacttgtctaaaggggtgttctttttctgtgattgttctctgcccatttgtgagaactagagcacctgctaggtgtcctttactttgggtaattaaccccacatgttccagattaaaggcatttacctttcgatttacattctctctccaggtacatgacctttaaggtacagagctggaactcgagtcaaaggtttctgatgccttctgtacttttgatttcatgtagcaattcaaggctgtgtgaaatgaactacaggagatccaggtgctgctctgcccaggggatctaatcccaccagaccggttgcactgcaccctgacccatggtcaggatgtttcctggaatacatccacttgacagtgtcctctctatgccacagccttaggcaatatgctgctgatggagctctaggttaattgctacaccacattgggccctctcttgtgtttgtatccaggatcgtctgttttttgtgatggagtttgtgaatgggggtgacttgatgttccacattcagaagtctcgtcgttttgatgaagcacgagctcgcttctatgctgcagaaatcatttcggctctcatgttcctccatgataaaggaatcatctataggtgagttttggttgctgccctgtcttctaattcactgcctcttccctctcctggtatgatccatccttccacttctcatgataatcagttgaaaccttttttggaattaaattcacagaagttttgttttggtttttgtttttgagacagggtctcactccatagcccgggctggagtgcagtggcgcaatcatggctcactgcagccggtccatctggacctcccaagtagatagctgggactacaggcacgcaccactacacatggctaatttttattttttattttttgtagagacaggggtcttgcaatgttgcccaggcttcacaaaggttccaaggatccattaggataaattaataacagtaataaacactgcctgcaatctaaaatttgcctcactttgtattcataaaataggcccgacagtctcagaagagactgtttattcatgaattggttcagccccagtttgctaaggacctgtcatagccaagacctgcagggtgctaaacacactgttgttctctttttttcattttaacatttgaagtgaatcccttaaccatgattctattccattttaagaatctacaccttaactaaagggtgtggctaacctgctctaagttacaagaattacagtcatgtggagcatggctcaccagtcaggagctaggtgagccacttgtgagcagtgtcctgcatgataatatcttccgtgtgtagccccctcccaaatatttgattctccattttgtgacacacaatcttttgatcataatataccatactttgaatggactccgaatctgcttgatgttgttaagtctcagaattcaacagatatcaaatgtaactttagtcagagagaaggttggagacagtgagaagtgtaatagtgaatgttagataatttttattctcacattttcctgtttttttttctgctgttagtgtcctcacctaattgcacatatgctcttttttcttttttattgttttatttcttttctttctttctttctttttttttttttaagacagtgtcttgctattttggctaggtcggtcttgaactcctggcctcaagcaatcctcccaccttggcctcctaaagtgctaggattacaggcatgagtcaccacacccagctcacataaactctttttctcttgagatgcaattgttgctttccttagagaaaaattttcgtatattaggggcatgaatgccaaagtaaaggatttcctgattgaaatttgctatttattaaccttgttaaatgcagttcctatcataaactcatgacagtattgacatcattattaaattataagagctttaaaaacagtgaatattcttaaataccgtgggagtcaaaataggaagagaacaagtagtaactctcttagagagagtgcagtaagactggtgggtggtgctggagataagtgggaacgcaagcactgcatagcaggtgtggcaggtaccacagagacacttctctaattcattctcagtgcagatcccctagacctcaactccatacagtgcatttatcacagcctcacggcactgtgcaggagggaagagggtgcagaactgggaaccagcctggataaggacagtgggagccacctgtttgaaagcagtctaggatctctgctcgttcttaggtcacggggctgcagcaggttgattaggcagcttgttttgagctttcttgaccaggctgtggggattagatcacagcatttttttcccactctccactttctttccagtgtatgctttgtggaggttgctggtatgatctctgatggtgaagggagttaagcgtcgtcctcatgctatcagactccaggcagtaaattccatttttgttctcctctccgcggctaatccagccatctccactccgcttgccccgaagagagacgtttccacatgtagttttaaaaactacatgtaagtaatgactcccctacttgacagggacttctgctgcagatcaaaataatattaacaacaagacctaactgaacacttggactgggtgtggtgactcacacctctaatcccagcacctcggaaggctgagcggggaggatcgcttgagcctggaagtttgaggccagccggggcaacataaggagacccctatctctacaaaaaaaaaaaaacatatacatatatgttaaaaaattagccagccgggcgcggtggctcacgcctgtaatcccagcactctgggaggccgaggcgggcggatcacgaggtcaggagatcgagaccatcctggctaacaccctgaaaccctgtctctactaaaaatacaaaaaattagccgggcaaggtggcgggtgcctgtagtcccagctactcgggaggctgaggcagaagaatagtgtgaaccgcagggggcggagcctgcagtgagccgagatcgcgccaccgcactccagcctgggcgacagcgagactccgtctcaaaaaaaaaaaaaagaaaaaaattcggcaggcatggtggcatgcacctgtggtcctagctacttgggaggctgaggtgggagaattgcttgagcccaggagattgaggctgcagtgagctgtaactgtgccactgtattccagcctgggtgacagagcaagaccctgagtgtcaatcaatcaataaatcaataaaacgagcacttgttacaggaccagcacttcccttgcattcgtctattgattcttctaacaatattattgtataacaataatagtgtccacactgttccgatgaataattaggtcttccaaagacttcatcaccagactgctaactggtagtgaagtcagaattcaaaccatggttctaaccactgggctacactgtcttctcaggagagacttgaggatttagagtaccattacagtgtcagcttcttagtcctttttggtgataggaccacttcaattcctgaaaataaggtagagtgggcaaaagcaattcagtcttatctcaagctttcttgaatcctcagaggctttgagttgggccgagcagcaagcttcctttccttcattggatattaccgcccctcagtctacttgtctcatttgtctcaaaatatggtgggtagacactgtaacttgatgtggtttctgatgaagcagtgccagcccccatcttgacaaattttatttcaattcatggtgtctgtggttcagttctgagaattgattttaatttactcttggacttgaatcccatgttcaggctctaactgatatggttgactttgaagggaacacagttaattaggatagattcaaatgctatttttatcccttggatttatttcacaggataatttaattccattcagtatacaggctgggaacagagtcttaaggataagactttgaaagccaagtccttggaattcacacacagtaaagggcacatttgggtcacagagggtgtggttttgatacaagagcccagtgagaaacttgggagtatcaggcagcctcttttatcatacatgtcccagaacgccctttatcagagctaaaataatcccccagaagatgcctctgacctatccaaacagagctgttgtttgtctgtttggattctttgagggaggggagggagagaggtgtttattttccagcaggttacaaagatgataccatatgcaagtcactgttaaagaaagcttcagaaggtagtaccttaggctcctctgacacaaatttcttctttagctgcctgtgcctgtgcaagaggacatgggccagttacgtttgcacgcattccgtcttgtgttctgaccctgattctcagatgtattcacttgtattttgtggaggaacagaagcccagttcctaggagactcagcaagggaagggcctgcctctctgcctttggttggagggtctggaacctgccatggcccagaaaccaagaagagtaggctgggaaggaggcagtcatcaagtcagttctcccaaggggaaaaaaagaagactattcattcttttgtcctgggcttcttggccgattggaaggccagacagtgctcatgaataatttactcatggtgttgacttttttccggagtcaagccctacagaaaagtaagggaaacaaaggggcatgcatcccattgaccagacatctttcagcatgtttcatcaactgtattaaagggaaactcagctgtcattgacatttcaaccccaaactcctgaagccagccagcacacatttgattggctgtttttgacaaagtgtggaatactgtatctgaaatatgttgggtgaggaatagtttatagaagggcacagtttaaatttcacttcctcctcaccatgttacccctgggcacacagcactttccaacacatgcttttcgactcatgagtctgactgctttgtgccttatgcagctgttggcatgctgggtgcacggtaattagtgtttaccctgaaagctccaaatgcttcccgtggtatttcgccatcccattttgcagatgtggcccacagaggaagcttttgccccacagaggctcactgccaactctgacatgccgccttttactcccatgattacgtggcacatgaacttttcaactttgagctgctgatttctcctcagattgagagaaaaatgtctacttaatttgactcttttaaaaattcagaatttgggaagagtagcaatctcactcgcaagattaagccctgttaagctagtctctgaacatagttgggggatctgtgtgaatataccgatcaccaacatcatctagctcttgtttctcaagaatcatgagggtccacaggtgcctcgctgactccagataactcagctgggcatagccttgcttggcaagtggtctcctctgtgagcaccacttcctggtctaagaattcacaagtgatccgtttccaaatgaatttgtgtgttggggccaggcacagtggcctatgcctgtaatcccagcattttgtgaggccaaggtgggcagatctgttgagtctaggggttcaagaccagcgtaggcaacataaggagaccctgtctctataaaaaatacaaaaattaggtgggcatggtgtagtgcacacctgtgtagtcccagctactcgggaggctgagatgggaggatcacttgagcacgggaggtgtaggttgcagtgagccaaaattgcaccactgtactccaacctgggtgacagagtgagaccctgtctcaaaaaaacaaaaacaaacaaaaaaaaatggtgtcttgggccagtgatggattttacatgcctgagttactgtgcactctctctctctccctgcagttcttcccctctggaaaactgtggcaatctctctctgattcccacctcctaggacctctcttactcctcagtatttcttatcagcagactttgagtccccagatgtctttcatttgagcctggagttttgggctcttactgtcacctcacctctattggaattcagttctgtatttatattcattctactcattctagtgaggaaaatctttttagataaagatgaaagtaaaatttaacagctctcttttccctttgtcatctgctggcattattccttctgctgcaagaagtaggtctcttctctcttgatttgcgtactgcagagactactacaaattgtcatttgttgtttgtatagtccttgtttattcagtacatgccagccatgggaatgctcagtatattagtaactttcacatcagactttggctgtgagccctcacctgggactgatactggctctttgagctttttagtcatgtgcttgtctcttctcttacttagcttgtcatgccttgctgtgccatggtggcctcattcagtgactgctcttcaactctcaccagaaagtgaccaccattcctgacttccaagatccttcttcaaggatatgatggagagctcagagctttccagcttcttagagtagctcagcatttccctcaaatggggtcttcccttttcccgtagtgaaactcatcagccactgttctgcacccttgcatggcctctggagatcttttaacaagtatttgttgagcgtcacccttctgccaaggatatggatgtaatggtatgagcaaaaacaaaaatactcgccagtggagggtatgatccagtgagggagaaagatgtcaatcaaatgattataccaataaaaagtagcaaccatgactagtgctatgaagaggagaaatacaatgcagtgaatgagaacctagaatagggtgattctatccagttagggaaagatggaagatttttataaggaagtgactcttgggctgaggtcacggtaaagagggaaggaaggaacatttgagacagaagaaacagcaaacgcagatagatgcccagtaacaggaaggagtgtggcaaggtcaggggtttttagagcaggccagcctggctggagtctaggaagcgtatcttacttcacttggcattttattatcctacagtgttcagtcagctgatgacttcaagattttattaaacactccttgtaaataatttatttgaaggttaggtaaggccggtcatgttgccaatccctggaggagccatctattcacagtgagttctctgtgtccaggtctgtgcatttatactcaacaatgggtttataaaatattagagccagaggagacctcaaacgttgctaagggccaagttatcttttacagatgagggacttcaggtgtgaaacgtccaaaaattgtttctcatagtggatattctcttcggatgactcatctgctgtttgctttccatctccaggaaaacaaaaatatggctagaaaattttgtttcagtcttcaacttacagctggcatgaagagcaaaccaagacattttgaggcattcaaccctgtttactccattgcagtgagaaaaatccagttgagatcagaacatatttcctgagctgccacctagtgccggatgttgcattaggaggtgtagatacaagatgagtagatgagatgtctgccctttgaggcgctttctgtggggtgagagagatagccattaataagtcatggcagctgggttccaaaattggagttttcccagggtatcttgggagcagacagaatggccacttgccctaagatggatgttcaggcaaacttcctggaggaggtgatgcctgagctgagtgtgaagagttaaaagctgaacaaagataaggagggtgtttaggtaggggagcaagtttgagcaaagcagagaagtgtggtgaatgtgtagttaaagtggaaaatgacaggaactttggtagcactggagcctgaagttggaggcatgggaagagggaaggctagaggaggctgcagaaatgaagtattaagcacttactgttcttgagatgtttgaattctgggtcacttaggactttgctccattgcctatcacaggaaacataaaaatgacagtggcttaagccagatggaaacatagtgctctctcacatgaaaagcctggaggtaggtagtccagccccgccatggaagctccgtggagtcatttgcaacccagatttctgtgctttctgttctgctgtagacagggtcacgtccttgtctaaatggttgctgaagatctaggaatcatctctctattccaattccatgtagtaagaagggctagagggcattcctccaaactgagtcagctccctttaaggggcctcctggaattccacacagtacttaccatggaattggccagaacttgatcatatggctgagtctagctccagtgaaagccaagaaatacagtattacaagtggccatgttccagctaaaaatcagcattccattattaagaagggaaagaatcattatttgatagaaaacttgcagtgtcagacacaaattccatgccagggagtctgggctttatggagcaggtaacctttgaagaattctcagcaggtcttatgacatgagtggatttatattttacttttacgtgcgggtggggggcatggcatgtgtggacatacccatggtaagcagcagccaggttgcaagggagaggttcattttgaggcagttgcagagttccaagtaacaagataatgaggacctgaactaagacagtgatggtagggctgatgagaaaggcataagagataatagcaagtaaagctgataggacttagtatttgggtggattcagggtaaaaaagaaaccggaaatcatttccaggtgtttagctagaaggttgagtggatggcagtgccattagctaggagagatcatgtgcctaggaagaagtctaggcaaaagaggaagaagttttagaaaggttgtatgacaggtgcctgaggtatactccagtggagatgctccatggataggggcataggagtctgaagctcagtaaagaggatgggctgaattaaatatttggaagtcatcaggacatagctattagttgagaccacgagactgaatgagatcacccaataggagtctcttaaatggaacagtgtgagtcaaggacagaaccctggggaaccagactccattagaaatctgcctaaatttggctccagggttatagaaacaattggtatgttcatcatttagagtaagtatccccaaagtgccagtgtattaaaaatataattccataaaagtatagaaaaagatcacttactttagagtatgtgtgtgacgctacatatattcttcctactgaaagaatgctggacatggttttcagaagccctgcatgctagacccagccctggtcctggggatgtgggcaggttgctgaatgcccctagccctttggcccatctgtacagtggaggtgccattgacacagcttcccagcagggtccttgtaaaactcaaatcagatggaagtggaaatgcgaatgctttttggaacatgccgtgtcaatataagaggttatctttgcatatgtgctgtcacctgatttgggttttcttggtatccataggcataggcagcaattattctcaagacactgcctgaataacaggtaattcttcatagaaattggagttttagcttgtaaaaatcaaccttctgaagaccagtctctatagtaaactctggtcatgcttttctttgaaaccaaatcattttctctgtattttcacaatattttggaattgcaagtgattgatatacttaccatgaacttaccataaacccttgagataattttcttaggaagtcctagggcatatgtgacaggttgtacaacctgaagactatactctggcattttgcttcaatttcaacagtttctaatgtttaggggaagcagttgacctcattttgagtttacgccttctggtattaaagcagatgtttgatggttaatttgagaggagattcaagaaccttttcagaccattagtggagtgaacatcctgagggtgtaatcccagtaatgcagtttctcaaaggacctaactttataacagatagacatttaagtcctgggacaccttgatcatttttctgtacttcatatattaaaccagaatgctgatcctggcatacctcctcagggtttggccttttcatcagtgaaggctgtgactatttggaactaattgataaatgtgttagtggctttcaccagctaatgaaaccaggccaccagttttgctcttcttcccaccaaattgaccaagcaaccaattgcttcattataattacagagaatcttggatttatttgctgaacaagaaaaatacagtcatttaatctttatgtattaaatgaacacaaccatttgtaaaaagtaattgaattgtacagttcaacaaatgtttatgaaaagtctacccaatgcaaacctttgtcaggctcttagggagtaaaagaagaataaagacaggtcctgccctcgagcttggggtgtttgttctttccgttaacaaataatttttttgttgttgggcactcactgtgtaccagacgctactgtgagctctggaaaaatacaggaaataaaacagacaaaaccccctcctctcagggagcttaacttctagcacaagtagtaggacaaaatatagaaagaacacaaaagtaggacaaaagacaaaaatatattgaatgttagggtgattcagtatatggataaaaaacttggtaggagcaatataaaattcagtaacaaagatttactgtttgacacagagatttttaaaagcttctctgataagggacatttgagcagatgaacaaagacctaaggatgggaggaggcagctccatgtgaatatctgggagaagagtgttctaggccaagtccttggagggagagtgcgcagtgggatcaaggagcagcagagggaccagtgggctggagcagatgaattcgggcgtcatgggcgtcgagggcccaagcctttttgttttctttctgcaatacagaatgctaaccacatgtgttgagcatttgtcctgtaaggataaactcctctgtttaattgtatcttctgtatgacagttgcacaaggtaagtggcattatccttattttgcagacaaaggtcagtgacattatcctatatttgaggctctgggaagtgaaaggacttgttcaaggtcacacagtatgtggtggaatctacaattccactccatgatatccttttgaatccatgcaggtgctgagttccctcacccatcaggcctttccacacgtttccccctgcttagaatgctcccccatctctttgccaagcttccagctaccaattcttgcagtctcatcttagtcatcacctcctctgataagcctttcctggactcccctaccctccagattccatctaggttaggtgccccctctgttcccatggcatcccgtgaaacccttcccttagtgctttccataggctgtgcccctgtgcatatgggttcatgaaggcagggactgtggctgtccaagcccagcccctaggacaatgacaggagagttaggtgttcttaggtgttcatggaattgaccaaggcctcaaattctacgctttttttattttaagatgacaggtcagggctgagaatatattatgattgctaccatttattgagcatctactacgagccaggctctattctgagctctctgcattaactcacctactcctcatgacagcgctatgatatgacactcagcttgggaagagctgcccattgattgtcttattctggcccaaacccatgattttctcataactcaaagcagtcttttttaaataaatgaaagccttctggaaagtttctctgattgaccgaaaaggatgtttgcacatctgtagtagtgatgcatttatatcctcatacatatttatttggatctgacttcgattctttccttagaacagattcctggaaaggcacacaaattaacgacttttagagctggcattgtggataagagctggggctcctgagtagaatggacctgggtgtttccagtcttggttctgccacttctctgttgtgggatcttgatcaggttactttacctctctaagcctcagtttcttcaatgataaaatggaagtcctggaaatactcacctgagggtggttgttagaattaaatttgtgatgtggaggtgcatgtaaagcctttagcccagagcctggtatgtagtacatgctcagtgatgttcacttttaaacattctgtttgctaccacttttgggaaaagcatcaaacacatgttccagtgacgggtattggtgccatttttctagttcccctcatagatcttaagtgcacaattggataaattttgacatatgtacacattgtgtaatcaatactccaaatactatatggaacatttctgtcatcctagaaagtttttagtgcccctttcagttagtccccaaacacccccataggcacccagtgattctgtgttgatattataggctgtggatatccacattgaaactattgagtgtcttcaaagtagaattgcttctcaggagtgtccttttcagtataagaggatgggctctttaaactgactacatgagtgtaatggcagttatgatcagaagagactacccaaagaaagacttcatcccatcagtcagttttactctctgtagagaaaagtaattacaggaggataaacaccagcacatcaacagttgttgtctgaggtaatataggtgatttttattttctttttgatggttttcaaatgttctgtattgaacaagtgttgtctttttatcattaaaaaaatgccatcctatttatttatttatttagagatggagtctcactctgtcacccaggctggagtgcagtggcttgatctcagctcactgcagcctctcctcccgggctcaagcgattctcctgcctcagcctcccaagtgcctgggattgcagacatgcgccaccacactcggctaatttttgtatttttagtagagacggggtttcaccatgttggccaggctagtctcaaattcctgacctcaagtgatcccctacctgggcttcacaaagtgctgggattacaggcatgagccaccgcacctgggcagaaatgctattttagaagtgatctcatgtgatactatgtttttcaacatgatgtcagaaattggtaacctgctgttttatcagttaagttctgtcaagccccagcctcacgccgtgaccactccttgtctgtgaaacccagttctacagaagtcacaaagccattgtcttagtctgctcagtactgcttagtctgctgccataataaataccacagactggattccttgaacagaaatgtatttctcacagctctggagactgggaattccaagatctgggtgctggccaatttggttcctcatgagggctctcttcctggctttaaggtggctgccatcttgctgtgttctcatgcggtgaggggatggagagagcacaggctttctggtgtctcttgttataaggtcacaaattccatcatgagacctcacctttgtggcctcacctagccccaattatctcccaaaggccctacctccaaatgctatcacattagagcttagggcttcaatatatgaattctggcaggacacaaaacattcagtccattacagccattcattcatacacgtgtttggggttttcagttacattaagcaacatgttttgcagctacttggtttgatagtgccaaatctacccggaaatgatttcagccctaaggaaaacagctcctgctacagtggaacacacagtagacaggcacgagagaataaccaaggattagaccgaggcgttgtcatgcgtttggctcattaagccatgcatgttaggcttggagctctattttgaggtgtgttgagaccaaatccttctcctagatcccagtacttaagcctggcaggaaaaaaagctgagtacactgtggttttagagtgtaccttttgataaatagtttgcagcatgtccctgaaaggggaattttttcctttgtcttgcaaatgtcaaattgtacttttctgtaaactttgtaagtagaaatgtgaagtggtacaagtgctctgttgctttttggtgaaaatgctcacacatgatgaatttctcagttcagttgcaaagagaagttagtgaaacctaacaggcaaactaccccacaccctggagaacagtgtcctgggggtgtctggtttgctaggtgtgtggctggtgcagcaatgggaaggtggcgctttgactgcctggcccctcacatcttgctcctcccttttcactgctcctctggcctccagagtagccatgtaagcctgtgctttcacgtacagaattgctgctctaccctgttcttggcatttgcgtcaaaatttactgtgttccgctgacaaaattctagaatctcaaagctggaatggagttcaaagttatatacccttcttctttcaaagcatgaatatccaacatctgccgagcagtcatttttttccgtacttaaacacctataagcaaagaggaacttatacttcctccactttcagggatgtacggcttttggaaatttcgcctttctgttgactcaaacattgtttcccagtagcttcagttcactggttctggaccacctataaggggtagacttaaaaaaaaaaatacagctctcttacaagaaagctgtggagatatgtgaaggcagtctgggtctcccaatctagtttacctgttaacaaaggaaatactattagcctgatagtcgctcgttctggctgtttcttcaggattactgatttctcagtaatccataaaccatccatgttattaggcattctagatacttggatcaatatccggttgacttgtcacgttcttctcttacgaaatcagaactatctgaactagcagttggctaactgaactgagttatgttattatagctcatgttacttcttttgggtaagacttggtctttttttttgagacacggtctccctctgttgcccaggctggagtgcagcggtgcagctcactgcagcctagagctcctgggctcaaaccatcctcccacctcagcctcccaagtatctgggactacaagtgtgtaccagcacacccagctaatttttgtaatatttttagagatggggtctcgctatgttgcccaggctggtctcaaactcctgggctcaagcaaccctcccactgtggcctcctaaagtgctggaattacagcttgaaccaccatgcccatccttggtctttaactggatattgttgatgctgactatagagtagcaagcacggtggaaagttaattggtgtggtgatctcaaaaaaggatatttaaattttcctgttgtaaggatctcaggaatttaattcctgcatccatttgagagtatagcttcagcctgtatgtgcacatgaaaatagagaaggtagtcataaatcccagaactgaggatctctgtgcacagcccactctgcaaaggtggatattttcctctcaaatcaatctgtgacttgctcaagggtgaattaccaaagatgaaacatgggctgagcacgggggtgggatgggggagacaagaaaatcacctttgggtatgtcaaaatagaggtacctatggaactccttcaaatggtccatctcaaagttggaaataccaggataatgtttaagactggccacagactcaggttgattgcatggaacagcatgaaaatgagacagtattggcttacagttaagaacgaggctttgaagtcaaacttagatttaaaacttacccccacaatgtactgtaattctgtgatattgtaccaactctttaattctctaagcctccgtttcttaatctacatgaggataacagtactatccattccatggagttacagtgaaaattaattcatgtggcttgcttattccagtgtctgacatcagcaaatcctccatatacattatcagttgttaagaagaaaagtgatccagggaaggaaattaaacaatgaatttacttgaaagacagattccataaggaaattgttgaataaattatggttatacccgtactgtggaatattatgcaacaattaaaagaaagaatacattagatctacatatattgacctggatggtttgtccctgatagacaaataaatgaaaaaaagagagatgtgtgctcattttaatcccattaaaaaaaaaagcagtagcgaaagctacaccaagagtctcgtacgtttcctcatttgtcatggctacataagggcttgcatcttgagctcttttttgttcatttcatttgttatccctcaatttctggcacagggcatggcaatatttcttttttcttgtcttcatttctgttttatttctagcaactgagccaacatttgtctgcaggaattcatggtggggagtaagtgatgagaagatgggtggaaacacagtatcatttattgactaaagagcagtgtcactttaatttaattttaaaatgtaaattaatgcatatacataaaaaggacacttttagctgttctaaaatgattacagtgaatgctaaatcctcttcatacccttgtccccagtctctcaattcctcttcctcaagacatgtccttatatgtccttccagaaatggtctatgcatatgcaagctctgcatttgaatgtctcctgttgaaaaacaaatggtggtatattatctacctgaagaacagagattttttcctaagtctttagagagatgaaatctaaatccttaaagaaaggtagtaggtaggcaatcttttcttttcttttcttttcttttctttttttttttttttttccgagatggagtctcactctcactcaggcaggagtgcaatggcatggtcttcactcactgcaacctccacctcccaggttcaagtgattctcctacctcagcctcttgagtagctgggactatagcacatgccaccacacccggctaatttttgtatttttagtagagacgggtgtcactatgttggccaggctggtcgcaaactcctgacctcgtgatccgcacaccccagccttccaaagtgctgggattacagacatgagccaccatgcccattcaatcttttcttttatcagaagggtctatgggtgacagttcaagtcctggaaataattctgctatctcttgttggagaaagtgctggttttttcagatcaggcaacaggcttataaacgtttattgcagttacaagctacaaagaaagatttctttccagcactactgctccaggtagagcagttgcaccagtcattatttataactggattaaagagtagcagcacatacttctaccgtggttatagagtgccttctgttgtacagagtggactgcttattcaccagggagttctcaaacacctttctctatgggcgctgtcccaaataatgtcaagagagaaaaaattaaaaatgagctcctgccctctaagaacagatgggagcagccccaaatcttgcaaatgaagcaagagggggtattcagtctttaatccaagcagctagaagcttgcctttcccaagttcaccgagtgaggattttaacactcctttgacaaagaaatggggccgagcagcagaggaaggcaggtgacactgagtcatggaattcaccctttcgagcccttcctgggggatgtgtggctcttgggttggttcttgaaggaaaggaatgaatgtaagagaggaagggaagcaggctttttttttttttttttttttgactcctacacagaaggtggaattgagaaaaatatactgtggcggtgaaatcaacttacaaaactgaggaggaaaattttgacaaaagcaaacccaaaatctgattactgtggggctgtccattttattgctgcaccaaggagcagggtagatactattttggcctaaagaacactgaaattttgttttctcatttgcaaatagacaggttcaaacccgtcagaggccgtaactgagtttccctgtgactgatttgtatgtgtgttagtggttttttttttttttttcctgtaagaatctggttgagtaattcagaaggttaaaaaacaaccaaacagaaataagtgagaaaagttaactgaggtctgccacatatgccgggaaggtgcccacagactggcagaatctgtgcagtctttgtctgtttctgcctatgcaaatactaagccacgctcaacagagcttgagcgttgtatctgttcaactgccatttaagaaataggactctgttctcaacagcttattccttggggtttcagaatgtaaaatatgaagtgtgtataatcacaggccaggttcccagcatttctcggcatttcagctttggcaggaggaatgggaaaaactgaagtttttatgtccaggaaggctgagtgtaatctttgttctgtggcactgggaaaggaagtgaatctgttacaaagcgctttacctctgaagcatgtctcaggggcagctgtgctttgtgccatgtattctgttttcataaaaagaaagaggtagagtcgagggcttaccatgcagagtattttcacagtatctcacttgatatatcatccagggaaagtgacctgtgttatactttgtgttttaagatataactctagaatcaaaaacttaccagagaagctcaagatactttactttgcaagaattaattctcaagataaaaactcatcagagttcaagataagaagggttcaattaacaacacattttaaatggaagaattatttaaaaaattgttttaactttgaatgagcttagattaacttacctgttgcagaggtaggtcagaccccatgtcatcatttgcccagaaaagtcccagtttgctcccataatcccccttcatgacccattttactctcagaggcccattttgtttattgggtttttttttcttgagagagtctcgctctgttgcccagactggagtgcagtggtgcgatctcggctcactgcaacctccacctcctgggttcaagccattttcctgcttcagcctcctgagtagctgggattacaggtgctcaccaccacccccggctaatttttgttatttttagtagagatggggtctcactatattggccaggcaggtcttgaactcctgaatttaagtcatctactcacctcggcctcccaaagtgctgggattacaggcatgagccaccgcacccagccgtctgaggcccattttgggcggtacactgcatggtcatcatacaaagaggtgtctgcatttctacttttttttctttaagatggtagaaccaaacaaaaaagggtgtttttacaaattgagaggggtccctctgtaggaggggaatttctccagcattttcctttgatggagtattctcctctcgttcagaaataggaaatttagtaactaaagcattaagaacagatttattttttaacatcagtcactaccttagtttcagagacacactgggggaaattgcctttcccttacgcctcttgttttatgtcctttatatgagatgttaatatatttacatgaggtataaatttgtctgtaactttataggtttgtattcatttattaatccatccatccattcatttactcattcaacaaatgttaattgagacctattttttgcctggagatataatagtgaccacaataggcctgctccctgcccacaggaagcaggcattctagtgtaagcacacaaacaagtaaaagtaattaccaattgtgaaagttacatggaaggaaataagtgagcttttatttgtggttttatttcatagagctgaaggaagtgaagagacagatacctctctccccacttctttcattgctgaatgtctgaagtatttcttactccattggactactatgacagaacactatcgattgggtggcttgtaaacaacagaaaattatttctcagtgctctaaaggctggaaagtgcaaggtcaaggtaccagcagatttggtgtcgggtgagggcctgtttcttggttcacggatagctgccttctcactgagacttcacatggtggaagccgtgagagagctctctaggatttgtcttttcttttcttttcttttctttttttttttttttttttttttttttttgaggtggagtcttgctctatcgcccactgcaacctccacctaccggcttcaagcaattctcctgcctcagcctcctgagtagctgggattacaggcatgtgccaccacgcctggccaattttgtatttttagtagagatggggtttctgcatgttggtcaggctaatctcgaactcccgacctcaggtgatccacccgccttggcctgccaaagtgctgggattaggagcatgagccaccacgcccagccggatttcttttctaagggcgctaatcccattcacaagggctttaccttcatgacctagccacctcccaaaggacccacttccaaatacagtcacattgaaggttaagtttcaacataccaattttggggatacataaacattcagtctatagcagtattttatctggggtttcaaactcaaataccttcagagtagaggccaatggggacactcctgtctcatggttctaaccagaggggacttgcatatccattcacctaaagctccgttaagaaaggtgaggagccccgggccagacccacaggaagtgtccccaggttgcatttggctctggtcacatattcactttttccagagtccccaaggtatactttagttccacatcaatgcctaccaggcctggttcagtcttacatttcaataggtccccttgtgggtctcggagaaaaagagagcagcattagaattttactaccacagtgagtttttccacttcactttggaaacattgagctattcctacgcagtttggatgacagaaatactgtgctcagtgcaatctactggaaaatctgagtgcttggaaaaatgtcaggaatactctcttttgtcatggaatttctccatattgcggcggtacttcagtgtgagtcagcaggaggaacttcggtgcaccaagcaggcctcacatcagtggggttgtgagtcccagctctgattgaagtcaggggggtgggtaagtgatgtcctggccagtccagggatgggggctatttctagtgtgcaatgctggccctcctgaaccaaatgtgaacccccctggactctcgcatgagtttctctggaaagctcgtcttctcttctttacccaacccctccccctaccactcttccagaaagttgctcttcagaattccatgaaggatggaagcagccctgaactaactgccctggggctctttattctcaggctaccaagaaaagaaaaaaatgctaagaagcagggacctggctgcctgatcttccctatggtcactggctcttcttgaacaggcatgtaatgaaatagtgtggaacagtaagaaagctcctacaggcagaggccatccatgaagcctcttctcaggcaatggagtcttcaaatggaatgaccacagactgttttctttgaaggtgaatgcacatgtctaagccctaaattgccctgctaaaatcgtcttcccttggacaccaaaagcatagctgacaaaagcaaaaataagtgagagggagtacatcaaactaaaaagctgctgcataggacaggaaacacttgacaaaatggaaaggcaacctatggaaagggagaaaatagttgcagatctgataaggggttagtatccaaagcatataagcaacttatacaacccaatagcaaaaactaataataataacctgattaaaatggacaaaggacctgaatagacatttctccaaagaagatatgcacatggccagtaggtttatgaaaagttgctcaacatcactaaccatctgggaaatgcaaatgaaaaccacaatgaaatatcacctcatacgtgttaggatggttatccaaaaacctgaggacaagtgttggcaagggtgtggagaaaagggaaccctatgcactgttggtggaaatgtaaattggtgcagccactaagcaaaacaatatgtaggttcctcaaaaaaattacaaatagaactatcatatgacccagcaatcccattcctggatctataaccaaaggaattggaatctggatctcagagatgtctgcactctcatgatcattgcagcgttattcacgatagtcaaaatatggaaacaatctaaatgtccttctgcagacaaatagataaagaaaatttgctatggaatattattcagccttaaaaaagaaggaaatcctatcattccggacagtgtggatgggcctggaggagattatgccaaatgaaataaggcagacccagaaagacagatactgcatgatctcactcatatatggaatctaaaatagtcaaaatcatagaagcagggagtagaatggtggttgccaagggtggttgggggacagagaaatgggaagatgttgatcaaagggtacaaaatttcagttatgcaggataaacaagctctggaaatcctactgtacaacataagacctatgattaacaatgctgtactgtatacttaaaattttgctaagagagtacatcttaagtgctcttatcaccaagaaaaaaacacaaaggaggcaggaggaaacctttgaagattatgtacaggtttattgcactgacagtagtgatgattttacaggtatacacctctccaaacacatcaagttgcatacattaagtatctacagctttttgtatgtcagttattccttaataaagcagttatttttaaaaatcctcttccctttggtcccccagcctttaacatggcaattgacatggcaattgacatgataaaagctactgtatttccttgatttaaaaaaaccacagctcacaaaatgcccatgattgctgatttgattaaaacaactgtactagcagctggcaagtgtttttttagccactagttttaaggaacattcctgtttcagaagtatcaaaggggagggagcagcacagatcatagaatcaaagtgatacagagattagagttgtgttcccctctaggtagtgatagaggaattgtttcctctctaggcacagtgatagagggtggcttcgttaacagtattattaaggccatcttactgacagcaaaagggaaacaagacagagtcctgatagttgggtaaaaggatcagttaaatttgaaagcgcttccttttgtatgttctggtcagtcttctgcgggaggaggatgtataaagtccactgtgtcagaaaagcagtcagtctacccctccccagtttccatctgggtatctttgtgctcctggtcatttctttcccagaaattgggggatctggtctcagataagaggagtgggtttggatgtcccaatatcacatatggtaaggatgaaaaacatggataagatgattgagtttatcttgtatatgaggccatgtgttgtaaatggtctttttttgctaactttcttgactctctagatgtatcttgaggagtgaagcatgaggacactgttttactcagtcacaacctagagtcaagtttttttctgttattttctcaagacagtgctaccaattagattgtatgcatcccatttgtcctcatttgattcccatccatgttctcaccttctccaaggtgactgttattctgattaatgttcagattcctgtaatgcattgttagcattgggtgctggatctgagccagtccagggtctggagagctatgcagagatagaagtggactctagaaagaggcccccgaatcctgccattccctctccaaggtgccagagtttgcagtttccaggaattgcatgtgatgcagattgtaaattacgcgtaaatatgtatttgtgtcttaaatgacttttttagtttggagaatgcccttcaccctatgactggcataccgcaacacactcattagccctttgttggctgacactttgaaaacatgcagcctcaaagaccattgttaagtcatccatggggtttgtttgaccatgaaggagacttcttcacgattgagttaccaggttcaacaggtcctgggcatctgctttgtgctgtttacctctgaagatcaaaagataaatcagaatctttgctctcaggatttagtctactgggaattctaaacacacataaattgacgatgtaagatatggtaccataaatgctcagagtgaaatgcaaacagaatacagtgggtgcttagaaaaggcaactatgaatgttggctgggtgtggtggctcacgcctgtaatcccagtactttgggaggccagcgtgggcagatcacttgaggtcaggagttcgaaaccagccctgccaacatggtgagattctgtctctactaaaaatacaaaaataaataaataaaaataaaataaaataaaaactagccatgcatggtggtgggttcctctaatcccagctacttgggaggctgaggcaggaggatcacttgaatctgggaggcagaggttgcagtgagccaagatcgtgtcactgccctccatcctgggtgacaaagtgaggctccatctcaaaaaaacaaaacaaacaaaaacaaactatgaatgctgatggagaggttcagtggaggccttgaggagatgacacttgattctgatatgcaagttttccattaacagtgaaacagggaagtccatgctaggtagacatagcgacagggacagaggcgtggaggcagaaaagcgtcctgtgctaaggaatcatgaggactcggtatgatcagaggaccagagcctgggaaggagcagggcagagctggcagctgaggtagatgggggtgagaacctggaaggttttgaatgttgggctaggaagtgtgggctttattttatttgcctttcaatagaagccaacagaggtttttgaggaagagactaacgggaaataaatgcagtgtgttagagtaagtaacagaggagtaagcctggaagccaggagttcaagtaggaggtcttctcataggtcaggcaagaaacagtcacagcttggggcaagccagtaatggtgggaagagaaaggaaaagaggagggggagcgattcacatcgaagggagtctgatgatgtggttgggggaccaaggagtaggcgttaaagatgactccgagatttccagtgaaggagcttttaactgagtagggatagcaacagagtacagtttagtttttgtttttttgtgtttaaagaaacacttctggtagttttgcccataaagcagttagagatgcggcctggctctccggagagaggtgtcaggatagggatttagactggggagccatctgtctaagggaatacttgaactcacgggactcaactgcaaggtaaagtgtcaagcagggcaactgtgcacaactgggcagattgggccctgaacaaccctagggagtgccaccgtatcctagtcattgtagatttgtgcaatgattgaattttctggcagatggcagtcagatgtcttgagaaaggggcacctttttctaatgtgcacaaaggtaccatatggtgtggcaggaatgctggaagtaaacccaggcaagagccaagaacagaaccttagggaaccagctatcctataagggagggtggaggaggaggagcctccggaggagacacttaggggtggtgagagacttaggtaggatttaagtgtttagttgcctccaatttgcctgaaaatagagtcaccacacagtgaactctcatcttactttggtttaatgactcaagtagagcctctgctcatattatccatcagttcttccttttcacatagccggtgagttttccttggcactagcaagtgggatcattaactgtctccatttggttcggatgtagaattattaaacctgtggttctggtcttgagagccaatgcctggcaggtgactgtggcccagggtgaatacctgctgcaaagcctcctctagaaggcccactgcagagcctgcctggggagctcctaggagggcaaagggcaccctgccaggcaagtcacctgtcacacctggctccagccagctaggagtcagattggggcagccccccacccagaactgccagagcctctcggatggctcaagtcctcacctctgagggcctggcagggtgaagaacgctccttgcctcctgaaccatataagaaagaaaaggcatccccagagctatagcttggaggcttggctcctttatggcataaactacaaaggcgcacagcctccccgatgtgtgccaataagatggcataaatgcttcttgtggaagagaaggcttgtgccctgccttggcacatgatcctctgcccacacatgcttgtcattgctgcttcctggcgcttgtgacctcctttgcatcagtggaaagttacaggaggagagatagcaccacctttctagtcaggaatctgtcacgcaacccagatcaaaaacttcaagttcacttctgtgtcaacgggatcccgactctgtgggtggatagaacattgtgtggaaaggctgtaaaactcagagtgtaactgcagtttttatctgagtggctggaactctagcttgtttattacctagatcagacaggtaaaatgttctactttcaaataattcatgtttttcagatcttgaattttggtaaatttttttcatcagttgattctgtttcttaatttgaggaatagagttccttttctaatgggaaaatatatcacttgtcatgtctgtggtgctttcttgtgttctacaaactctacgtgagcataggctgtctggctctggggatcagaagcactcagggagctctgaggacaggatttcatatactacatcctgaaactgggcagatgatcacatgaccctttttttttttttttttttttttaaagcagggctcagaagcagagagagaaagagaatttttccacagcctcagagagaaaatccaggaaaatccaggagtagaactcatgaggctgaggttctggaactgtgttcccaaactgccttctctggaaaaaatgcagagggaaccagccgattcctagtaaaaaatttttgacttactgactttcaaaaagaaatgagttccatatgatgggaattgcattctttgatttggacttaaaggattttctgagcttttaaatggtttcctatgtaatattccatctcttctggtttgggagttttccatgaaatgcctttttaaaaaatacccaaagcatcaaatgagcttttcagcttgatgaagaacttaagaaatttcatcattccttttcttcctggctgaccttttaattttacacaagatatacaggagtgatttgtcttgtctggtttgtaaggatttttaatcaccagccacacacattagtcactggcttttgtacctacaagcccaattttctttgttttgggggttttttaaataagtttgtttgttcatttatttggagacatggatcctgttctgtcccccaggctggagtgcagtggcatgatcatatcctcaaactcctggattcacgtgatccttccacctcagtctcccaagtagctgggactacaggtacacaccaccacacccagctagttttaaaaaaaattttatagagacagggtctcactgtgttgcccaagctgacacttacagtaacagtaggatcagactgagagctggaaaaggaacagcgcaatgggattggtagcataaaagatttaccaccagatgcagaaagcagttctcaccattgcttcctcagttccttagcatccaccacgcgcagaactttacactttacactcaaggggtgtatgaataaagggaatgcaaccaaagtttaaggtaagaaactcagagcttgttcagttcagttagtacttaattggctacccagccttgtgccaggtaccttgttctggggctagagagctgaaataagcatggagaagatctgcagggaaaccaacagatgcaatcagtgcaagaaatgctgtcattagaagtgtgtaccaaacaccattggagcacaggcggagagacaccaaacttggcctaggaagggatgcagaggctttggagacagagaagcttcagttaagagtgaaaaagtcagcccaggagagaaatgagctcttccatttatctgtggtgataaatcaatgtgttttaatttttcctttttcagtccgtttaggaccaatactttttataaaatgtattaaaagtaaattactagaaaaatgaaatttccaaatacatataaaacagaagaccacatttttattattagattcagcggacttatattgtcatgtagtatgacagtatgatagtttgtcatactgtcaaatagtttcgaaaaactctgtgcctctacttttacctcaccatgggtcagcgccagtttgcagatgagcggcagtttgtggaccacactttgagtagcattgccctgggcagaggaggacatatgtgaggatatagtgattgactgatgtgagaaatgtggagggaatatcatcgtgtcccatcccatcgttttacagatgaggaaactgaggcccagaaaggtgacagagctaagaccagagtccctgctttctaactcgagacagttcttcttcttgtcctttgactaactcacctgaacagtcaccagatagcaccagcattccagcctgcctaccctgcttcacccacgcctactgcctctgaagaaagggaagaatctgtgtccatcagaacatgccggggataccaggacaccagcctgctgcccaacctggctgacccgtctgctcacggaccctgtcttaatgacagaagccactccaagagttcactgtgtcctgcagtagccagttaaattcatgtaaatcctgtttgggcagtcagtggaatttttaatactcttctcctttaaaaaaaaaaaaaaaaaaaggaacaaaggtttttctcatctataagccaaacatgagcaggcagtcaccaagcagggcaaattgttatctcttggaatcagtttggttctagactggtcttgaaggattgacgcctggtctggggtggacttgagagccacagagtatgctgtcctggtcttaggtcatccccaagacaggggacctctgcaggcaatagcagcttcacgttggctgtagaggtcccagatgggtcccagggtcccagcacaaaccagaatccacccagctccccccacatcctccctaatccttcctcactgcggtctcctgggaacctggccaaacccaatggtcagggagggagttgctgttcagattaatagccatttattatgggcctggtatttgcaaagcactgtgttaggcactgaagggaaccccgaaatataaagatatagaaacgaaggcaatgagtctcctcatggatattgcattttaggtggagaaataagtcatataacagcccagacgggattttgaaatttgttctctctgcctgcctcttttggtccccatgaccaaggaaggcaaacaccagtgcagtggcattgatataaattcttaaatgtgaacatggcacttggagttgattgcttatttgtgaaaatacatgataaaaatattcatagattcagacatgtcaaaaagattccttcatttatcacagagttgtttataacagtgaaaaatttaagaagtctgcaggtggccttgcatggtctgggtgttatcacaccactgagtgtcaaaccagcatctgctgttgggtatgggtcctaagcaatagacagggagggggtgaagaacaaggactggctgtacagttgaattttatttgattacgttgtgaagtacagatactgtttcacttcctgggaattttgtgttttatttctggagatttgaaattctccagaatggaaataaagttctccagccactgtggtggtgtggatggcaacagggttcagtgacttcccttatcctcgttcaacttattctacctagcagaaccagtcacctgtggtgaattcagtggcgtttgacagtctaggatgaaccgaatgaacctcaacttaaaccagctttttgtcattgtactgacctgggcacttgacactaaacagagatcttaattcctgtatcttcatgcatcagaatttggtcttagtggagatgtcaatagacgacggtgttgtggctggttgggtttaaccagttctggaggcattttgctcgttgcccaaggtactggtgccagaccatgtcactgtatgacccatctggctttggctcctggctctattacccagagagcagtttataagccagatgtgtcacttaatagtaggcatacctgcccaaaatgcaaaagcttacagtagttatctagaatttacgaagcttgtttttactctttatcagtgttgattcttataaaaatcatgacagtaggccatgtagatattatctttcttgttgatgaataaataatagccaagggctctacagcacttaatgcattccaggcgctatgctaaacctaattcacattaagtaactcatcatttctatgaggcaggaactgttgttatctacatttcttgatgaggaaataagcccagagtggttaagtaacttgcccaagatcacacagctagtaaaactaaaactaaactcggctaatcaggctctaaagtctgtgcccgtagcctcacaatatgctgcccattgaaatcagacagacagatgagatgtggtatgacctccccaagccacttgggtaggggagggaagcagattgagggaggcaactgtaaaagcatggttgggaagttgtccttggctcatctctctatatggcacagggctccaaactgaaatagccactattgggtcaagattagtccagcatttaggcaagaagaatgttagtccagtcatctgctacttttgctagcatgtatggtggtgacactttttaaactaaaagtaacacacataggctaaaaaataaatttttcctggtttttgaattctgtttacttttaagatcttaggaagttataatgactcacacttgcacatttaataatgacttttattaagaatgctatgacacaaaattagaaacattcttcagacagtgtctccacgtgtaagtacttaaagaaaacaactaaatggctatttgggaaaactgggccctttggttgcaaaaccaagtgctggggccggagtgagtgctcaagaagtaccagtgagttctcccaagggaaatttcttaggggaaaatgtgatgtcttttgcacatgttactatgatgtgagtccagtattggtaggaaatcagtaaaattccctgaactttactgtgtgtgttgccgtcttgtgtctagcccgtgattgacattctagagataatatgagaaatattccagacctgaccttagagtttgtaatccagttgggagaaacaaagccttttatgcaaaacataattagagaaccaagcaatatcatctataatctaaaagtaaaatgtgaggtatgtttttaattccaagagcctgtgagtggttctgaagtgcaagtgtcttcttgtgtttttcagaggtttgtgtttagatggctcaggtttaatctctaatggggatagcagggaaccagatgagacctgctgaggtggccacagtactgattctagtgggcaggctgcctcccctctgatactgtgtaaggcattactaatgctggcaacagtttgcatatagccaattgccaaaagcagcctgcacatccctcctgaggctggtcccgtaaattcttctctttcctgtcgtaaagcattcctcatcaccacctcccttttcacactttatgcaaggccgtgcactgggacagcaaatggctgcaactttcactgcttgcttttcccaagtcgaagaaaagttccaacgctggcaaagcaaggacattgctattttctgacaatcgaatgtcttcgaggaactagcttcagtgctgatagggtctgtgttcctctagtaagaatagcactgtttccattagaggggaccaggatgggtagacaggctaagacgtctgattactctttgctctgtgtatttgtatgacagctcgggtgtctggcttaccttcctgaggatgagagccatagcattatccatttaataacagccacagtgacagtgctgataatggctagcatttacctagcactgtgtgccctagaacatttaatagtttcactctatgaactcgtttgttggtcttcatgccatgtgtccaacataaagctagcaggacccatctgtccttgcccatgcttattctgtgccacagccacccctggttgtgattaagatattaatgttaaagagggaattgagttctgatttctcctcattcaaaaccattctgtcatcttcatgcacatgccctgcaggcagccagccagtaaggggtccttcatacctatcctgttcctggctggtggctctcagaatctgccatggctctttgatcctgtttgtcctcctgcccttgagtgactggctatcagaaaaccttcatttccttgttggattctgcctccaggaagcaaagccgacccagtggtttctgtgggtcagctgcacttggctgtctgcactggggaagagacttggcttgttggctgttttatgccctttggactgtcaggtccaagtgtactgttggccgcagcatccagtctgtgctatcagagcaaggcgctatggtcaggagacccttagccaccaaaggtctgttgtctcctggtgtctttgcctgaagacttctggccttcttgtgtttcatcactaagtgcatctataagctgacccgctgccaggtatcatgtctgagcattttggcaaggagagtcggtgagagaagttttcttggcaaccataaaataaaagtactatcaggagctgctaaataaatttgcaccgcttcagccagggaatttcagctctcctgggtgggatagtgataggggatgtggaatgcaaaaaaaaaaaagaaaaagaaaaagaaaaaaaattatgaggctcagctgtcagtttgatggctcatttatttgatggtcctaaggagatgtatgattggtacactgaggatgtttatcaaactcatttcctcttgtatttgtccagagagtcagcgaatggggttttttgggtatttttttctaccgtgagacaaagtgaggggaaatctctgagtccctttgctcaacttaagttggtcctgtgtatctgcagtggtgatggtgggaacacactgcctacatgtcaagggcatcaaacacccagaacaggatgaagaccaacacctagtctatgggaattagtttgtgagtctgtgccctgtttgtttgtttctttgtttcattattgttttttgagacaggatcttgctctgttgcccatgctggagtgcagtagcacaatcatagctcagtgtagcctccaacccctgggctcaagcaatcctctcaccccagcctcccaagtagctggacctacaggagtgtgccaccatacctggctaagttttttaaaaaattttgtatagctggacacaatggctcacacctgcaatcccagctctttggaaggctgaggagggaggatcacttgagcctaagagtttgggaccagcctgggcaatatagcaataccctatctctacaaaaaatttaaagattagccgggtgtggtgatgtgtgcctggagtgccaactacttggaggccgaggtgagaggatcgcttgggcccagacggtcgtggctgcagtgagctatgatcacgctgctgcactccagcctgggctacagaatgagattatgaatgaatgaatgaatgaatgaatgaatgaatgaatgaatgaataaataaaatttttgtagagacagggtctcactatgttgcctgggatggtcccaatctcctaggctcaagcaatcctcccaccctggccctgttttaaagagggtgaagtaaccagattcaaataggagtcatttttgtcatttctcatcccaggtagctgctgggaggaggtatgagggggtagtggggaagagcctcagaagagccttggcaacactttctgggctggaaattgttttactgactttcttcattataaaatgaagtattttacattcagcctcataatgatgaatgttcacatcttgtatacgtggtcttcagcaagatattccaataggtcagcctcaggaacaccagattaagtgtctgtgaggagaaatggcatagggacctcatttaataattaggaatgctgctgcttttagtaggaaattcattttcatacttaagttcattcagacttcagggacacattgtggggctattgaaaatataaatgccatccacgacaatcatagacacttagtagacattaagtaatttctgtggtaaaaaaaaaaaaaaatgagctgatggcaacaagttcaattctaagtctacaaatgtgcaggttctctaagcaaacaggatgtttttttccaacattcccttggagcctgggttccaaaagaaatcctttgcactctgaccaatgggtccttttccctgcacatcttccttgggaattatggccttaaatactacagaaaccaaaaaaaaaaaaaaaagaaagaaagattaaagctagaatatgtaaacacattttaatgactttttcctggttaacaaagtaatacatgattcctgtaggaaatttagaaaatccaaaacagaaaataaaaatcacccataaacatatcacctggaaatagacttttatgtttttcctcatctccttttttcctcctgtctttcctcctttttcctcctgtctttcctccttttctttatccctctctgtcacaattgtaacaaattaagagaatattgaaaatataattttgtatcctgttctttcacttagaattgtatgagcctataagtaagtcatgaaacccagaagctgtgaaggaaagattgataactggactatatcaaaacaaaacttcaaccaggcgataatatttacaacccatagaaccaatataaaaaattattactatcccataatatgagcttcttaaaaaaatcaaaaagataaacaactcaagtttttaaatggttaaaccatgtgaataggcaagaaaaaattcaaatggccattaaacatatattcttcttaaagcttaatctcattaatagtcaagaaatgaagttgaaacaatgagctcatttttcactggcggtttggcaagaattagaaggatgattccatctagcctgaacaaggaagccaaaacattgacactttcatgtgctactggtgggaatataaattgatgcaacccttttggaaaacagtttctctacatctgtttaaatttaaaatatttatgccctttgatatggcatttctacttctaaaaaaatgtatcctaaataaacactcccacaagtgtgcaaatcatgttcattactccattgtttgaagttgcaaaaaatttaaaacaacccaaatgtttatgtagaggaactggttaaattgtggtagatttttacagtggaattgtatgcaaccattatagagaatgagccagaggcataggagatataaatatgtccaagacaattgttgagaaaagtattttactgtataatattgtgttagtgtagcattgagaagaaaagtttgaaagactgaacccatcatcattttctctatacctttttcaggaatgatcaattttatataatgaaaatattacttttataatcaaaaaaacattttcagataacatttaaaaattctattataaacatttccttacatttttagtccttcataaaaatttggcagctttcataagattctgtcatagaaataccattatttatttagccattccacggttgatacataatttagctttttttcaaattatatatgatgcagcaaccaatatctttgtaaaataagattcttaattttacactcacaagagtatcatatcacatagcagagattgagaatttaacctgaaaataatccattgggtgattctgaatgtacaagattgatgtttttctaatctttttattttattttattaattttttttttttaagatagagtttcactctgttgcccaggctggagtgcaatggtgtgatcatggctcactgcagccttgacctcccaggctcaagtgatcttcccgcttcggcctcccaaagggctgggattcaggcgtaagccactgtgcccggccttaatctttttaaagcttacctggactataggtggcccatatggaggcaaaagatttgggccccactctctaggcacacagctctgctaccctactctaagtataatttgtcactagtttttgtagtctcagtgtaaaaaagagcagagatcttggcctcaggagatcctcttcccaaggctcagtcccaggctctctccttatttcattccttctcctgaggtgaactcatccacacccaggtaatgactctcaaatttatagctccgaaccagccttccctttgacatctagccatgtgtattcagctgcttaaatatctccacctgtatgtctaaaaaaagtagctcaatctgtccaaaataaattctgtgatccagaacctgctgatgcctccttccctttatcctttacatccttccattgctaaatcccattgctttcccccagtagttcttgacacatctagttctctttaccttaccaccctccctataccaggccaccatcatttatctcctggatactctagtagcttcccaaatgatctcctcatgttcattctcaactcctctgatatggagtcctgtaaaatcgaaaatctaatgccatccctctcctgagtcagagttttccatggtttattgggctaaagactgaaatcctcactggcccctgcctcatctggtccctgctctctcctgtctccatgctctcttctctcgccacccaggactccaaccacactagtcttcatttcttgactgaaccccctcacctctgttccttccttctgaaattctccttaccctcactttcccttctttctgtctcttcacttggttaataatcttcacagctcagttcaaatgtcactttcctgggaaatcttcccccagtgctaggtcaggccatcccttgatctattcccatgttttctcctcattgcactcatcacagttgataattgtaaatttagttgtgtggtgatctgtctgcttctcccaccagacattaacccccttgtgggtagagatggtgccccctttgcttactattgtatcccaacatcctggcatatggccaggctcatggacaatactaaagaatggttgggtgggtgaagggatggatatctcgtgtcaggtgatgcatgaatggcactactgtctaactcacgatgaaaccaaatgttatgcttttgctaattcagtgacttttcaaaagtcttttgcccatttaatacaatccatcttgctttgaaaaaactttaagtataaacccaggcactcaaaacacaagccagtcctaagtagttttattctaaaattaagaccataacccacattcactcacttggcagatgcccccttttcacacttacctacatgctagttcctcctcctcagtggaaggcagcaaatgatctgcacatttgaccacttgagagatttgctgtgcactcccctatgcctgtatcctcaaggactctgtaaaatccattgaactctatgcacaagctaagaaaaaaaccttgctttgcagtatttcgattatgcatttcatagtaatatgcataaaacatccctctatcatagtgccatcttagaatatttattgattccctcaggtggttcttgtttcaattaaagtccttttgggaaacaatctatccgggggattggccggtgacactgctacatagaagggattgggcctggtgtagtaagtcacaagcccaggccttggaggtgagcagaagtaaatctgaatcctgattttacccctgtctagctatataatcttggggtagagcctacttcatagagttattttgaggataaaataagaatatagataaagcacttagcatttgatgaacattcagtatatgttaaccactgaagacactgttattcttgttattcacaaaagcttttttccaggttttctagacagacccacagactcaccacccccaaatgagcaacagacaaatggcagtatgctgacaatcataaattgactgtgtattttatgataatgggtatcaaagttgtactctattaaagaattattatctttgagattcagatattaaaatgtgtatagatgaaatagctcatatcctggatttgtttcaaaataatctgataaaagatggatcagggagggagggagtcgatgtagcgagggagcatgtttggacgtgcattggcaggtgccgaggctgtgtgatcagtatgggagttgtgtcattctccctacttttgtctgttttgaaatttcccataataaaagttgaaaaatatgttaaaaatagttcatataaatagcctcctagattcattcttgttcaaggagccagctctcaactcgctttcctttatttcttttggaagagtaactgactctagtgatctaagcagtaagactcatgtcaatctgttttattactctcaggatagcttatggtggaaacaaaataaatccaatttctgaatctcctttgtcttcaatcacttgggaattctctctgaaactactgtgggcattttaagtaaccctgattacccagcaagaacaatgtagctttcagacaagcacagaggatagaataactctttctacccttctatgcttgcatgacaaaagctgtagctattaaataccggtgctcaatgagctaatgaatggcaagccggtaactgtggttttggcattttagtatttgagcctctgccctgtatgaacttgtaatcttcattgtgtagccttgttaagttcagctgctgagttacatgttggcataggaagctgaggtactcctaagccaaaaactgacctctgcatatttcaaactaaagtcaggaggcttagggtgacttcttttgctttaaaaaaaataaaggcatgatttccctttagagtggaagctgaccatgactgtaaatggctctataatctttggctttgtttgagtcaccctctccatgttctgctcttccgtttggatgcaagccaacatgaggataagtgttctgcttggtcctcgttgtttaataattgacccttcaaaaccactttctttctccagcttcatcaaagagaagaatttaaattttgatttcaggtttcttcttttccctcttgagtctatctttaaggggtaaaacatgtggctttttataagtttaagtactttggagcaaagtttatggagtgtccttccatcccctaaaaataagataggctctgagttggccagggcagtcccattggggtccatctgaaatgcttctgtttatccctttggtcagcacctcctgccaggaccatgctggagctgctaagaaggaagacaggtgcacagacagagccttctggaatacagtgcggggtatgctatcatagaagtataaactgggcaccctaggagcagagttgatattgctatgactgtctggggacatcaggacagacttcatagagcaggtatgagatacttgggctgagggcagcactggtagcctggaattacattatgctcttaattgaaccctcttgggatcccagtttgagcgatctgtcttattaaatagcacttggtatgagaacagccatggcgtttcctttacagctcatacagttctgagaatgcctaaaattagattgaaatcaggattaaggtgtctaacctgcctttgtggcctcgggcatcctgtgaccaggatgagtcacatccctgtcttgcccacttgcgtcttctgagagctgcgtcccaagacttccccatgcagagctgattgtaatagttgactgacaaaactgatggcccagcactttctctccctgcgcgattcctgctgcccatgacagcagctgagtaataagcagtcagacctcttacctgggacattagtcacaagctcttaagcaactgcgggtcaacgcttgagaccgttttggatttctgttagcacttgtttctgttgcccaagaagatcctttccaagacttcagcaggcatactggcttcgggaaaattcagaaactcagtgaccttgtttggaaatgtgagtgatagtgttctgggctcaggtccacacaggcctggcttgtcaggctaggacacagtgtcgataaagctgggctcatgggctttgtccccccggccgtgctctctcctggggctgcagactagtgtgtctaacctcagccaggcgcctctctactgtgtgcccgcagtcccagaggagccaggcacccaggccttatagtgcctcccaagtcagaaaacacttgtggaagaactgagagtggtggcctccttcactgggcaggaccacgatcatcctcacccctgctcccgtcctgcgctgctacgattgcaaccttttgtaggttaaactggctgtgctcatattgtatttatgtggtggggccaggggaggaagcagcttccacaaatcagcccactgaaaacagtcacttatatgggacatgggattctgcgtggagaagggctgatttggagccaggactgggtttgggttagagacacagaaagcttgcttcgctgaagtgggtgcacaggtactcagcatgcctttgccttatgcccctgacacccggggaggctgctactaagagcagagaagtctgttctatgttccattgatctgtgccatgaaagctttgctgctttaaccacacttattggggattcctggaataccagacttggtttccattcctgggcattttctagtggccattttctgtaagacctgtatggccaggctgtatcaactcacaggacagcgtgtggaaaccagtcatgccagttctgtcatcacctacctcctccaagccagcaacgtgatccaggctggacagagaccaaccttttgccttgggccatgcaggccaacagaccttgattctcacactgaggcaagaaaatagaacctcgagtgccctgacacaacccacagtgaatatggcactccagaaagagcagtcagctgcagccactgaggagacgccacagcgaggggggctccaggcggcccaaggccatggcagcctcccacaatggcagttaaccacaaagctccaggccacctagcatcccccccgtgacctgcagcctccttgtcactgatcagcctatgtgggttgcctctgagcatattgttcctttaaaaaccaaagtgtaaatgtctcacccaaaaggccaagctgttgctctgtccagtctagactgtgcctgtgaggctagcaatgccaccctccctctgtaacagtgccctggggtatgggtggcaacaggacaaccaggtgcttgtgctgggaagcgggtttttttaagagagcactgccttttatttacagacagctttatcagtacatggccatgttcctgccgaccttgaggactctttaccaaacaatcctgctgctgaatattcacttccttccacatgaatttgctcttagggattggaggaggggtggaaatgctttcaaccagtctccataatctaggcttcttgtgcacctggggtacccacaaacaaaccctgttctcactctggttttccttttcctgattaacatccccacaaacctactggatttaagacaaacccagaagtcatcatttctgctgcttctctctatccgtctatctctaagtgattatcaagccttattactgattttgctttcaccgaagccctgcttcctttcccctgactaactccttattttccattccattcatcactgtcctggttcaggtcttaacatctcttccctggacggtttcagcctcccccaactgatcttttcttgtccagccaggaatctgttactcccttaatgagggagcatcaatgagttccttttgcctaatatgtaaaaatcaaaattccttcgtgtgacattcaggacccttcatggtttgaaggacttaactttcctctgtagccctgagatttttcatggccccagcactcctctgtcctgtgctgcccgcccctcagcctcctccaccatacccagggttctctgagtccacctgcacagccatactgctgggcttgctgccgtgtccctgccccatccgcctgtccatggcggccttctcactccccttctctgcctgggagactctgactcatgctatcagacccagctcaatttctgcttctgctgtgaggctgtctctctctcctcccactagaaggaattgttctctcttatgtttctctcgtagcacttggttcataccttcatcgtgccactaggatgatacagcaattggtgtgttccccctccccacccctcctggtctatcctgtccatgtgtgtgtgtgtgtctgtctgtatatgaaatatatatctatttgttttacacacacacacacacacacacacacacacaaagtatttctttcttctcttttcattttagagacagggtctcaccctgtcgcccaggctggagttcagtgatgcactctcagctcactgcagcctcaacctcctgggctcaagtaatcctcccacctcagcctcccaagtatgtgggactacaggtgcatgccaccatgcccaactaatttttgtatttttcgtaggttgggatgttgcccatgttgtccaggctagtttcaaactcctgaactcaagcaatctgcctgcctcagcctcccaaagtgttgggattacaggcacccagccgacaagtatttcttaagtacattatgccaggcataatggcgccaggcataatggtgaaccgcataaacacaatccccgccgtcatggagcttctagcctagcaaatatttgtctcccattacactgtgagttccttgcagatgaagatcagctgtactcctagtgcctgtcaccaccccgggcacacagtggccacctcccctatgggtgttcattctgactccgatgggtagagatgggtgctagagtggaggatggggtataggctgagtatgaggtaagtggaaagcctagaaaagccacattctgccctccgtttttacaggacagcctacattttcctgtggtcagcccattcttaatgggcgcatcatcttggagccatgaggcaagttctgagacttgatctaaatgtgtcatccagatagcacagagaagtttgttccttttgacgtgtgtacaggaagctcatgcggccgcatgtggccgcacgtgtgtgtgtgtgtgtgtgtgtgtgtgtgtgtgcccattctgagaggtggatggtttggggtctggctgccctatctcgtgctgctctttgtatctttcagagatctgaaactggacaatgtcctgttggaccacgagggtcactgtaaactggcagacttcggaatgtgcaaggaggggatttgcaatggtgtcaccacggccacattctgtggcacgccagactatatcgctccagaggtgagtgcagctgcttgatgcagctctgaaatctgagctctccagtaactctgaccagaaatgccactggctgcttttatgcactgcagctttggaggcagcattgaaaggtgtctagagccgacacctctagactcatttatggctcattgggtgaatgatggctgaaaatggcctaagtccctctaataagaatttgagttaaaaaagaaaatcatgctgctataaagacacatgcacacgtatgtttattgcggcattattcacaatagcaaagacttggaaccaacccaaatgtccaacaatgatagactggattaagaaaatgtggcacatatacaccatggaatactatgcagccatgaaaaatggtgagttcatgtcctttgtagggacatggatgaaattggaaatcatcattctcagtaaactatcgcaagaacaaaaaaccaaacaccgcatattctcactcataggtgggaattgaacgatgagatcacatggacacaggaaggggaatatcacactctggggactgtggtggggtggggggaggggggagggatagcattgggagatatacctaatgctagatgacgagttagtgggtgcagcgcaccagcatggcacatgtatacatatgtaactaacctgcacaatgtgcgcatgtaccctaaaacttaaagtataataaaaaaaaatatatatatatatgtaaactttgcagttgctttgggctttagccctaaatgaagacaaagtgtacgccattcatggctatttattttcctttttgtctctacttagtgatttaatttcagcgtcatttagcagaactaaagaaaggctcttgaatccttgaatccttcccgtatgagtgagtgaacccagtccccttttttttccagactgatatatttccagaaccctttctgtttgggatctgcacgagcccatcacagtggcccaatcaggccataaatatttgctcacctagatgagaaggcacctctgagttgaccacagggaaaacagaccactctgtagaaatggaatgaaatacgcttgctagcacaggagacttttttaaaaaaactttgatatttcctaatgcatcaatttccctagttatgaagaacacatttgttaatctgatgtatgaaccaccttctcacgctgccccctttgcacagatcctccaggaaatgctgtacgggcctgcagtagactggtgggcaatgggcgtgttgctctatgagatgctctgtggtcacgcgccttttgaggcagagaacgaagatgacctctttgaggccatactgaatgatgaggtggtctaccctacctggctccatgaagatgccacagggatcctaaaatctgtaagtttggcttacccagctagcttctgatgtattgcaaaccagcttgtttcatgtgctgcttgagtcttttcagtacttcccaccagtaaaccactagctctaactaaaatttgtattgttctaatctaaagaatcaaagaaccagagttctgtcaggctgttaccctctcttatgcaatagaccctctcttatgcagtagttattttggggtcaatttcaatagcccttgataactttgtttgccaaatagcaagtatttctagcacttcgtaactttagttgagggcaggtgatgtttccccttcatacagtcaggccacaccagagttttgggtcaagtaaatgccattcccagcctgttattatatcaattgtgtttctgttggcatcttcaagttgcaggatgaagcggtcgggtctttctcttagggctgggagaggagaaggaaggttttccaaacctctgcagatctattttgcctccatgttattcttatgaaagccgggtgccacgcccaggctgcaggtgcaatgttgtaatggatcatgttgagaaagtcttttctgtgtgtgcatttaaggcactgtgctggatgcctttgaattgaggataaacatgtactggacgcctttatgttgaaaataaagtacatgtaatttgggtcagttctgtaaccacattagttgagctccaaaatcatgtattttcacctactatatgcagaggggttgtaaaggcaaataaaagatcagtttttcaagaagggataaatcagaacaatctatattctgttggatagtatctatggcataagaattactatccttaagttatatcctttcagtaatttgagacaaaagcaaaatgtgggaaatatttgctatcttgttgaaagacttgtttctctttagaaacttctagccctataatcagtgccatttcagggacattttttatgtgggtcactgtgtactggggctgaaggcttgattgtccctgagaattctctacatcgctaaaagagaaataatcacagaaatccttctgaggcaaatattaccaaagtgaatcataacacatagctcaatcctcaagctgaggtgtcagtaccctcctgaaactgagaaagcactaatttcacagaaataaaagcacagtactttgggattctaccaaatatctcctatctaacatgtttttgtaagaacagttcatttgttatattagtagaaattttagaggaaaccataaatatggcttttataattttatggaaaaaaaaagtcacagagaagggcctgtcttcgtggatttgtgccatgaagtttcttaacttcctgaagggaaatgtactcacctaggttggctgcagccaattttgataacataaaccatgataacacagcctcatcgtgctgcagacggaggcgtactttgcatgatcactttcctacttccatggcccagcacctggctttttgtaaaaaagcatgccagccttctgtggcctgcaacagccaccttcatcatactaatggttttccatgctccacatatttagtccaattactgtagctgatttagtagttttaatatttagatgaaggaccccacagttcataattcaaattaaaatactggttcaagccataaaaaaaatgcctgttatcagcattggtgtataaaggtcactaggcttggtaccatgaagggtaggaaataaaagtcagtctatgcctcaataaatttttatattctctaatataaacactggattagcaatccagatcagtgtttctctgatagataccctatgccttttgaatctaggtctagtagaaatcttaagaggccacatcaccatttgagttggacattcctaattttttgtctttacatttttagaagtcctcaacctcattctcgtgtttcagagtcctcttgagagaatgctttccaactaaatctgaaactaggtatcatccccttagcctagaacctaggacaagtactaagcaaggttaagattcctatggaatttttaagacttgtttctttttaaccgggtgagctcagttacttcaagctatatcttttatgtaaatatggatatttttggtaacgagcagatacactgtccagtaatagcctcatggtctttcctccaagaggaaacagcctctggtgcctaaggagaatcgcatccagtggagactgagttgttctctctccttgcaggttcacttttgggaagctacaagtcccttcacttctctttatttcagctcctttctcatgccagctgctccactgatggaggcagcagctgcgattgttacatatcatgcgtctagcactcattttcctaaataacactcgacgctctctctgggtatcttccacataggaaggagcaggggctctgggctcacagtgccgggcctgcctcccagtcctgttaccttctggctgagtggccttggtgagcctctgtgcctctctgaatctcagtgtccttgcttgtaaaatagaggtaataaaatccataccatagggtgattgtccagattatatgaaataatataggtaaacttcccgggcacataataagcattctgttttttcctccttcaaggcatgtaccttcaatgtaattttcttaaaaacacttaaatgttgtcagataaaattactaaaaaaaaaaaaatcactaagaggatttctgggattttttttttttttttgtgcattttactctccatgcctaaaaacaagaagcttaaatggtatagatgaaaacattcagctagtctttgcaggggactgagacatttaaatagaaatgtgatcaaagagaaaaaagaaatgttcagagcactcaagacttgaggagacacactgaggagggaaaggcatcagaattgggttggttaagaacctgcctccagagcagagctgcctgggggcagatcttggctctttgactaataggctgtgtgaccttgggcaaatggcataattcttgcatgccttagtttcctctccatttccttgggcaaatggcctaattcttccatgcctcagcaggtggggtgtacaacccacagggctactgcgtggttggcatgagataacatgtgtgggtgcctgaagcagtgcttggcacagggtacgtgcccaggaagtgtcctgcactattactgctgagagctgcatgcatgaaatgatttttttacactctgcccttatctctgaaaaagtatttgtcatattaggaggagggttcgagatagcaaggtgtgctatgccaaccactcaggctgctttctggctctaattgcaacttgatttaattaggccaatatagttattttactaccagaagaaaacttagagattgtcccttccaaccccctcgttttatagatgaggaaaccatgaggtactgagaaattgtgactcatcaaaggccatttaacacattacttaaatcaattggggcctttgtgcactgctgatgaggatgtaaaatggtgtggataatggtatggtgggaggttcttcagaaaattaagcagaattaccatatgatctagcacttctacttctggatatttacccaaaagaattgaaagtgggaactctaatagatatttgtacacccatgtccatagcagcattacgtacaatagcccgaaggtggaagcaacccatgtgtccatcaacagatgaatagataagtaagatgtggtacgtgcactctgaacaagcattcatttggctgcacagggccagatcaaggtatactgtgttctttaccaatattgacttgacgcctttttccagaattttgtgtccacctaagatcaggctttctgggagcttggtgacttcaagagttcctcatgtgaatagttgaatccattggatggtgttttgcatagttctaaaaacagtagggaaatcatgagtgctaagttttgaactgtaattatttgtctttgcccttaattttatagagctttgtgatcattagaggcataaacacagaattgtagagctggaaatagtttaaaaatattttgtccacatttcctcatctgtagatgaggaaacgggcccagagagatgaagggactttacatgttagaatggaaagaacacaccctagacctcatgtgacttctgccactgattttcagtctataaaggtgtgataataacacctatagtgcccgcttcaaataaggcagtatacatgaaagtgttttccaagtggaatgcacgatacaagagtaagtgattagtattgctaacttgtgagtagtaatttcacaacacacttagagatgtcattatcctcatcttctccttgaacagttcagcaacatcatcaaggttattaagtgcttaattttacacaaggctgtggtaggcttttattcctaaggaaattgtatttttgtttttccaggagcttttaaatcttgaccaaagacatataggtggggtgtaaatagccaaatagatattgatctgtttatttatataataggcttatatcaatgcatatgtgcatagcaggcatgggttctgcaatactcaggttctgtgcgaggtgccaggaattcagtgatgagtgaggcaaacatgatcctgctcttgtggaatttacagtccagttggggtggggagggagaaagaaattttaaagagaaattaaacattaactatatacttacaatttaatgagaaaaaaataaaatccaaggttctttgaaagcatttatttaacaggcagatctaacatgacctgggccaccaaaggaggccatctggaggagatgacatttaataaaggctgaagagaaatgaggcttgaaagtgtgcagaggtcttgagaaaggagcagtccatttgagtagctcaatggcaggcgggttggagtgtgatgagcaaaggggtggggcagtgagagcttcaggtgaggaggctgagggaacagtgagagcccaaaggacatcctaggtcacgcgaaggagtctacactttatctgaagtgccaacgtaagtctttgaagaattccaagcaagcatgagtgatgcaatcactacttcatgtgtaaaagatcaccctggctattgtataaggagtggaccaacagactggagtatttgctgattaagtgacttctaggatttctttcaaattaatccaggagttgtggggagaaacagatgaaacaatattgggcatgtgtcagtaaccatcaaggctgagtgatgagtacatgagggtctgtgttactgtcgtctaaaatttccacatggaaaagttgttaaaaccaccatataaatgaatatcttttataaacaagctcagcgtgtgtgtatgaagaaacatttctagcctgtatagaaaaagtgatctccatcttcacaaatgaagggaaatggtttacaatacaaatatacagaaagagctaatgatgtgagccacatacaagctcccctgtggatcctggccacatctcttaaatccagtctcgggttcctggcctgggagtctatgtcaccctcatgattttttgccacagacaaaattaaccagtggttttagcacaactcatttcttcagcatacctgaagagtatctatgccttctcaagaagtgtccttcaacctccagggtagtaatgaagggtaccccaaagaagcatttttaacagaaaagagaccagagaaggagagaatcctcactgttggactttgccccatgctgcctccttgggaccctgggagatcctttcccggcctgctggatctgccctttccccctgagaggcaggaagagctgagatctccaagccagaccttcacagtgcctctctctacagtcttagtgtgggaggggcatctttccatggcttcctgagatggagatttatttaagaaggaaagcttgttgaattccctcttacctttttaaatgaaaggtattattattattctatatctggggaaactggtcagacacctgtttatgttacatgccatagagttacagatgttaaagacctcagggcttcatctggcgtgatgtcagcgagggcctacattcagggttggggagggtgtgtactgtccagcattcctctaaaagtgtgtgactggcaaggcaggctccagcatcttctgaccactaatctaatattactgtccccacaggccctccctgtcatcacctttaccactgccctctccacccgcaacacccccgaggttgtggacttgtgagttctttgtgtatagctgttcaaacatttcctatagacgtgggtagtggacaaaggacttgcttgtgagaacttttcccatggagtgcagaatcagtgggtgcgggggtagcttgagcacacttagtttttagcccaggatttctacttgaaaagaattccccaaatcattaaccagtaatcgcacatctaaaagtaactttatatgcacccaaataggcacactgggaagactatttttcttgcttccccttctgtctttctcatctttgcttcaaatgtttctgctcaatacttaacgtgtgcttgcctcaaaagcagcctgacctgcgactcgcagagaatggagtattcacactggcaggatcctcagaaattaacacaaaaaaggcatatgacgatgacacacacatttgtgtaaagaaaaaataaaaggcattccagctgttatttcttaattttttttaacttggtttgggaatatatactacctgttttctggtgtcaacatgccatcaggtttcttaggctgactaaatcatcccaaaatgctgataatgatgagacaaaagaaagtctatcatttttttagggcttctgaggttccactgagttttgccctcatctaggtccagaagggcttagggaagtcccaggcgagtcagcagagctcaggaagctgaagccttgtctcagaggttagtgctcctttgctgaatcatctccagcaagaaatcacgtgactcagggtctactcaggtgaagtcggcacccttgtctttgagctcacacaggtggctgagctaaataagtgctgaaaggagctgggtgcactctcctgagtcacctttgttgactctggaagcactgtaaacttggcatcagaaggagattataaagtgcttttgttcctaagctttataaagtgtgtgtgtatgcatgtgggtttctctgtcatccagcctctcagatttcatcatccgagcattgtctgcaggaatcctgtttgcctgtacgcacaaaggagggagaaccacagttaattcggggatcctcttttagccctgagtgtgtcccacatctgtcaccaggcagtgaattccaggagcattgactgtcttcctgttcatttccctactcccctcctgggagaggctggaatgttcaaggaagccagcaaaggtggtcagccaggagaaggctggggaagaggagggaaaaatgggacccgagtaacgcagaggatccaaccccagatcattagggctggtttttcaaacactgttaggggaaatccaaagaaagttatcaaaagatccttgagtaagaggagtggttaacatgcaacctggcagactgttgccaggactggaatacctgtctgaggaaaggaaggtgccccacaggcctcttaccaaaacccctagtgaggttaacacccttcagaaaaggaaccgtttgctcacagatcaaggccagtgtctgcagaaaacagaaaaacactgctcttcccagagattttgtatttgggtctttttaagtcatataattttactaaagttcttgatctctacttctttttccctcattaaattgtaagtttcctaaggttggaagtccttacattttgatagcagtgtaaaggattttttaaaatgtatttttaatagagtactcatgctgcatgtctcatttatctccatccctgccaggaagataaagatgtcaaagcttttgtaaaatgaccacggaaacttttcctgtgtggagatttgctaaccggtgtctgtgggtcagaaaagctttttgtttcgagttagaaaaactcttgtcaacaaaagtatttgactttgttgttttttgtttgtttgtccttgccaactatcaaaggtcagtaatttggggcagttgatcattagatttggtttggatgccaaagataatgcgcatccaggataaagaagggtactggccttgatttcatcagaggaggataaaggacattgtatagtccccactagagaatctttgttcagcactcacttctcttcagtagctacatttggggaatcatacctggaaaaaagtagttcgtatagcttgggcatgtagggtagcagcagctttttcttaacacttggaagtcattggagagcattgaaatccgccccatcagtcagagctgcttgagactggtttgtcaggaatagaagcatgttgtctaacaacgggcattggcacaactgcatgaccttgggtttccatctccgagacttgcctctaacctttacctacggttaatcaacattgtcccatgaccagaaagaagatacaaggaagcaataatgattataaaacccaggaaaggcagggtgttgggagccttggaaaggaattgagtatgtgcttatgaagggctgctggattccagtcacagacagcatggaaaacacagccagcaaacccaccacggatttgagcactgcccctgcccgctagaggaacagtatagggcatttagtgtactgagtttcatcgagagaaaataaagtacactgtgtagtgtgtctctggagatatcgcacagaatattctgatgctggtcagttacaacctgccaggtaaggcactgacccaccggcattctcaaatatacccacatgcccacttcctccatcactggctcagggagatcagcttgagcaagtttatttcactttatttttaataaagaaaagcccatttcagactcaaggaaaacaaagcatctgtagctgagggaaggacaatcttcaaaatgccagctttttttttttcctcccagagtttttagtgataaatgcaaaaatagaagaaagaaaagagtcccttgatatgggcacagactgtggaggccactggtgtggccacccacccacctgacgccggacaggccagtccggctctgcttcacgtgttttcaatgacacaatgctgttcctgccagggagcactctcatcacttaatggtactgagtattacaaccacattacgtgttttagtttttcttatgatgtatttagatatgctgcctttaacttccactccctgaacttatttctccctgaaattatttctcatctaatccctcttctggccgacagctctttgagtatttgaaaattttaagtgtccttctatcttttccagcaaaaagaccctcagtagtttgaaataaaaccaggtgtcaggctgaaggatgcctcggattttttccagccctattacttttctttcccttcacttaccacctgcactgtatgtacttctcagcccttctccttccatagaatcagaggaaaaagaatgtcacatgagccagcaaagaagtacaacacaaggaaacacacagagtgcgtgaattctcatcagatgaagtcctgagtgtcatttattaggtgaaagtaaagtaaactgtgtaatgattctcctcacctgtcggtccaagtatcttaacccagaatccaaataagaagattggtagcctcaaggggaagtctagcgtagggactgagagcaaaggcctgagttcaaatcctgactgtagcactcccaaactgtgtgacaggttacagatgggtctgtttctcagtttcctaatctttaaattaggaataataaccacagttgctttaaggattatatccaatgaatttggaacacttaatgcctatgcaacaaaggagtatgcagcatacatatatggtagtaatggctaccacttcttaagctgtaacttgtatcaaacggtatcattctctactctctccactcctgcagcttcccccttctcaaaccagtctggatacctggcagggtggtccattgccatgagtgtgcaggtaactagttccagccctccccagcaaattccatccagatccaatcttagcaggatagagcacctctccttctcttggctcgtccagtattccatagcagcaccattcggtataagaacctagacttgggaagattacagtttgtttccccagagagattcaggaagtctgttgtctgtcctttccaccctaccaagccccatcccacccccagtggactgtcatcagccccatcttgcatttaaatgtctgtcactgccttctcctatggaaaagtgacttatcaatgccaggtccaagcctggtgtctctcccatactgtgcagccacatccctgcatgaccactgccctgagctggagggtgctgctagcacggggtgtctccagatctccccaacagctggcaggaggggtataaaaggagaaggttggtcttcataactgggtcagaatctgcgtgtgccagcagcatccttcagacagacacgcgcctgcaacacgcatgcgtggtgtgcttctcgtcagccccaggtggccattagggtctatggtcatggcgaggttgggcgtcatggctgtgaaccgcactctattctgtgtcctgtgctctttctctgccctttctccccaggaccctctctagagccattaaatgccttttccccatttaggatcatcgctctggaatattggcaggaaggttctgtggcatagtttccttgccttctaacttgccagcattagctgctaactctctctctgccctttgtttaaggtctgaaattgaatgaatggagaaggtcattttgtttgcccaacagccacatccaaccattaggcagaaaatacagtgttctctggctcctggaagaaaatcttattagactaattgctttatttatataacttgtcctcttcctatgaaatcagacagattttgaaagaggaaaaaaatacttgtggccattacttatattttagtgagtaaagtacatttgggcccagttatttcaagactcataatgacacagcgttaaactctataatctggaacatccaacaactcaaaactgaagctgcctcctgtgtgcccacaagatgtgataagcaccatacctgacaccagatttgcaaagaagctgctccactgcacccatcttgctgcatttagtttctctgtcctattgttaatgcagatatagttgcacattaaaacctattgtttgtaggccgggcgtggtggctcacacctgtaatcccagcactttgggaggccgaggcaggcggatcacttgaggtcaggagttcaaaaccaggctggccaacatggtgaaaccccgtctctactaaaaatacaaaaattagtcgggcgtggtggtgcacacctgtaatcccagctactcgggaggctgaggaaggagaattgcttgaacctgggagggggaggttgcagtgagccaaaattgtgcaccattgcactccagcctagacagcaagagcgagactccatatcaaaaaaaaacaaaacaaacaaaaaactattgtttgtattctcgttttaagattgtcttagaaaaggttttctgtcaggaaaaaaaaaaaaaaagttttccaaatagggtttggtggtatgtgcctataatcccagctactcaggaggctgaggcaggaggatcacttgagcttaagagtttgagaccagcctgaacaacataggaagatcttatctcagaaattaaaaaaaagcaagaaaaaggaacattattttccaaagaccattcctcccactgcactactggagcctaggacagtgaaggcagaaagagatcttgttctctcttacctggctgtagaggaacagggagagccagatgagcctcagggtcaaggctgacctcagagtgtagtctctcagcagctttctatctgtgcccctgccttttagtagaacaggatggacttacaagtttggcatttgggtcccattagggacataagcaaataatggaagtattctgcaaaagaattatgctgccactgttcacagcggtgggaacagagtgtttagggacagtctattcgagcctaggacggcaacaagatgttcactaatactatcatttcttgagggctttctttatgccaggcgctttacgttaattctctcattgactcatcataactttttaaaatataggaaaatcttcatgttagagttgagaaatctaaggctcagagaagttaagaaatttgtccacagtcacacagtaactcagtggtgaaagaatgatacaaacacaagcagtgacactgcagagcctgaccagccctccatgtcagagaagctgttagttctttcagccttccctggcttgcaggaggcctcccaggacattcctatacaaacttggcccaaatcctttacatgtccccttagaactagcgtcaggagggagcatgcctgcttgctttcccctgcagccacacctcctctgtagtctgggaaaaaaactgttaagtgtctcattctcggggccaggtgtgcctctgattccttgagtatcctctagttcagttccactgtaatgagggccacagcaggaaggggaacataaaatgagtccctgagttcttgacccttctctttcccctgctctccagtcagtttgagacttacacttggggtagaatccagattttccaccctggtcccctcactcactctgtgcagcttataaagtgcttttcttggccctagaaaacattctgcttcctttagtaaatgtgtgcagaatatttcatgaagtcacattattttcctctttggccgactttccctcttggatcacagtcagggagaaagtcagctgaggtgaggcaacttttcagtgtgaccttaaatgtggatgaaagtgatggccccgaggagcacaattgttaacttactggcatttgggtcccattagggacataagcaaataatgaaagttttctgcaaaaggattatgctgtcaccattcacagcagtaggaacagagagtttagggaaaggcctgtgcccagcctaggatggcaagctatccacctccaactccacaccatctgcaccaacgtgaactgtgaaagatttcaggcctgggactaatgttaaatgttcccttaactcctcatctccacatcactggacgggggtagtggtagaagggccaccccaccaccaccacaacacacaaagcttctacccccttagtatcaccccggaccctccttctcccggtcctggtttctgtttcatggtattcatcctcctctggcctcttcatggcatcctccagctgccactctggctgcttctcaccctacaccaggggtcaggagccatgaaagtccgtgagtgataccagccaggtgggaggtgatagggagtggtggggcatgtgactgactgggcatctggtgccccatgaaaagcagaagcccctgctcaactccaggccgtttctatgagaggagtgcaggcccagtgttcccgagtatctcattttccacgagaagttggaaaacctgacttttcatgtgatgtgacatttcctagcgtttaaatatttgagaagtaattaaaattatttcaaaacacactaggtaggccaaataaaatgtgtctgagacctagggctggtatcagttctagtctgtctctgtcactttccacaatctaacctgccctcccagcttcagtggttactcaaatttcaatgtctctgagcgttagatggccagccctggcctgcaccccagatttaccctagaattcatctgcatgtgggtgcccacacacctccaatgcaaagcggagcccatcagcctcccagatttggcagactgtaggatctcagtaagtgtgagctatttttgtctttgttccactaacaaaaatactactactactaacactgctactaatactcatgctacaaagaataatctcttgcccctcttttgttccatttctgttactcaacaccactgccccatcaggcagccagggaggaccctgtgatcttggactcttcactcccattcccggcagttagtggattgtgtttattcttccacggccctctagaatgtgcttccaactcttccttccaattaactagaaactctcctagttgctgaacttgtcatgtgttctcagctattgtctcagcctctaactgctcaccaccaggcgctacctctgcatttaagatttattcatcacgctgtggctagtgtcatcccctaaattgccgtgcagctctcatcactcacctcggatggatcccaccggctgcccccgcagttcctcagccatccctgcatgccagctgtaccaggcacttgtatgcctctgcatttgtgctggctgtgtcctcaggcgcattttcttccttcatgcctactatgttaattctgttcgtcctcatctctggtcaaatgccacctcttccacgaggctgtcacttgccttcccaccaccagccccagtgttatttgccccgtgcctcttccaagctctcacagcacttgatctaagtctcttttcatttcatccggctgtgtattatgaagtttgcttgattcttcccccttctcttgattagctcctggatgaagagacactgtctttgtcatctgcgtatccccaagaaacccctagtgtgctgccttacatgtagtagacaccttgaaaacctttgtcaattgaatcaaagtttgtttgtgtgtgtgtgtgttttgttttttcttttggtttgttttttttgtaagttgaggatggctgcatctaaagggctcaggccaaggtattaaaaacaaaactgcttggttattcaaaaggatttatcagaaccccaagaggctaagtatcaagctagtgaaagggttattctgcctgtccccaattccaagggtgcagtttttagaggacggacggtcgtgtttggtctacttgtcgtcaggcaaggcctcttccacagtgccccatggaagcttgggttcagtgccaggggcagggaggaatgggcaagcctcttggacactggggcttcagccaccctggcatatagagtcctgcactgtttgtcttgcccagaagaacaggctgtacccacccattcacaagatgtcctctctcacatcattggcaggcctgggaatttcccacaggccatctgggtgtgttctgccgtcctgtctcccaagttttttgcagcattgtttcttgttaattagctcttagaatagcaactgctcttccatcaggaattgtatcccgttgactttcctaaggcaagaatctactcatttcttttttgtaagcattttctcccttcctgcctgcattgcacaggcttacttagtgagagcccaagcagtgtgaactaactcctagctcttacagaactgagttacttataatatgcatctcctgaatcctgggtgaccactgtaagtgcctgaagtggcagctgctctgactgggcctgtgcagctctgaatgctgcatttacttttgggtcctgcctccaacccagaaccacctgtggcctttaattcctgttactaggagagaggagaagcgattaaaccctgtcagtatattcatttattagctgccctttgaagcttttttgaaagcattttacaaggtatatcccgtcaggttgcttaggaacttttgcagcctccttcttcaacattatcattttcatttgaatcaacactggcagcttgacacctctggacacctggcatggcagtgggaggtacctccaaacactgtctttccgtgtctgcaccttcaacaagattttctctgtaaattcagctccaaaacaatttttataaacacagcattacttttgtgttgttcacaaatcagatttggaaagaggtgcttggggactgtcatgagtctatttaaagataacctgatttaaataaaaacaaaaacaaaactttttatccaaggcaattttctttcaatatgggaaattaaattagcttcagtgtctttgaaattgagaaccacactccggccatgaaaagtgaattatcctgtactaatccttgctcaggaagtgatcaaaacacctttcctggctattttgtgaaagcagatttagcccagcatattttgataggagcccagcactaaggaagtttcccaactgatggaaatacagagaatctctatgcacacatcgcttagctgtgtggcagcgctcgttttagtttttggtctatggagcaatggaatctcagtcattgaacctacttcgaaacagcagtggtggggggaacatcttgaagaaaagcctttcatctagagctatgatatcttcgctgcataaagaaaagtggccaactttgttttttctagagccaggacacagaccttttcagtatgtcacctttgctgcttcttcacacagatcttcaaaaataacgactctctctcctctctgtggtctcgtcagagagcaggaatcctggccagctggtcaggtcactcagaaaaatggcacagctgtttctgaaagtagccccattcataagatgtctgctgcccacaactgcagtgttggggaaaggcacactgttataaagagcttcttttctttaaagaggaaagaaaaatacatggtgtttacagaaaagaaaactggaccctcctgctttcttttagtggccatgtctgaaatggaagtgggaaaagccataaatccacacaggcaatcgcgcctttaaggcatgattcatactgactgtgctgcctgtgatggaaaacccagctagttaagcaagacctgccagaaagtctcgcacagctcctctgccatggctgatgcctgctgtcttgtgacgtgctggttgtatgtgaatgaatgattgacactttctctctctctcactcagttcatgaccaagaaccccaccatgcgcttgggcagcctgactcagggaggcgagcacgccatcttgagacatcctttttttaaggaaatcgactgggcccagctgaaccatcgccaaatagaaccgcctttcagacccagaatcgtaagtgtcccaggctgtcacagagacattcctttcttcagatgtcacagcattccaccaaagtccgtagaagagctggatggcccctgtgggtgacagaccagaaattcagctggatactgcacagggcagcctcccctggggggaatctgggctccttgtccatgggacaacaatgtcttcatgtgcccacattaattcttaccaagtttcacccctcgtttacccaatctccaacttctctcaacctaaattaaaatcttgtagggtataagaggcctgaaactttccaggtttccccaaaagagtttggctaattgagaaagtcattgttctggccaatttcctcatgctccttggggcactttttgtgccttttctaagcccctgagaaagcagagtgggtaggagatgttgctcacttcactgagcctggcctcttggcttggagagcctgggtctgtaatagctgctgcagtgcagagcccaggccaggccaggcttctttgaccaaagaaatactgggatctccaggggctcctctccaagctctgcagctgaggctggtggccttcctgagcgtggtcccgcttgtggtctgagagctgagctcgtgctcatctgtgggtcaagagctccacaggaggaaggcagagaagcaaggctagcgatagatcaagagtgatggggagacctggcgtggtggctcatgcctataatcccagcactttgggaggccgaggcagatggatcacttgaggtcaggagtttgagactagcctggccaacatggcaaaaccccatctctactaaaaatacaaaaaaaaaaagcctggtgtggtgatgcacacctctaatccctgctactcaggaggctgaagtagaaggattgcttgaacctaggaggtggagattgcagtgagccgagattgcgtcatgcgctccagcctgggcaactgagttagactttgtctcaaaaaaaaaaaaaaaaaagtgatagagaaatatcattgattaaggtaagagcagtgagatgtgtgatactcacttagaaatgatctttgcagcgtttgtttatacagatataaaatactcaacttttaaaaacatacagtgcacttaatcactaacagcctactaggctgttggacaccaggcacccagaggtaaagccgttccttcaatggtcagccccctgccagcgcccctgggattagggagagcatggccttcagaggctggagcctgtagtcctaactgcacagctggtccagcagggcgtaacgcatctacctagagagtaaaatgaccaacagttgttccctaagctcagcacttgcaagaaatcttttgggaagatctcttcaaatgtctagaactctgcgcaaacaataggtaggacaagtgtgaacctacccaacctctgttgacaaatacagctgcacacccctcagcgaggcctgctgtgaaatgccaccttggtgaaatgagaataaagggtgagtgagccagctgcttttggatgaccaaattaattcttagcctcccattaagacaggcctgctcagcaagattttcatgggattagtgaattggtggttgccaaatgccataataatgcaccatgcagtagacttgctgtaaagcacagtttcatcataacaataactgtaaataatgctactgaacaagctacagagcactcctctgaactcactggaatgggctatatcccatgcaagatgagtaagcctcaagcgcaaaaatctcacccttgtttcccttttttttttggcagaaatcccgagaagatgtcagtaattttgaccctgacttcataaaggaagagccagttttaactccaattgatgagggacatcttccaatgattaaccaggatgagtttagaaacttttcctatgtgtctccagaattgcaaccatagccttatggggagtgagagagagggcacgagaacccaaagggaatagagattctccaggaatttcctctatgggaccttcccagcatcagccttagaacaagaaccttaccttcaaggagcaagtgaagaactctgtgaaggatggaactttcagatatcaactatttagagtccagagggagccatggcactagaaatagttgataatgaaatgagattttatgaagtataccgctccacctatgagcgtctgtctctgtgggcttgggatgttaacaggagccaaaaggagggaaagtgtgaagaataaagtagatctgagaaattctgagccaatcaggcttcttaattcaagagacaaaccaagacgttctgtcaactgtgctgtgctcttctttaagccaatgaaccccaattcctggcagtctacaagaagtctcttaatgctaatgaagaatttaaaggtctttttaaggaaatgaagggctttccaaatagaatgatttactctgaagaaacaaacaatggtatctctgaaactcacaacctaaagcccaatcttgaaaatatgttgtgcaccaagacgactgcttcagcttcttctcttatccttactttctttaatagatatttattaaactgtccagtgaaaaggtgccacaatgcccagtattgtaaacaacaggtttgcattcatgaagctttcattcattctggagtctactaatttacctgaatggtgtttgcattctgtgaaatgcctctccacgttgcatatgtcacacttttgtctgcacataactcttttttcacaagaagggtcactgccacaacagcacagtcagcgggtgaattacaggtgcctgctgcctgcctacctgggtaatctgatcttgtctgtatcgccgtgtgctcatcactgaagaattgcaggccactcatgtcagtgaccagatttgtggcttataaacattagcagtttatttatgttttaagatgcaaagatgtgtgtttgatattcactttaataattagaaatggatcttgtaaacagggcatatatcaaagatgaccttataatatgtacccgaatatacagttcaagaattttgtctgactggaaataaatgcattttgtagcaaaaggaagtgttttgactagaatgatttgtctccttcccactaagacagtagatttccaatcaaaataaaaccttgagcagaatgggtagaactcaactcacagaaaattcctgagaggagaggttgatgtaagttcttctgtgattctctgaagtagatgtggcctgtctcttactgaccaaaacttctgtcctgaatgagggtgatgactgctaagcatagctgtaacagaccaaccctcaagatctcaggggctagacaccataaatgtttatttctcattcacataaagtagcatgtaagttcaacaatcttcctccatcttataactacactatctggaaaatgtagctttccaaagtctccagagcaaggaagagacatggagggggcgccggctgcctgcctgcctctcctaggagggacacacctcacctcttctcacaatgactggctaaaacatggcttccctctaactacagacgggataggggaattatagagcagctgaggagtagctggctagtactgacagtctcttctctgtcataggttcttttttttgcattccaatgcgaacacttacttttgaatgaatagagtagctaggaacttccctttccatttgtgtagcacttaccactcatagtcatcactctcacccacatcatgccactagatcttcatgacgtgcccactattcccactgatgatagtgtgagtactgcagtacatactacaaatggcaagagaggctcagagaagttgagttcattggtttcccaaagggttcaggcttggtaaagagtagatccagctctagggtctaaatctttgatgctgtagtctgggaaagggaaggatcattctgactttgggacttttttggccttcatagctcctccactttgggtcttctattgctctgtgggattgattaactttttgttatggttcactccactctggtaaacaaccacgaaaaataaagcatgcctcctgtttcattcacaaaactcattatcatagccacgcagagccaaaacactgtctttggtaagtctgtgatcactcagcagcttccttcttcacaattgcttctcaagcccactacctgggttccccagtttgggttgagtccattcttttgaggctatttattccatgcctatcaggttattcaatagctaatgtttatatctgagaagagagaagatacacaggatatttacctaaagctcaaatgagtcttcaattcctggttacaattctacttcacatctttcttcagttctgctagacctggcatccccttccaagggatcacaaggctgtcttgcccacacttcctgaagaaggctggcacagagcaggtagcgagccattcaggcaactgggccagagtccactggggctgctgggttccctcagcacagtgggcagcatggaggtcaagacgaggtcacattgggacctttcactccctcaggtccatcttaagacatc

SEQ ID NO: 485 - DNA, 137925 bp, Homo sapiens
  source 1..137925: mol_type = genomic DNA
gcctggccaatatggaaaaaccccgtctctactaaaaatacaaaaatcagctgggcatggtggtggacacctgtaatcccagctacttgggagactgaggcaggagaatggtttgaacccaggaggcagaagttgcagtgagccgacatcatgccattgcactcagcctgggcagcaagagcgaaactccatctcaaaaaaaagaaaaagaaagaaaaaaagagaaaacgtctgagaaccgacggcttgtatttaaaacgtgtgagtgggtggtggcaggagaggtagacagggagcagggccggcttggcggaagctttgctgtagagaggggcagagatggctcggtgggtggagggaggggcaaacggtgtttaagaagaaaaaacgacagcttctgcgtaggagaggggcctcctgtccatctccagggagaacatgggttctgtggccacaggtctccccagggcctggcatcaaggaggcgccaggcacgacctgcgggatgaaagcacgtggctgaagtcctggtggctgtgtctgggtgaggggtgtgagggcgtggcctgagcaggtccactctcaggggagaggggccgaggccaggaactgggtctgggtgtccacctggtgcctgggtgaggtcctgcaggcagcaggtctgggcttcagtggatgcagccagtaagggatgggctgatcagggaaaaccgtattttcaggggaggagcccaggaggcagggagctgggcggcggtggaggggcctggagggcgattgtccagatcaagcccctcgagtaaggcccgagaggctgtggcttcagaaatgaaggtcatgggcgactcgggccaatgccgcgtccttgacctgggcgaagtgagcggttgcactcacgagtgtggacggcccttccctacaggggaccttggattcgctgggggcggagtgggggctggggcccagagaacccgagtccggacgctcccgtccgtgaccctggccgggttctccgctcctcgcagcttcagtccgcaagtgtgagatgtcaggggacccctggacggcggggccctcgggctggcagcgcgcgccgcaggagtttcgattcggagggtctgggcgaaggccgagaactcgcgtttccagcgagttcccgggggcgccgctccgtcccagaggccggggcccctccggttgccgggcagagccgcgccgcgcgcggtcccattggcgcaggtgcgccgcgccccgcccaacaggtagccccgcccgacaggtagccccgcccgcgcctcgccattgggccgcggccgggtgtcccccgaggattggcccaggtggcggccccgcctcgccctcattggccgcaggtgccaccgcccgccccgggaccgcccgccccgcggattggccgctggctccacctcggtccgccatgttcggacaccgccccccgcccccgccggacggtcccgccccgcgcgccccccgctcccgccccgcgcgccgccggagttccgcggagttgaccgggtcggcgccgtcggtcctgagcgctgccttccgcgttccgccgcggccccacctggagcccccgccccgcgccatggccggagctcccggggcgcagcgctgacggcggcggggggagcgcgccatgcccagcaggaccggccccaagatggaagggagcggcggccgcgtccgcctcaaggcgcattacggggggtgagcggcggagagggcggggagcggcgcgggtgaggcagggagggcggggagggctcagccgtcggggctcctgcgcgagagggagagagggaaggggcggcgaggtcgctgcgggcccggggctgtcgcgggaggtcctcggtccccgcccgtgagcgtcacccgcggacacgtcgtggacagcgcgggctccttccccgggaccgggtttccctggggtcggccccgcgccgcgagctcctcggcccggtcattgtggtagacgttttcgctggaaagttgggcggggacgttccggccgcaaacctgtaaggactgaaagttttcatcaagttgtgaaaactcctggcgggtttcttaaaatcagcgtttcctaaacgttctccacgtttacccggtcgggggtctcgctttagccaaaatccggagacccggggcgcgggcgctgtggctccaatgcagcccccggcagggctcggggcggtcgggcggggacaggggtttctggaggagacggtggggccgagactgaccctggggtttgcgtcgcacccgccccccggaggcccttgcctggctgtgggagggggcgcggtcaggtgctggagcggaggggtcctggactcttggccgccgcctcggggcagcgctgctgggggtggcgggggctgcaccaggtggccgggctcacaggcacagcggaggggtcgctgccccccgaagtgtgggcggtggggaggggaggacccgtgggtttgttcttccacctgtgcgcgtctccaggagccccgaactgggacctccgctcccgcgagggtggctgctgctgcagagagggaggggagcagaatgcgggctccggacttgcactggctggtccttgggatctcgaaaagctgctcctgccccggtgcgtcctcagctacagcgtgggcaacctgagccccagaggcagggacggccggcagggttaggcgggtgacaacttccccgggccacgtcctctcaggacagtgccccgggggtctctatggtgccctgcgagtctgagcgggttcagcttcctgcgaaccttgtcttggggtctcgggtcagccatctggggctgcttggccccgggtttgttgaggaggctcaattgtctcttctttgggaaggttggggcctctgcagctcccctgtggcaagcacctggaaccttcggggtgcagtggcccgggtttggtgccagaaccagaagaaagggatttctgggggactgaccgtccagccctacctgaagaggtagggcagccatgtcttttggcctggaggtcagcaggttaaaacttggtatggttgacgttctggctattggacttgtccagggacctgggcttcctgtctccttgccattctggagccaccacactgggcaacaggtgatggtgcggagctcaggggagtcctgcgagagggaggtccacacccgaggggctgcaggggcccagaccctcctgcattccggcgtccaattcctgggaccaaggctcggaggcaatgccactggagttctgggccgccccgtcctccctctgccttgctttggcccctgggagcactttggtggtggggcgggtgtaattccacccggtgactctggtttcccaggctggagagaccaggctcccaccccttcctcttccctcccttcccggactctctcccctctctccccaccccttcctcttcctccctccttccctgttgttttccctcctcttcccgctctcccctctctcccttccctgccacacctcttccttcaccttcctcccccttctagggcacgtctcccctctggctcttccctgctcctaccattccttctctcctctctcccctcccaggtcctcctcctctctgctgcagagtgtgaagtacccttctccccgttctggctcctcgtccctctgggcacccggtgcctctctgaggggactggctgtggggtgggacactcaggccttagggcaatgacacagttccagaaagcggctgccaggatgagtactgggttattgaaagccctagaaactctgtccctggggtgagacgctgctgtccgtgggggtagctgagcgtggacacgtggaagactagtctttagaaaaaggaagagcacttcagtcacccccatggggcatggccaccccgtcatccttgcctgtcctcccagggccctctgagcacacttgagatccaatcctcgccaccccaccccgccccctgtgggcctgaggggtccccaggcacctgtgttttcagggagtcccaggtggcctgggccagactcccacgctgagtctcagatgcccgctcttctagggccacaaacactggtgctggctcttccctctttcagctcagacttttttttttttttgagtctcgctgtgttgcccaggctgcagtggtgtggtctcggcccactgtatccttcacctccgaggttcaagcaattctcctgcttcagcctccctagtatctaggactacagacgcccgccaccacgcccggttaacttttgtagttttagtagagatgaggtttcactttgttggccaggctggtctcgaacttctgacctcgtgatccgcccgccttggcctcccaaagcgctgggatgaaaggcgtgagtcaccgcgcctggcccagctcagacaacgtttgtgttcagggagcttctgtgtgcaaagcccagggcttggtgctgaggccaacagagacgcaggagtctctcccgggcggcccagctggctgctgggtgctgagtcctggacgcccctgctgaagggcacagggcagctgtttgattcaggattgggatagggttggaggtggtggcctgacacttcccaagccctggggttttactggagccacccacctggcctctagattggccggaaactggcttccactggaggcaggactgtaggggtaggggcgtggggcaggaagaggtcaaaggtgaagtgatggccgactcccactctggagttcctggtggtcagacttttggactccaggtcaggcagcaggcgtggatgtcagcttggggcgaccccagggtgatgggtgtgtgacccccctccattccttactttcctaatctgccatgatgctgtgggctgtggcgaagaccagccaggttggttcctgtggggtgcttgggcactgggggcaggtgctgggtggccagttccagcaggaaggggtgggtagctggggcgtctgtcccccaggcccaggtggcccagggtgactgggtgaggcctgtggggcaggtgggccctgggctgctgtgtcagggccgcggctgtggaccgatcctgtgttctgtttgcactggagttcttgtctgggatgagaactttgtttcttgaaacttgtctgatgaattcagataaccttgatggggagccagcagtgtcagcgaagagcagagcctgtatctctggttgggacatctcacaccccttcaggcttctttttataggccctgtgctcttgccccgcgctcttgtgggtgtcagaaagccgtagatttttctgaaaattcagtgtgttcacaagggtgtgattcccgctctgagtttcaggaaacaccagctgggccctgtggtggtccctcccctccacgcagggtgagaccagctcttgctcagtgcaggaggtgaggggggacctcgggtccctatcagcagggaagtgccagccttcaaagggtgcctgggagtccgtgagcttccccagcccctggagttcaggtcctgtctggggctgaaaagataaaacacactgactctgtgtgactcggttttaaaaaaaaaaaaatctgccggggcttctgccgtggctgcagcaacggacccagtgcccactccggggtctaaagagtggcctttcattatggaattatttaatccccgccacttcaccgctggcaccgtcgaggtctgggggcaggtctgactggtttcctttaccttagtgaagccggcggcctgcaccgacccggctcgcgcccatcccggggtcacccacatttgggtgaacttgaacgagtgcccgaccaggtaacgttgccggacctcccacaagagggcactttcttttctcccattttgtcctcattctttccagccaggtaggtcgcgcttttttctctgtgcaaggaagttgatggtggtcatttttttttttttttttttaatacggagtctctctctgtcgcccaggctggactgcagtggcgcgatctcggctcgctgcaagctccgcctcccgggttcacgccattctcttgcctcagcctcccgagtagctgggactacaggcgcccgccaccgcgcctggctaattttttgtatttttagtagagacggggtttcaccgtgttagccaggatggtctcgatctcctgacctcgtgatccacccgcctcggcctcccaaagtgctgggatgacaggtgtcaggcactgtgcttggcaatggtggccattttttaaactatggttatggttaatggttctattttgtgtgtgggaggggggagggggtggggctgtcatattgtctttggggaaagtttcatttatctaatcaatgatttggttagttggtaatcattttttaatttgattcaaatatgccccacggtaacagatgcccatgtcccctctgccccagggacatcttcatcaccagcgtggacgccgccacgaccttcgaggagctctgtgaggaagtgagagacatgtgtcgtctgcaccagcagcacccgctcaccctcaagtgggtggacagcgaaggtagcccttgtcccatgttggccagaatcctcagcctcaggggacttcgccagggcagcctctgtgtgcggagtgtgctcagccaattctgtggggagacttaaagctgtggaattaaacttgttggcgccaacttttccccagtggggatggtgggaaagaggttggccacagatgcttatcaaggacctgggcccagatgcccctaggaagggctctggtcttgaactgcctgcagggggtctccctgccccaccctgggcaggtcctcacctcttcctctgacctcctttctcatgtcctggcctttttcggtaggtgcttctgaaaggatgggctcttcatattctagggaccacggggagggcacaagcagccagggcctgccgtgtccacctcctgtctcttagacacatcctgaaaaacaaggggattgggagacgtccagagagacccctttctcccagggactggcgggcagctcttggccaaggacacggccgtgcgggtggagcctgatagcgcccccgttgggttgggtacagccctgcagggcctgggttctgtacacctccatgtccctttccagccatagagggcaaggagctctccctccgcccaggactgacctccggagagtgtcctcagccccgctcactgcttagccctccaagtggtgcccagggctgcaggtgtactgacttcccttccggggtggctctgacgctgcaccgggggccaggtgactccctagtgtggacggccgtccttggacctcccgaccctgccaggaggtggccagtctgagcatcgggactttgccccccaccagacccttgtctggtgtgctgagcgggctcgtcacagccccctttgcctcgggccttcggcgacgtcagcaccgtctcctgccccacccaggtgacccttgcacggtgtcctcccagatggagctggaagaggctttccgcctggcccgtcagtgcagggatgaaggcctcatcattcatggttagtggcggggtctgtggtgggcagctctggggggctgttcctggctgtgggtgtctgccgactagctgggggatttaaaatggtttaaaatcctatgatgccagagaatttagggatgtctaatataatgccatttgggtttttttctttgactttttttttttttttttgagacggagtcttgctctgttgcccaggctggagtgcagtggcacaatctcagctcactgcaagctccgcctcctgggttcatgccattctcctgcctcagcctcccgagtagctgggactacaggcgcccgccaccacgcccggctaattttttgtattttttgtagagacggggtttcaccgtgttagccaggatggtctcagtctcctgacctcgtgatctgcctgcctcagcctcccaaagtgctgggattacagatgtgagccaccgcgcccggccttttctttgacattttattaacccaaatgaaaactgctcttaacaaagaacccgtaaaccactcagaggctccagtggccagcgtagggcccgcggcgcatgtggacagaggggacagccccaccagccacctcacctgcccggtgctccctaggcccggctccaggctcacagctgtcctcagctttaagttcaaagccccatgatgagctgacgcatgggagatgtgattgtgatcatttccactttgtctttaggtgggcgtgggctcctccccggtactgctgggggtctgcagggcgtctggggcctgggaatgtggttccagcgctgtggccagccggtcacgtctttgtctctgtgtccacttctggcgtagcttgggctccttgccaggcgtctggccatggacgattgagtccaagatgggaccaaagctcgaaaccacccatggatttctgacagatccatcattctcctggacaccgggctacctggttacaacacttaattttcttcgccctttatatcaatgaggctctaaatttaaagactaggccgggtgcggtggctcacaactgtaatcccagcactttgggaggtcaaggtgggaggatcgcttcagcctaggagttcaagaccaacctgggcaacatagtgagacccccccctctccaaaacttgttttatttttttgagacagagtctggctctgtccccaggctggagtgcagtggcactatctctgttcactgcaacctccacctcccagatataagcgattgtcctgcctcagcctcccgagtagctgggactacaggcatgtgccaccacacttggctaatttttttttttttttagttggagtctcgctctgtcgcccaggctggagtgcagtgacgcgatctcagctcaatgcaacctccgcctcccgggttcaagcaattcttctgcctcaccctcccaagtagctgggactacaggcatgtgtcatcacgcctggctaatgttttgtatttttagtagagacggagtttcaccatgttagccaagatggtctcgatctcctgacctcgtgatccacccgcctcagcctcccaaagtgctgggattacaggcgtgagccacggtgcccggcctaatttttgtatttttagtagagatggggtctcgccatgttggccaggctgttctcaaactcctgaccttaggtgatctgcctgcctcagcttcctgaagtgttgggattacaggcgtgagccacggtgcccggccccaatttttttttttttttttttttttgatattcagacgtggtggtgcacctgtagtcccagttactcgggaggctgaggtgggaggattccttgagcacaggaggtagaggctacagtgaactgtgattattccactgcactctagcctgagtgatggggcgaaaccctgtgtcagataaataaattcatagatgtgcctaatctagtcctttttattgtggttgtgatagtaagcacattttgcctctctatgtggaaagatacagtggcttaaaaattcacattgttttctagataaaagaaaaatagggctgggttcagtggcacacacttgtaatcccagcactttgggaggccgaggcaggtggatcacttgaggtcaggagttcaagaccagcctgaccaacatggtgaaaccccatctctactataaatacaaaaattagccgggcgtggtggtgtacacttgtaatcccagctacttgggaggctgaggcaggagaactgctggaacccgagaggtggaggttgcagtgagctgagattgtgccactgagctccagcctgggcacagagtgagactccatctgaaaaaaaccaacaaaaaacaaaaaatgtttgtttttttaaagtttcaatacttttatgtgtatacacacacacataaaaaagtagagatggggtttcgtcatgttggccaggctggtcttgaactcctggcctgaagccatcctctcatctcggcctcccaaagtgctgggattgcaggcgtgagccatcatgtccagccaagttttaatactttctaagcacctattttaataatttattgtggaagcccaggatatatgttaaaataattttgaactctgtcttgagtatgaagaagtggaatctaaagtgcttttaaaagtcagtgttcaaagtaattgcatttctttcccatttttatatagtttaaaaatacaaatcagtagcttcctctgatggctttgctgtccaggtccctctgattgccttttactctaagtttttccgtgggttttaaagtcggagcctggcctacgtagacgcacggggttttgcgtctcccaggagcgggctctcattggcagtgccacgtgcgccttgcgtgaagtccacgtgctcagcctgactgaggcgggacttcctccgtgagactgttgagtggcagccgcagggtcttgacgctgtctctttctctctcttgtccagttttcccgagcacccctgagcagcctggcctgccatgtccgggagaagacagtgagtactggggtttcctacgccggtctcgcatgttacggggttgaactgttgatccgttgtgccacggaggtggcagtggtgccgttttcggaggttcaccctcgtggagcgtcagggcaggagcagccgtggtgaccgcaggtggggttttcactgcagctgctgcctgtgcgtgttctggctgacagcaccacatggcgggggactcgcttggctggttggtagcatgagaagtccaggggtgccctgccgtctccctaggagggaggggccaggtgggaggctggacactgctcctttgtggctgcctcagctcacgaccacccctaggccagtcgtctgctcctcctggtccctgctggcccctgagctggtgtgggggctccgttcatcccacactggctccattgttgggagaggaaggagagtgagtcccgggggctgtggcttcagagggaagcttctgacctcacttcctactgcatcccggagactgttgggccctgagcaggtggctacgctgctctcgggccgcgcatcccatggctgtgcttggtggggttccacccccactctccagaccccacacggcctccagcatccgtgccatgccttgttcgttgtgtgggcaggagctcctggaccgaggccgctgcctgtccagcgcagggcacgtggctcagtgcccttcaggcagggcttcccccacccctgctgccagggcacacacctcgctggcctcaggctggatgctgggtgttggcagtgccctgtgttgggcgggaactgggggtgggagcagattcaggccaagagggtgagtgggcagttggggcgagagtcttggcttccagtgagaagtggggctgaatagaggtttggcagtgcttagcatagggggcgagagtctcggcttccagcgagaagtggggctgaatagaggtttggcagcgcttagcgtaggggaggccccaggagccatgggatttccatgatctgcccggggagagggcggcgtggcatcccggttccaggccctcagccaaccggggtccctgcaccgtggccggcaaggccgaggagccatccggaggtgggccctggcaggaatggagcgggtggtctggggctggacctgccggcaggaggagatggggtatgtccgtggcaggcggacaccaccaggtggttttggcagcgcagggcgagtgtgaggaggcagggggcggggaggctttggaggcaggtggccagacggtgggcgtcagggccctgatcacctacgcagctgccctggtggtgacctttcccgggaccctccctctgggtgcccacgcctcacggaccctggagcacgcaccctgggagggcacggttcactgcgtttttatagatacataaacacataaataggacagatactccctgtgggtgagacgatggttgtcccctccacagcgccctgcagcctcatgctgctgctttataggaggggacccacgggccgtgtttatttgccacctgggtgattttttgacttggtgacaggactgtgctcctctgtcccatgtgtgctgagactgtgcactcccagaggtatccacatgcggccagtgtagcccctgggcgcgggggaagcccaccgtatttctccgacatgtctgcctcttgtctcaaccctgcctgggggcctggggtctgctctttctgtctacgacctcggcattgcctctctgcccgtgtggacaacctgccggccttgcgtagggaagggaggcccgcatttgctcggccactgcagtggaggaaggggaggttggggggtcacaggatgtccagaggcctgagctctgaaggggagtgtgtcatgggggtggcagccgagtcaccgtggggaatgcggagaatgtggccaagccccgaggaaggacctcctgggacacgtgagtaggtccttgagatgtttaccaggggtggctccacggcttcggggaccactcagcctggttggggacattccgccagagcctctggggcagcctttgccgaggaggtcagaggcgggtgctgggggtggggagccctgccctgccctgtgtgctgatgtccacccggacgtgggttgggtttcatggcgctagtgtcaggagtgtgtgagaacacactgcccactcggggtcccaggccaccagggcttagggggctggcgctctccctgatgtcctgtgctttctttcactctgactgtggtgctcatctcagacaggacaccctgctctggttgccagtggccgccgcctggggctctgtggttttagcgcctgtgggggtgttcacaggtgtttttgacctcaggcagcactgcccaggctgagggtcagtgagaagggtcggactgggaggtgtgtacagtggatggagcacgccagaggcagacgagggcaggactgcggctgtaccgtgggcctggttcagacggctggacgtgcctgtctcaccgtcagcagaggaccttctggcacattctatgtgtgtctatatgagtgaattggttttatagatttttaaaaaaattctaaagtatacttacaactatcatctctatgtagttacaaacccaaaatatattcaaaaagggaaccccgtgcccgtcatcggtcactccctgttctgccccagccccacctccgctcagcctctgtctctgtggccctgcggattctggacgtttggtgtccgtggaatcctgcatgtttgtccttttgcctctagtggctttcacccgcctgacctttccaaggttcatccatgatggggcattcttggcgctgcagatcttttttctattctggtaaaatgcacataacatctatttttgccatcttaacttttttttttttttttttggcagaggggggacggagttttgttctgtcacccaggctggagtgcatggtacaatcttggcttactactactctgcctctcaggctcaagcggtcctcatgcctcagcctcccgagtagctgggattacaggtgtgtgtcaccacacttggccgagtttttctttttgtagagttggggttttaccatgttgcccaggctagtctcgaactcctgggctcaagtgacctacccatcttggcctcccaaagtgctgggattatagatgtgagccaccgagcctgtccccatcttagccattaaaatttaaaggttcaattcactggtattcgatattcgcattgctgtccagtcatcatcaccgcccatctccagaactctcttcatcttcccagactcagcctctgtctccatgaaacactcactccccattctgcctcccccagcccccatcacccacccgccgctttctgtttctgtgactttggtgactctaggggcctcctgtgagtggaatcgcacaggatctgtccttttgtgacagcttatttcactcagcaccatgtcctcaaggcgcagccatgcgtagcctgtgtcacagtctccttccttctcaagactgaaccgcaggctgctgtatggatgtattttgtttacccatttctgtcagtggacacacgggtgacttccacagtttagctgtcgtgaatgatgctgctgtgagcacgggtgcacagtgacctctggagaccctgccttcagttctgggtgtagacccggaagtgagattgctggatcattgatcattctatttttattcatttatttttgagatagcgtctcgctctgtcgcttaggctggagttcagtggcacgatctcggctcactgcagcctccatctcctgggctcaagcgattctcctgtctcagcctcccaagtagctgggactaaaggcatgtgccaccacgcccagctaatttttgtactttttgtagagacagggtttcatcatgttgcccagactggtcttgaactcctgggctcaagcagtctgcccacctcggtctcccaaagtgttgggattacaggcgtgagccactgcacctggccgataattctgtttaaagagccgccgtgccatttcccatggtgcctgcagcattttccaccccctgcaatagtgcacgagcgccactgtctccgcatcctttccagctcttgtcgttttctgttttttgacagtatcttatgggcgtgaggtggcatatcattgtggttttggttctcatttccctggtgataagtgatgttgagcattttttcatgtgcctgttggccatttcttttttttttttttttttgagttggagtcttggtctgttgcccaggttggagtgcagtggcacgatcatggctcactgcaatctccgcctcccagattcaaatgattctcctgtctcagcctcctgagtagctgggattacaggcacccgccaccatgtccagctagtttttgtatttttagtagagttgggggtttcaccatcttggccaggttagtcttgaactcccgacctcaagtgatccacccacctcggcctcccaaaatgctgggattataggcgtgagctgccgtgcccggctttgttggccatttctgtgtcttctttggtgaaatgtcttttcgcgtcctgtgtccatttttgaatgggttgtttggtttttttgttggtgagtgttactagttctctgtcctggatgttaatcccgtagcagatatatgattagcaaatatcttctcctgctttgtgggttgtttttttactttgttgatagtgccttttgatggacaaagttttaaaattttcctgaaatcctgcttaatgtttttttcttttgttgcctgtgtatttggtgtcacatccaagaaatcactgccaaatcgaatgttgtgaagcttttccccttctctttcatctaaggattttataattttaggttttatgtttaggtcatggattatcctgagttaatttttgtatgtggtgtaaggtaagcatctaacttcattcctttgcatgtggaggtccagttttcttagcaccattggtgaaaagactccccattggactgcattggcacccttgttgaaaatcgtttcaccatatatgggagggttcatttgtggagtctcttctagtccattggtctctgtgtctctctttgagccagtgccacactgttttgatcactgtagctttgtaggaagttttgaaatcaggaagtgtgagccctccagctttgttcttccttttcaagattgttttggggtcccctgagattccagatgaattttaggacaggcttttctatttctgcaaaaaacattattgtgatttttgcagggattgcattggctctgtagatcactttgggtagtgctgacatcttaacagtatgaagacttccaatccatgaactgaagtgtgtttctgtttgtttatgttttctttgatttctttcagcagtgttttacagttttccttgtacaagtctttcacccccttggttaattcctaaacgttttattctttttgatgctgttgcaagtggaattgtttccttgatttcccttttgcgttgtttattgtaagtgtataaaagtgcagttgatttttgtgtgttgacttttttgcctgctgttttgctgaatttatcagttctaacaactttctgtggaaactttagggctttcttacatgtaagatcatatcatctgtatacagagataattttactttttccttcctaatttggatgccttgtatttctttttcttgcctaattgttctggctagaattccactactctgttgaataaaagtggtgtgatcggccgggcgcggtggctcacgcctgtaatcccagcactttgggaggcccaggcgggtggatcacgaggtcaggagatcgagatcgtcctggttaacacagtgaaaccccgttctctactaaaaatacaaaaaattatccgggcgtggttgcaggcgcctgtagtcccagctactcgggaggctgagccaggagaatagcctgaacccgggaggcagagcttgcagtgagcggagatcgtgccactgcactcctgcctgggcaacagagccagactctgtctcaaaaaaaaaaaaaaaaaaaaaaaagtggtgtggtcaatcatccctgcctttgtcctgattgtcaaagaaaagctttcaggttttcatcactgagtgtgatgtctgctgtgggtttttcatacatggtttttattatgtcgagatagtttccttctattccaagtttgtcaattgtttttatcaggaaagggctttgaattttgtcacatgcttcttctgcatcagttgagacgatcatgtgttttttttaccttcattttgttaatgtggtatattactttaattttcattcattgaaccatccttgcatcccatgaaaaaatccttcttgctcttggtgtgtaattttcttgatatgctgccgaattcattttactagtattttcttgaggatttttacatccgtgtttataaaggacaattacatctgtgttaataaaggataattatgtccatgttcttaagactcaatggtcagaggctttcttgtcgtgactttgttgggctttggtgtcagagtagtgctggcctcacaggatgagtgaggaagtgttccttcctctttaatttttttggaaaagtttgagaaaaactggtgttagttcttcaagtgtttggtagaatttgcctgtgaagacatcagtccctgggctttgctttgttgggaggttctctttctttctctctctctctgtctgtctctctgatggagagagtgcagtggctcgatctcagctcatgtcaacctctgcctcctgggttcaagtgattctcctgcctcagcctcctgagtagctggcattacaggcacatgccatcacacccagctgatttttgtaattttagtagagatgtggtttcacatgttggccaggctggtcccgaactcctgacctcagatgatccacccaccttggcttcccaacgtgtagggatttcgggcatgagctgctgcgcccggccctgctctcatctttattattcccatccttctgccagcttttggtttgttctttttctggttccttgaagtgtaaaattcggttgttaatttgagatctttcttgtttttttatttcaaatatttatcaccatagccaggcgccatggctcatgcttgtaatctcagtgttttgggaggctgaagagggaggatcacttgaggccaggagttggagaccagccttgggccacatgacaaaactgtgtttcacacacacaaaaagttcatcactataaattttctccttagcattgctttccctgcatccctgaaatgttgatatgttgtgtttctgttttcattcatctctcagcatttttctgattttctttgtggtttcatcttctatccattggttgagtgtgtagtgttatttccatatatttgcgaattcttctgttttctttctgttaactgatttctaagttcatcttgatgtggttggagaatatactttggataatgtctgttttttgaaatctaccgcggctgagtctgtggctcacttgtgttctgttctggaaaacgtcccgtgtgcgttgagggtgtgcagccgctgtgggtacagcgctctgctgtgtctgtcagagctatgcgggttactgtgttgttcaagttctctgtttctttacgtgttctccctagttgctttttcattcctttttatggctggatgaattctgtgatgcgattcaccctgtctgtccgttcctctgctgatggacactggtgggggctgggtcgttcggggctgagcgtgtgatgagatcaggagcgcctggttttttgggggaggtgagggctggtcacgccccggtcgagtggggatcccctgtgtgcatctgtggcggcctcagtggtgttggggtggagtaatcgggcggtggagctggggtctgtgggctccacctgctgccacgtgtgccgggctgcccagggcccatgagggtggtggcacgggggtccgcatgaggggccgcaggtgcctcgggcccctctcccgcttgtttctccatcttcactgtccgttcactgcagtgccgggtgaggccagtgtgtggccggtagattcccgggtacctcttctttgcccctccttgctgtatctggtcacacagaaatggtatgtgtgatttttgtttcaatactcaaatctgttaatatttttccttctggcttcccctagtgatacaaatatattttcttccattttggtctttgagctgctttgcctgtctgtgtctggggtggcatccgctggcacctgggctgacctgggacggggcccttctcttggacttgagcagatgagactcacagcccgaaatgcagcagatccctcaggccacgggactctggacgtgtggcggccctgtcggcctgagccacatctgctgtgagaggcagcagtacgttccttggggcagcagcgagagcaaggctggatccaaagacctccgagcagctcctccggggcagaccccagctgcaagccacagcccggccctggtaacgggagagcatcgctagggaggggtggggcggcccggcttcgatgcggccatgtgggagggccactctcagagaccccccgccttccttgccacccccaccccagaggggaagctggagctgggaggctgcagacccaggccaaggtgtggccagggctggctttcttgggaggctttgagcatcctgcttcctggccacccagctctggggctgctgtcaactcttgatttgtagacatcactccagcctctggcctgtcaccctgaacctcccccatgtctgtgtcttttctcactggaacaccggtggtcggctttggggcccaccagggcagtccaggacattcaccttgagacctggccttaatcacacgtgcaggaacccttttccaaaggagggtcacgctcacagcttctggagtaggacatggacttgtctttttggaggcccatcctcaacgcaccacagttgactacatcaaggtctgcctctgatctggtgggagtgctgggtggtctgtctccaccagcactttgtgggtgggctctgtccccaggaaatgctctctgcccaggcccccgccccgtgagaggttcgtgctgccagtggcgctggtcattgggaccatgtgctgggccggcgcctggcaggacagacagcaggtggctcttctgtaggttcttctggctgggacaggcccagccggtgctcagcggaactgagactgacgcccctttcggacccctctaagaagggaggcctgggtgggcagcctcccctcagagttggggaaacgtggcccagttcccgccagtcaccaccctgccggctgccacggggacacgtggcctggttcctgctggtcaccaccccgccagccacatcttgaacggcgtccgttctgcagtcgcttgtccttagtgttccagcaacaccccaaccaatgcgacccccggcacctccgtcagccccgcccgggagagccctcccctgcatccgtgctgtgcttgttgaaactgagatcctctagcctttggcctctccggacccagccccagctgcaggccccagccatggtggtccctttgggaggcgtggtccaggaggtgatgggcagctggagaacccccgtgagtggaggctgctgtacctggcagggagggtcctgggcaagggggcatggagtggaaagggagtgggtgtccagaaagttcctggggctccaccaaccagaacgttgccattaccttgagcaaacgacctgtttagtggtgccttttctttacctgtaaaacggggtgattgtaaataaaatcgtgtgtaaaagtgcttaggaccagacccccattggagcgagtgttgatacctgtctcaaaggacagtaggtggacgtggcagggagggagatgtcaagacgacagccagggccctttctgccacttcccctggtgggtggtgggcggtcccctgaaccctggcagtaagcgagggacctcccgacaccctggctcctccgtgttggctccaggggcttcctgtttctagatggccgggcccatcatgtggagggaggggtggatgctataggcagcagccccagtcttcctttgggtggggttatttctgctgctgctgcaatccagaggctctggggctcctaagtgggtagcctcaggcctgggcagcgtccatgggacagggtggtccccagtcaggccccattggcctccctgtggtgtgtggtaaagactcagggtgcccgccctgtggaggaggtgccgggggtagcctggctttgcacccagaccctgctgagggcagcgctggatggtcagctggaccaggcctccgaggtccttagagtccatggaggaaatacaaagtccgctgggctgggcagccgcagaccccacttagcagctggtggtgtcctcggggtcatcagagccagtgctggctgccctgtgcatttcatgttgttggttcctgcctgtccacagcacagatggcatacccgggcagcgggaccctgctccagcctgcaccctggggaaaggtgtcctacattccacattctgcccgtagcaggcagccccaccccactgtagcccatcttgtcacttagggtggtcccggtagtggcttctggagcctggaacgcttgggtcaggccccaggcagctgggaccctcccgagcctcaccccttgggtctggtgggacccctggggtttggccgggaggacaccgtgactactgcctttgcctctgggtatattccctgctcagcccctgaacccagctccaaggccatttctacttggcaagcgggaggttttcatggccagggatgttaatagcaggtctctggatgcaagggtggcaaagtcgccttggcctgtgtaggggaagtggaggaacctgggctctcccgggccggtggtcctggggcagatagcaggggaaggggctgcagccatgtgggtggagccatgggggccgtggaggggcccttcctgaccccacagtgggggccagggtggggctggcgggggacagtcctcagctgcaggggctggggtggggctggcgggggacagtcctcggctgcgggggccggggtgggccaggaaggggaaggggctcttgaggctccggggccttctggctgtagtgtctcacttggagcaatggcgggatccccagatccatcccctggcccgtctgcctcccgccctcatagccctgtagcctagggcagagaggggtccttggccgggacaccatccccacagggacgtggagggtgctgggcccggggctaccatggagtcgcctgctgggagcagccagtacacctgggcgtgcgacctgggcaatgcgggggccgattgctcaggggggcgcctgcactgccaggttcaaaccccaccggcagggagcctgcgctgtgacttcaggcatgtgggtggggctccccgtgccccgtgcctcagtttcctcctctgtaaaagggggctttgtgaggctcgacagggtttagaggagctcctggaacatagtaagtgcttagcaaggccgtcttgccgtctctcccacccagggagggtcaagtgggaagagagcggccccaccgagtgtgttccaggccccggcggcgtctgagaggaggcggccaaacctagtggggctgcgcgaccgcctgtggaacagtggggacgctgctggtgtcctccaggcctgggtgggcgggttaccacggaagcctatcaacggatgcctgtgattccctggtatttataggtatgtctattgttttattaaaaaatccagtttcattcagctttgtctcaaattatttgcaacaaactggaaaagctagttttccccctaaaataggcttctaataaaattggcaatttgcctgctgagcctgaatatcctagagttctgcaaagctggatattttgggatggattagaagagaggagttggctgaaggacagtggtcgtgctgctgagccggccgtctgtgtgaagtttacactggaccaggataaatgcgtatttcctgtgggagctcagcgtggccatggtattcggtggtcttatgattttataggcctagccaggggtctgcgagctgcttctgtccagggccaggtagttgaagcctggggttctgagcaggcgtgggcagcacccaaggaggtgcatggccgtgtcctagtgaaactttatgcacgctgaaatctgaattttatagactcttccggtgtttcaaaatattatccttttcattttattcagccaattaaaagcgtagaaatcctagcttgctgatttggagcactaggcagtgtaggttgccagccctcgttccccatagatttgggaagtcgagtgaaacgcatgtgttaggtttatatgtttcacattttacggaatgcccctcatgcagctggtcagccgcctgacgagggaagcttggccctttggagaagtggccgtgcctcgtggtgagctgctgacagagctggaatttgaacccggggctctggcccggagtccactccgtgaatgcagataaacacaggtttatgagcttgatgatttaaatggaggttttattactgttcaggcaggtgtgggaggccagccatcaggagatgatgccgttgagaaggtcgtttattactcagcttctgagaggagacctcctcttgcctcgcggggccatgcgggcaagcgccgggtgggttggaggcagggggatgtgtgggtggggcctttactgtggtttccatgggaaaggtgtggggagcaggcattgggtcggccaggtggagtaacttcagccaggctctggggtgcaggggctgtccctgtgacctggggaggcccctggggcgactgggggcccgtgtaggaggtgggcccaggtgagagttctgggttggtgggtttgcatttgaaaggttcgctgtgggacaagtcctttgctgtctctaggaatcggttggcctctcggggccgtccctccagggtcagcagggccataggtgctggagcatcgagggcacagcacgtatgaatgcagggagcgtgtggtgtgactggtcagagccagaggtctgcaggacactcccctctgtccctctgcacccccagtgcgaagcggcccatgtaggctcagcacgagtgccgagtgcgtttggggaagtgggcagaattcccagctgagcaccccgcgaccccccatgttttttatgattggaggaaaatgccaggtctcacttgccagtgatgaccaggtcccagggtttgtcagggtaccagggtaggggttggagggtcaggccacccagcggcggtggcggctctgggtctccctaggagcccgggctggccacagccaggcacagcacagcccgtgaggtctggtcttgggaatgcgggtgtctcctgccttaggctgagggtgtgcgtttccaggccagccgggacagttttcagcctggggaagcttggcctttcctgttcctgccccccagtgcccaccgtccccacacacactggtggggtttgtggggtggacacaaccacatcgcaaggcccctatgcctcctctcctcccgctccgttcctgggctgcgggacagtgctcggggcccttggccattggtgtcgagcccattcacagcctctggacgcaggtcagaggtcactcgccacggccacagctgcgctgtcccccactcccagcctggcaggccaacctgcaggaccccgggcttagctgggttctgttctgatgtcgcattttcaaggtccgctgagtccgagccctgcctgggtctggctgctgcccgcccgctctctggactgtgctgatgcagagatgcttgttttcctgtgacgtcagcgtcagctcctgcacatccatgccgtgttttagtttgtgcctcagctgctggctacagcttcccgggggagccgggtaccacccgggcctggagacatgaggaggcagggatgtgaggggcgggggacaggacagccggccttccgttaaatatctgctcctcgcgctcgagcctccctgcctattgtcggggccggaggcgagccgacgcagcatcagctcgtcaacgggaaggaagatgcctccctgcacgcccgccgcgcacagagcataaagaatctgcgctgaggaggcaggagaagaaagccggtgagtcgggggcatctcccccgtggattttccgcgcccccggggccgggccagccgtgctgcaggccctgtgcgtgcggaggacggtgcccgagtcagcattttgggtctgagtcccggcgttgccgctgcctgtgcgctgcacagatgctccgggcagcaacacggctggtgccacggcccggggaaggcgtgcggctgcagcagctcccagcaatgtcaggggaaacgcagtgagaggctgttgttttgcgggtgacagatttttagaaaaataaggctgtggagggaccttctgagcgaggcaggggctgctggagggacatgctcaccccgaggacggatggtgtgtggcccaggcctggtggatgtgtggcggtggctgtggagggctgggggccggggggcttggggaaatcgtcttgggctcgtctgcctgcctggccccagggagttgctggctgttgggagtttcactgtggccgatgctttttggttgtgggtctgtgggtctgtcggggccaggacggatggccgcttcgtctccattctgcattgctgcaggtgggcagattgatgagaccacgggtgaagtctggagaccccaggtgccagggctggtagtggtaacagccagcacctgttccaggcctgcggtctttccgtctcgagcctgccctcccgcctgtctgagcccccgttttgcattgacagtgttgggttggagtctgggtggcacagccagggttaatgtgcacggctcactccatcggggtcctcggatggtggcgaggagcggggctgcggcgtcctgttttctattctgaaatggttggaggtagactcggaggggtctgggggctgcatggtgtttggcagggatgtgggaatgtgggtgcttttctgacgaccattttgcaaggtgttttttttaaaaaaaaaaacaacaaaaaaccaaaacaacaaccagcctccccagtcaggcttgtggggagccgtgggcctggggagactgggctgctgaaggtggggactgggctgctgggggaggcggctttccctctcggggggtgctggctgctggggaggctggcagcgcgcccctcccccaggtgcgaagggacctcagcagacgcagggctgctccgcacagccagcttgggccgcaggggtccttgagtgatgaagattctgtgttgatggggtgagtgggagagagacggagctggggtggttttcacacgtgcgcctgcctgcgaggagaaacgtgctgtgtcatagtttcctcggtgcctgggacggcttggcctctgctttcgtgtgagcccacgctggccatgcacagctggcacgatcccttgcggtgtgaatacactgctggggtgggagcgccgtggccagggtcaggattcgagcggttactggcttttggtctgatggccctcggtgggtgagtcagagctgggatggggacagattggaggggccaccggctgccccccagaagctgtttcgtgttgatgctgccggggccggctgtggtacctgtgtctgtgtctcggccagatcggcacacatcttccgcgttcctgtcccagctgcatcagccatcagtgggggcccttctccgaccgtcttcctagacttcagagccactggtggttatgtaaggagttgtgtgttcctctgcccaactccgagcttggtcccacctcccagactcacctctgggctccgggctctgctgcgatgtttccgaggctcccagttaatcagatctgtcagcccagtgtccacagggtgcctgagagcccagcccatccacactgggtgccccagaccttccacggggtctggtggggacctgccagggctgtcaatggccccagtggagaggcccactgagcatcctgagaagttcccgtgcttgtgacctgctctcgtgtgtgtagcagcgggggctgcgtctcatctgccacacgtttctgatcgccgaggactcagccgggcacatggaggttgaactgttggggggcgggaggaccatccatggggtcaggcaccaacctctgctgaggatcccaaaatgtggggtagccatcctttcttgtgctggcgtggagcttttcccaggagctgggcagggagctgtcacagggccaggcccctgaatgggctgtttggggccggggctgagggggtgcccagtgccatcgaggggaagcctgtgggaaagtgtgatgacatctgaaaaaccaggagcaggtcccttgctgtgctggtcgtggtgctcgagtgtgggctcagcaggtctggtctcctggcgcccactcactccctggccatctccccacctccctcacatggcagggggaagtggaacgtgcggccactgctcccaccgtccctcacagcacaggctggacaggcaccctgaggcatccccatctcccagcccctggggttggcatgatgctgggcctccagaaatgtttgtcattttatgcaaagggcagaaaaagctttgttcaggccaggcacagtggctcacgcctgtattaccagcactttgggaggccgaggtgggggatcacctgaggtcaggagttcaagaccagcctggccaacatggagaaaccccggctctactaaaaatacaaaaattagctgggcgtggtggtgagcgcctgtaatcccagccattcagggggctgaggcaggagaatcgcttgaatccgggaggcagaggtcacagtgagtcaagattgcgccaccgcactccagcctgggcaacagagcgagactccatcttgaaaaaaaaaaaaaaaggaaaagctttattcaaaagaagccacctgaaccagtcggtcgtccagtgttcagcttgtttttggtcataaagtggtggcacttgtcactcatacaggagacgctgtggcagagcccctccacgcatcggggcccggcagctcatttctaggattctcctgaacacgcgaaggagggcacccaccatgctcgggactggctgcttctctgtgaggcctccaggcagaaccagtgattccaccgttgtggggcagccttggtgggcccacaggtctgttgttccccctgagagaggatcagagtcaggagaggcgagacaccaagttgacacgaacagatccctgctgccggttgttctggcggtgctgtgagcacgtctgacgggtgtgagggtgctggggcttcgtttcgtccacgctcacgtatcgggcacacaggagagtttacacgcgctctggtgggtggaaggggccctgacttgatgttattttgaaatagggggtttgagtgtgtctggtctttctgaagttttctttttgaacgtctcttctgtgggaagtttgaaaagattcaaccgactgcaagacggagccgccctgtgtctgttggggctgtggggacccaggtgcactggcagctcagccgcatcgtgggcccagatggcttcttctgtttgttcctcagcgaaccttgattgttgaaagaatcccgtgaggctgtgtcaagtgtagacaggccaggcctggtgtcttgtcctggtcaggaaattgtgttgttgcccttgttaaatggttgtgtataaagtttgcattgtacattatatttaaaattttattttgagttttccatattttctattgtaaggtgttgatagttctgtgggactcacaaagagagaacaggtgtccctggtcctccctgctgccccagctccactccctggaggggatcacagcagtttctttttgacatttatttccagatttctaaatgacacatttctgctgctatttctagtcgtttccatttaggatgttacttccctactttctctgggacacatcagctcatctcttccttccttgttccatcctcctgatggagttatgtcactgtttattgtttttaatcattgagtgtttacctaattgcgggtgacgtgaatatgcatgagctaccatgattgcattcccttgttggcacaacttttgggtttccttggagttaatacattgtgattgtttaaatcagtttcctagatgtcttgtctcaaatttactccagtttcctcttcccagaagaggggcagctcccaccgatgcctgcctcacctccctcctggtgcacctggccccccacacaacatgccgtggggcttccctgtgccccgagctgggaacagtcccctcctctctcctctgcctacagtcttgatctctggctccctctcttcctctttcttggcttaatgtccggttaagaccctccagcagctgtctgagaaagatggcgtgggaggccagtttgggggatctagttggaaaatgcttttcctccagccacacacttaaggatagtttagctaggtatgaaattctgtattggaaagaattttccctctgcatttcgaagggatcgctctactgtcttctggcttcttgtgtgaccgagaagtcaggtgccattttgattttgtgtgtttttctcctgaaagtcttgtagaatcttttgtcttcagggttctcaagtttcatgataatgttccttgtcgtggaaacttctttgtctcttgtgctgggaactcgtgctgtggaaccttgcgacatttggatgtgaggagctttacacccagttatttatcacatggccgactccccgtctctgactctcttttagagttaacgctgattatttgttggccctcccaggctggtcctttaattttcttctctattttccatttctttgtttatgttatatgctaggagacatcttcaggtttctctgtccaaaccatctgttaagtttgttagtttgttgccttgttcccgttcttgtctttcgatcttttttctctgaaggtggcttttttttttttttttgagatggagtcttgctctgtcgcccaggctggagtgcagtggcgtgatttcggctcactgcaacctccacctcctgggttcaggccattctcctgcctcagcctcctgagtagctgggactacaggcgcccgccaccacgcccagctaattttttgtagttttagtagagacggggtttcaccgtgttagccaggatggtctcgatcttctgaccttgtgatccgcccgcctcggcctcccaaagtgccgggattacaggcgtgagccactgcgcccggcctgaaggtgcctttttaaggcagagtgccctgcccttgtgtcaaaggcatatcgcactttttctctggggttattcgtcccggctgagaagcaccgcggtatcatgtggtgattgagcagcacccagcacattcatggctgcgaggcttcccgcgtgtgaactcatttaatcttctcagttccttgtgggcaccattgttttctttgttctgggtaaagattagcactgaggcacagacaggtcaagaaatttcccagaatcgcacagtttgagctgggactcaaaccccaagggctgggcttaagcccacgctatttgccgcgtgccccagggcctgaagctgcgtggtcaggccccagctctgctgcccaccagccacgtgacctcggccacaacgctgtccaccgtgtcccggaccctcataagtgagcgtgatggtaaaaggcttggctcccaaggctatcatgggattagccagtaactaagccacaacgctggccccgcggctgctgctgatggcggcacatggtgggagcatgtgtgctggcagcggttggtgataacgtctccttttggtgttttctttggcctcgtactcagctgttttcaccgagagtccctttttgtgtttgtcctggcctttgcggcttcctgggcccctggtgacccgcatttgtctgcccacattgactcgtggggcaccacagagctggtggtggcggaagtccccaggggagtgtcctgcctgggagggccgggcatctcacccctagtaaggagtctgctgcccccgcaagccctctcgttccctggctgctttgggtgaggaagggggtctgggggtcgactcctcactgactgggaccctgcacagcaggtgccccactttcctgctacctggagcctctgacttggggcccttctttggggttcggcccagtacagtctcctggtggccacggggccctctgccttccaggtcccagggcatccactacccggcctgtcctcctctttgctgttacgggttttttggagtttttcttcctttggtcttgggagggagagtcagtcagtgatgtgtttgagctgctgtgtccacctggaaaccatcgtgatgacgctttctgaaggctaaagtatgcaggaaaaccagagttggagaaggtctttaggtaggggcagtgcgcgtggacgtggcggtgcgcgtggacgtggcaggtgtggaccagcacgtcccactgctctgcatcctgaggggccggagggtgtggtgcagggttttaaggagggcaaaggcccctctgtttgtttttccttgatgctgccccccgtgcgacctgggggcagttttcaaatgcttgacccaggtagtttagttctgtcaccccctcgttcagtggggtggtgggaagaccagtttttggaacagttttggatttacagaaaaatcaggacaggagtagagcacaagcattccctccctgctccctcctggtcagcgtaatgcgtgagttacacttcaccagccagtctcggcacctttccagctaaggctttattccgcttgcctcagtctcccctcctgccccctttctgtcccaggatcccgtccagggccccacgtggcacttggccgtcacgtctccttaggtccctctcactgtggcaggtctctcagacttgcctcattttcaacgaccttcgtagttttaaggagggctggtcaggtgttttgtgggacagcccttcgctggggtttgcctcatgtttttctcataaggactggggccttgtgttttgggaggaggtgaagcctccttatatcgctgggtccaggtccacaccctccacgcagcctgtccgtgctggccttgcgtgtcacctggccgcggtgtgtttgtcggctcacacctgcccgtgcctcttcccccgtgctgtcctgtctgcggagtgaggcgtgcgtggcccacacctaagaggtgaggagctacatacgtgatgtcaagttttgcacgggacttgtacgtctgttctcccattggttatttaattattcctttctgttcatgtggactcgcaggtgtcaatttcatacttgggttagaatcggataccgtgtcgcttacttattgctcagattgttccagctttgggcactggggcccctgcaggctggctgttggggcagcgatgaggccagacactgggtgggttgggggtgggtgctgacgggtctctggcaggagggggcaggctgcagggagcagggggaagcaggtcccaggcccagaggtgggtctcgggcgagtctgggctgtgggcatggacccccagaaggggcctgtgtggccaggacgtcccatggctgcagaccccggtgtggggtgtgggccctgggaggtgattggtactgcagccggagctccagcatcatgccaaggtggtgctgggtcgaggcggggaggggagaagtcaccacactgtgcccggacttggtggcgtggtgatgtcggggctgcggttgggggactgaccccgcatactcttctcccagctgagttggcagtgccgtagggtcagcagcccaggctctgcatggggctcgtgtgggactcggcaggtccctgcatcacctggcaccaagctcaggcacgccccccacaccccaccactgccgccccgccccccagcatccccttcctgctgccctctgtgctgcactgacttcctcagttggtttgatgagaggtgacaaaggcagaaatgggcagagagcggcaccatcgctggcccctcttgcccatttgtcccctgctgggtgggcagtcctcttttttcggaaatgtgttcagttctcttgcattgcataatttgttcatattaaagcaggcttgatccgggctgccgtggttccgatcgactccgaataggacaccacacagtcgtgccaagaaggcgcctaagtgtctttccacacggccatccgagggcggacgtggtcaggggtgctggacgcgtcagacgggttctttgcagcccttggcagcgtcgcccgctctgtcccgcctgttgtgtgcgccttttccctgctccagggctgtgtatttggcaagagggaggctccgtggcacgatcacacgtgcaggagctgggggctgccagagcggctgttcaagatggacttggcaaatcacctctttcaagttgccggctacccggctgccgtagacagagtgaagtctggtagtttgtgtttatttatttatcttggccagcagagagaattgagtttgcatggagactgtaatttcattctgtgagtgtaagatcacgtccgcgttcctagcgaccggttttgtgatgtgggcagtgccgtgctggtaaatgctctgtgaggaaggaacgatggtgggatttgtcactcagtcgatttccctggtgtaaatgctcccaccacggccgatttcaggctgccgaagtggaggggttcagtgaaggtggagttgggcaagggcgtacacggtcggcttctgagagttggtccccccgcccaaccctcccctggagatgggatgtcaggagacctggttccatttgtttttttgcctgagcgtccgggggtggctttgaggacacctgtcctccttcacaggggcactccggatgtagtagcagggagagggtggaggggcggccaagggcgtgagggagagggtggaggggtggtgtgagggtgcaagggagagggtggagagggtggcagtgagggcgcgagagggtggaggggcggcatgagggagcaagccacctcgggcacaggtgaaggacaggtgtccacaccttgggtgcccccgtcctccctctcctcatgtcctaataggtctgaacaggaagttacatttagggcggctgtacagtgagttttaaataccttggtccaaattttcaaacacgtatcgttagcgtttcccctgttgctggccccagagtgttcggttcactgggtggagcatgctctgagcccctggaggtacagggattttacgggaggaggggtcgcttcgaggggaggtggctgcgtccatgtctggacggaattactcactgcctgtccctccctgcagcctctgttccctcctcaccagtctctgattccagctccgggctcagccagtggtctcaggacccccaccacattcatgaaaattactgtggtcctcaaagagcttttgggtacgtgggctgtagctgccagtgtgaactgtactgaaaatttagaacgaggaatatttattcctcattaactctaattaatgtatgattaattagattaattctaaaataacccatcggctgttaacattttaatgaaaagtgactattttcccaaacaaaatattcggcaagagagtggcaacatttttgcatctggttgagcagaacacggttgagccatcacacctgcctctgcgttcaggctgctgcagtgttgggttaagattgtgaggaaatccagtgtgtgaggaggcttggggtgaattccagtgtgtcaggaggcttggggtgaattccagtgtgtcaggaggcttggggcgttttaacagcttttcctctggtaaacgtgggtattcttctttgatatttctctgaaactcggcacgtggtcatttcttacatgtcagttgaaacatggaatctgaaactgtattggtgtcactttcctgcagttaccttaaaaatccgctggtctcttttgcgctcgaataggtttcttacgcgtgcgtgtgttttaaaaatcgtatgttggccgggcgcggtggctcacgcctgtagtcccagcactttgggagaccgaagcgggcagatcacttgaggtcaggagttcgagaccagcctggccaatgtgatgaaaccccatctctactaaaaatacaaaaattagccgggcatgcatggtggcggatgcctgtaattaatcctagctactcgggaggctgaggcacgagaatcacttggacctgggaggcggaggttgcggtgagccaagattgcaccactgcactccagcctgggcgagagagcgaaactctgtctcaaacagcaacaacaaaaaacatcgcatattggctgttaggaaatattgctccactgggttctgcaggtcttcctaagcgcagtggaaaattccccccacgctcatgagggcgagtgtgaagaaggcaggtgctgtccgcttcggattatggtcatagcttgcactcgcggctcccctgcctggtctctgggacccccaggcatccccagacctccctggcctcagccagttcccgccgcttcaccatatggcagaacacatgcgcggccggccggctcacagatgggcgtacctgcgtccggcccacccgcctgcggtcctgtgtgctcaccctgccctggtctctgcctggactgtggatgggggtgagtggggcatggaggcgttctgcacccaccagctgtcagtgccagccacctgcctgcccagcatcgggtctgtgtggcagcaccttgtcagcaagtggaggtcagatgtggggtcagctgggcgcagtggctcacgcctgtcatcccagcacttcgggaggcctagccaggtggatcgcctgagctcaggagttttcaagaccagcctgggcaacatggcaaaaccccatctctacaaaaaaatgtaaaaattagcctggtgtagtggtgcacacctgtcgttccagctcctcggggaggctgaggtgggaggatcgcctgagcccaggagttcgaggctgcagtgagctgagattgtgccacttcactccagcctgggtgacagagtgagaccctcttaaaaaaagaaaaaaaaaaaagatgcaggtcaggcacagaagccagacaggctgctcccaccccaacatgaccgacaaggtgctgtgtccctgccctccctgtggctctgcgggtagggggcgattcctctgtcagctgggtgaggagtagagaggcagctgagtgggtatttatttaaagggaagacaaagacgtagactgtacggctctctgaaacttcagcaacttttccgagacacgttgtaccatccgccctacctggcgtgggcgtgaagctggtagcacacagaaggtcccggagcaggagctggccccgagccagcagctttgtgccctgtgttaccggatcttcagaatgcgcctccagcctgttgaccatcttactgctcacctgggtccgcagcccgccagataccaggcttgactttactcctggcggggctagggccagaacccagactggttgctgcgcacggtgctttttgccaaacctcacatttgttggttgcgtttttcacaactcttgtcctctgaagatgcctgctcagagcccatgcagcgccacgctggaggggctgaggatatggggggccctgttctcagagcccgtgaggcaccgtgctggaggggctgaggacgtcggggggccctgttctcagagcccgtgaggcaccgtgctggaggggctgaggacgtcggggggccctgttctcagagcccgtgaggcaccgtgctggaggggctgaggacgtcggggggccctgttctcagagcccgtgaggcaccgtgctggaggggctgaggatatggggggcccgggcccggctcccctctcacaggcaggtctgcactcatgggtgggtttgggaggccccggtcttactgtgttgatgcagagaggcacttctctctttctctcgctcccttctcctgtctgggttggcatcatcccaggagtaagagctgtgtcttctcccctccctgttgaaaggaatcttgatcctaatgtgaactcaaggattttctaaaaactgggtttattatcatcctttttttttttttttttttaaattgagacggagtcttgctctgtcgcccaggctggaatgcagtggtgcaatcttggctcactgcaacctctgcctcccaggtttaagtgattctcccacctcagcctcccaagtagctgggactacaggctcctgccaccacgcccagctaatttttgtgttttgatagagacagggtttctccattttgcccaggctgatcttgaactcctggcctcaagcgatcctcttgcctcagcctccctaagtgctgggattacaggtgtgagcctccaggcctcagcctccctaagtgctggaattacagatgtgagcctccgcacctggcctggaatcatcgatttctgtcattgttcgtcttgaggctctggtcctcccaggtttggctggcaggggccttggcgagcggctccccccatgctacccgcttttccatcaggttttgtgtgttgctcgcatccgggcagcaggctctggcatcccctcggccctttctgctccaggctggacctggccgtttctccacggaacttggcttccttcggaggagggtggacttcagaaactaacctgcctgctgctcctgggggccgtgaggctgtgcccggtgggcggtgggccaggggctgcatggggattcgatgtgcagttcccgcggcagctcccagtgccgcaggctcttctcttctccacttctgagtggggtctccatctgcacagcgtgagcctgttcgctcgtgtgctctgccttcgaatgcggatgacacagcttcagagccgcggcatcgtcaccagggcagcagacccagccaggccagggcttctcagcattcttttgtcctcagaatgcctcctgccatgcccatgcccttggagagcagtttccagaagttaacttggattcgtttattcatttgttgtctttcgtggggttatgctgtcagtatgatggtcagttggctttatttgtttctgtttgcatttgattttagtgtatttccccattcttttatttattttttttgagacagaatcttgctctgtcacccaggctggagtgcagtggcgcgatctcagctcactgtaaccactgcctcccgggttcaattgattctcgcacctcagcctcctgagtagctgggattacaggcacccaccaccacacccagctaatttttgtgtttttagtagagacggggtgtcaccatgttggccaggctggtctcgaactcctgacctcaagggatccacccacctcggcctcccaaagtgctgagattataggtgtgagctgttgcgcccggcccccattcttgtttattttacttacctttgggtggtgaggcgccacggctcaccgtggcaacagctggcagtgcagccccaccacgcagagagctgcaccagcacctgtggatggcatcccgaggtgccaggcgaaccctggggcttctgtgtctctcctacaaccttcgctcccaagggtttttaatgatgctcttatttttgcattaattgggttgtatcccatcacctggatgtgattaccgagaggagtatagcaggatacccgagtaatatgtgtgcgatgccagcagaaagacgtgaagagagtaaatgaataacaggtggttttgctctgaagtgaccttttggtgggggtggcgggggaggttaaaaccttcctgctcccctaaccgggtacccactaacagaaaatgcccgactctggaaaggagtccccggaggcccctgaggaggaccagcgtctggcctgtccgggcaccgggggcagcatccaggccctcgggagccaggcaggtcactgcctgcacccggggaggcctggcttcgaggctgggaacgctgggacggcgtgagggacaggctgctggtgcctggcgcgtgctggccgcctggacactcagtgaagacggtctttgttttgatggcggcagagcccatcctgaatagcggctttctctgctgtgtgggtgggggcctcgggctcggatgctgcctgagttggggttttggttttacagtttcccactcgtgtaactttaaggaggccactcagcagtgtcctcacctacctggcccagactccgcctccctcatctggataacgcccagcacacctgagaagaggcacagctctgcccccgtctgtccctcgtcctcctcactgctccctcccccttgcctggatggtgcgccccatggggtctgcacgcccctccctccgcctccctgttcctcccctgcagtctcagctcggaggctgcccctttccatcgtgggcttcctgggaaccaaatccctcagctttggccctggttgcatccttagggctgaaaatggtgcctgggacccagcagggctccctggacatttgctgaacgtcctcgagtccttgagtgaagacggctgtggcgagtgattgccgcgtgactcagcctctccatcccacgcccagagcggcttccggaggtcccagagcccgggctccaggatgagcccagcagagtcttcccgtagacaccatcatcctgtgtggaatgtcacctctcctttctaggtcaggctgtgggagcttcggagcctgaccaaacccaggtcatgtgtgcacagctcagctgcctggaggcccctcccaggcggcggcgtctcttcactcacagactccagctggggctcagcgcaacatagcaagaccccatctgaaaaaaacacaaatcagtgtttctggttgtgaaagcaacacatgttcactacagaaaacttgacccatagggcaggatgtcagaaaagctcaaattgctcttgcttgtactccctggtgagcctgtcacttttgttttattttgttttgttttccgagagcatatcgtttttaatttcattctggtcttctatactattagtttttatagaaaatactagtgatacgaggttagaatccctccctgtcatcagctaataatagcagtaacaatggtgccagttctgttccgggctcatcgtttctttttaaaatggtggagcttactgcagtagagtgttttccttagccggggtcagctctggttttagaactcatttccctgttcgcgaggtccctgggcagagttcggccgggcgatggcagacgccatgaggaaggacccagaggtctctgtttctggggcctgcatgggtagaaacgtgggggtgacggtgtgagcatgaggatactcagagctgggaagacttgagggtcggggttggggacagagacttccaggaggcagggccgtctctggtccgtcggggtctgcgttcatttgcttcagcctctgtgaggaggcaccacgaggggtggcctgtaaacaaggaccctgattgctcgagatgctgaaggcggggaagtccaggcaaggtaccagcagatttggtgcctggtaaggactggttcacagccagagccttctcagagtcttcttcacgtgataaaggggacgaacaaacactctggggtccctttgaaaagcactattaatcccattccggaaggccacaaccttaccacctctcaaaggcctcctgacaccgtcgcctgtgggtgaggatttcagcgtgtgaattcggtgggacgtaaacactcaggtcacagtgctggggccgctgtagcaacgtaccacagatggcggctcacacggcagaactcaattctctctcagcttgtgtggtgatcccagctactccggaggctgcggtgggaggacctcttgagtgcaggagtttgaatgtagccagggcaacatagcgagatcccattaaaaaaaatccaaacaaaaagctttattctctgtctggagaccagcgtctgagagctgggtttcggcagggctggttcccggaggccgtgaggagcccgggccaggcctgtccccttggctggtggagccgtctcttcttcacccgggcccttcctccccgtgcggccgtgtccacgttaccctctgttatgagaacagcagttgttttggatctaagtctgctgtaatgacctcactcacttaactgattacatctgcagtgtcctatgtgtaaataagggcatgttctgagctcctgggggtcaggacggcagcttggattccgaggggattcagttgcactcatgcagaggccctgggggctgcaccttggcaaggggttcccatggcctggccggtctgcagtccttgtagtcagctgcacccagccctcccgcagaaggggcccgtgcacccatggttttgtagccgtcagggagcacctgttcagagggccctgctgaccgaggggcgtgggctcagcactgccagggcccgtgccctgtgtccccacaggatggtgctggccgtctcaccactgaggggatgccccccagccccctcaccctcagctgctccttccaggagcttaaggcccctaaagtctgccccggtccctggggtcagagcccaccctgggctggttttgaagaaacaccagtgcttctccaaggaggccccgtgcacatgtaggaatgaagccctcgtcctcccacagccgcgtgcccctcctgcgctgcgtgtgtggttttgctcatggcacctggcgtgggcgccctgggagcggcagccgggggcgtctcggagagagccagtgcaggggggaccccacaatctgggaggccatggatcctggttgtgggtttttggttttaacatttggtttacttattttcagacttttttccaaacaaatggtttatccatattaatttagctctccctgtggaatttgtaggacctcagttttcttgacattatgatctaagcagattattgaacacacgtcttaaatatcatcttttcaaactgccacatgtaccatcatatagatgtgctttaataaagaggtcagagagctgtggcccactgtagttcttgtttgtttttttgagctggagtctcactcttgttgcccaggctggactgcagtggtgcaatctcggttcactgcgacctccgcctcctgggttcaagcagtgctcctgcctcagcttcccaagtagctgggattacaggcgcttgccaccatgcccggctaatttttgtatttttagtagagacgggttggggttttaccacgttggccaggctgctctcgaactcctgacctcaggtgatctgcccgtcttggcctcccaaagtgctgggattatagaagtgagccaccgcgcctggcctgtttgttttttaattgtggtaaaatacctataacataaaattcaccattttaaccatttctaagtgtgtagttcagtaaagtaaattcatgctgcacagccaatctccagaatttcatcttgcacaacagaacctccgcagtcccacctgcagcacacaggagttacgatgtctcgccgtcctcgctgacactcccgactttctgttcctggccgtcctcttggggcgaggcagtgcccagtgtgggtctagtttgcctctcccggtggttggtgatgttgagcctctcacgcctgtggccgcttgtgtgtcggctttggagaaacgtctgcacaggtcctttgcccgttttgtaattgagttcctcgtttctgtggttgcgttgtcctgtggggtggttgacctgcacgcaccgtgtgaactgatcccacttgttccatgcggacccaccgattaccaggtgggagcagcagggggcgtccgagggccctgaccccaggcgggaggacagatgcgcgtcctgtgttggggccacggagttgtgggcaattgtttctttttcttttactttctttggtatcttccaaatctttataaaatctttataaaaattatttaaggagaagactcatgtagaatggaaagcgtcgtgccagacagtgcttggtacttgcaagaatggccgtgtccccaggagccggtggacgaatctgtccttgctgccacctgtgcggccgcagagtgagacaggagggaccggcaggcatcgcgcttctcccctagatactccggccatgccagccgcccccttggctccggccccgtccatccagccccttcccagggctttgtcccctcacccccgccgccctccccctgttttcctacgggaggcgaatccttgatgagaggaggaggccgggaaccctgccccctctgtgtgaagaggagggcagcccctgctgctttgtagggaaaccctgcccaagagaagccccagctcagcaggacggagtccgacgttcccgcctcagggtgcccagagagggcggggacaccctggctgggacaaagtgcgcagctctacccctgctctgaaatgcccgggactcggccgcgccctccccctttttcagagcaacctgtgggccctggcaaggataggcctcaggcaaaggaaaaccaccctcgttttcttagcttttagattttaaaaggagcagtggggccaggtggacttgaagctccgtgggtttgtttaaggtataaattcattgagcttgaagacgttgtacgtggaagtgaacagaacacacataatttattcatggattttagctggcctgtttttgtacaaagggagcttttaaatttaattatttttaagcattagaggatggtgtatccgaggcagctggaggccctggtcttcactgtgagcagggagggcccttgggacagggctcgggaggaggggccaggtggacccctgcagggctggaggacactgagggcctcagatcaccacacagtgggcccagctagggggtgaccctgaattccagtcccagcggacacatctcttgccttcagcatagagggccccaggcctcgggccctgcctcagttgcctccacgatgtcagcttccaggtgtggggaccgggtgccacctcaccccccagttacacccacacgaggccgcggtgcccagtagcacagagatgccaatgtgatgggtggttttcaacaggaactcaagagaaaagttcatgcttgtgaggacagagctgcagctttagccctgagagacctggcgggagaggaggcagatggcgagggccccaccggcagagctgctgccctgaaaagcacctcctcctggtggacaccaggtgcatggtgtggtcaggtgtggagtgtgggcccgctggcctcgctgcttcctgcgccctgtttaccacccctcaccccctggccccagccttgctcttggcgggcggctagtgtcctctggccgccctggggcaggtcagaccgccggggtgtggagtggggtgcttgcctttttctgcctgaccctgcttcgtgcggggactctgggacgctgtgacttggctctggcctggtccagcccccagtgtccacttctctggaaggcgaaaggcagggtgggggtctccttgatgtgggactggaagctgctcagccagtctccctggaaaaggtcctggtgacagtcactgctcgctgcagtggctggtgccctcctcaaaggtgagggtgtccgggtggctgttggtgcggggccgctgggacctgtaccctctaagttgggacttcagccccgcctctgcccccaaacgtggtgggctgagatgggggaggcccttggaagggcccagaggaaccccagggcctcacagaggacgtgctgtgtacggtgcctcctccctgcggcctgccccgcctgtgcttggagctgcatcgggcacagcctgccttggcgggcacgggacgagccgaggatccccgcgtcgacgtggaggtccgcggccgtcagcgttgcagcccttggccgggcactaagggctgagtgtggggccagggcagagggagccaggccagcagctccaggcccgggtggaggaagtgctgcctgacacgtgtgtctgctccctgcggcacgtccacagcacctgccagcccactttgggtgaccctcctgtttgtcctgtcctagcgcagccacatcccttgggagcctgcttgtctctagaaccttctgcctgatgcacaacctcagagccctccgtcgccatccctcccccgtcccgggagcagcccccccacttccacctgtcttggacgggagctggaagggacgtggttccagtcctgctgtgccaagcctggtgacccgagggtaccctcggcctcccggcctgaactcttctcctaccatgatggtgcctgggatgctgtgtggtgcccgtgggcagtggcggaggcagtggccccggctcgttgaaccttgggcactgcccattctgaggcgcccgctgtgcccggctcgttgaaccttgggcgctgcccgttctgaggcacccgctgtgcccggctcgttgaaccttgggcgctgcccgttctgaggcgccctctgtgcccggctcgttgaaccttgggcgctgcccgttctgaggcgccctctgtgcccggctcgatgaaccttgggcgctgcccgttctgaggcgcccgctgtgcccggctcgatgaaccttgggcgctgcccgttctgaggcgcccgctgtgcccggctcgttgaaccttgggcgctgcccgttctgaggcgcccgctgtgcccggctcgttgaaccttgggcgctgcccgttctgaggcgcccgctgtgcccggctcgttgaaccttgggcgctgcccgttctgaggcgtctgctgtggcccttaccgtctggcttctctgctggctcttttggccttggattcatttctggagctgcagagtcacttctcttagagcctggttttggccctctctctcctgcctataaaaagccctgccctgggttccctgctccatgccagttctctccctgcccccgccggcatgacacggacactggtgcccgagtgatgcctgtgggtgatgcagacactgactgtcaccccagccccccatgtgctgctccgccacaccccaggccccgtagcagggtggtggtttgggcagctgggtttgctggtcccctgggagtccaagcaacatcaccactgggtcccagatatgccgtctccctggggcacctgtgcttctggtacccagggtggagtctggttgtctcctttccagacccttctaggtctgcgttggcctggctggtttccctgaggttccctctgtaggggagggcctgccctcctggcaggggcccttgtgtgcgtcctgagctcaccatggttttggaggtggctgggcagtggcgggcagagccccatgctgtcctctgcctttgaggtgggcacggcacacgtgagagctgagcattggtggaggaggccacaaccggtgcccagtggttgagtcgctggtgcccaccgagggcccagggagtgagggaccccctgaagaggtagctgggagccagaccctcctcccgtggatgccttttcaagtccctgtcagttgttcagagaagagggggaggattcgcgctttgcgtcagatgcgtgcgtcctgcatgggtggtgccggccggctgtgcccaaagtcatgccctgcccctgtctcccgcagcctggcatgggctcacgtccgtgtgcttgtccagcctccactcgccacagctcccctcccctcccctccttttccctccccacctttccgctcccctcctctcccctcctttccgctcccctcctcttccctcctctgccctctgctcccctctcctcccttcccctcctgtcccttcccctcccttctcctcttttcccctcccttcccctcccttcttttcctttcccctcccctcctttcccctcccctcctctcccctcctctcccctcccttcccctctcctcctttcccctcccctcacctgtttgactctgctgtgccaggggccagggcagggctggcccctcactctgcggagtaaatgggtgtgggggccgggcctgtctgggatcagggcagccaggcagggtctcctgcaggagcaggcatagtcccagggagcaggcagctgcctaggaaggcagtcaagcagatggggacctcggctgccccaagactggcccggggctggtcctccctgcgtctggcctctgggtgggtggtggtggcttccttgtgacttcatccctccgatcgggcaggtggttttgtgcagtgtgtgcctgggaggcgcacggcagcatgatcggtccctgagtgtcacggcagcatcagaggccagtttggcatctggagtagctgccaccgagagaggcccagccgccaggcagctgggagcacaggtgtcggcatcccactgggagcacgggtgaggtgcctcccttctctgggcagagtttccccagttggtggtgtagacgccaggaacgcggttgtacggacttcgtgaggatctaacacagcagtgtgtaaaaacagcgccaagcgtgtcctcggtgggcgctcagaggcggttgtgagcagtgcagatgctgttggcctagttctgacagggtggcccaggggtctccccgtggcgtggcatggacggtggcagctcctgtggtcatcactgccatggtccggagcggccctgggctctgcagcaaggcggtgaatgtggagctgagcggtccgaatcagggtctgggttgctcgttcaactcaggaacttccccagattcctgagttttcctctagccgaggtcaggggcagccaagggaagggtcagccagctcatccagacctcgctctgcaacaaatctccagcctgggttgccatgaggcaccctggggaggactcaggacgaggccccttgaggctgaacctgagacctaggaaactccaggtgggtcctaacagggcttgtcactgagcgtaggcctggacacggccctgtggtgtctcacccacgggcaccagtccctgttgagcaaggtccacgcagccctttgttctggacggagctgacgctcaggccacagactccgactccattcttcagaggcttcatcgcctgcacaggaagagaggcctggagataccaggttgtcttggggccacagctggcccttggcatggctggggagcagcaaagcagttcattaggaccagggctgaccacaccagtgtccatgcccagaggttctgggttctgccctcttgctgtcgtccggtgcaggccacatggccacctgggaaggcccgggtcgtcgtcatattccgagtgtgaccaagagttcaggggcccaggtacctttctgggcccctctcagggtctttggaaaagtccagaatgagctgggctggtggagaattcaggaggtgtggccagtgcccccctgtgctctcagaagcaggggtcactggcgagagggctgggtggcccggcgatcaacctgaaggcattccttacctgcccttggacccggtgagccagtgactggcgtaggctttcaaacctttcaaaccacttctcctggagccccgtgttgtgtgcgtccctcagcccatgcaccccggaaggcacgcctcgcacccagctgtagagccccatgttgtgtgcacccccagcccatgcaccccggaaggcacgcctcgcaccgtgctcctggtggggcccgtgccaggggggcccaggctcctggggacagtggcccaggacttgggatgttagaaataaattttgggtgctgcaaaagaaatagcactcgaacataaatttaattttctcagcaaggcaattttacttctatagaagggtgcgtcttgcagatggagcaatggcgagagcacacctgaacgagggaggtggaggtctcatcctaacgcagccagtccctgctgctgtgtggttcccctgttggctagggttggactgcacagtctaagctaattccgattggctattttaaagagagtagcagtacgagccggagtggcggggtgaatagtttgacgggaaggatggttacagaacaggtgactcaggatgactaagaacagagcaggtgacaaggatgactaaggtcagagcaggtgaccaggggtgactaaggacagagcaggtgatagaggctaggcaggggttgtttactgaaactaggggcaaggatatgtaaagtacaaggaagttaaactttagaatgaagaacaaagaatggggatgtaaccatacggatacattgcttctttggagaggagctcagaattcattatacttaacaatttacaggctaaaacctttgaagaggaatttattatgttctacaggagcggtgccgctggcctgtggcttctgcagggacaagtagtggctgtggccgggaggcgttcggcagctgtgcttcagccccggccccagcttcagctcttcgagttgctggcttctctaaggcctgtcctgaagtggcctggagactgctgagttacttctggaatctgcaccgtgaaagtgaaacctggaccatgatgtgaggctggtgagagggtgccctctgccgtcacccccggccttgtagaaaactcattccaatggccctctggttctcactcaggaccaaatagtgatggttttttgtttgttttcgttttgttttgttttgttttgttttgttttgtttttttagacagagtctcgctctgtcgcccaggctggagtgcagtggcgtgatctcggctcactgcgagctccacctctcgggttcacaccattctcctgcctcagcctcccaagtagctgggactacaggcgcccaccaccacagttggctaattttttgtatatttagtggagatggggtttcaccatgttagccaggatggtcttgatttcctgacctcgtgatccacccacctcagcctcccaaagtgctgggatgacaggcgtgagccaccgcgccgggcccaatagtgatgtttttactgctctgggcctgatcgcatgcaccgttgtctgtgctgtgacttccgtcgttgtctgtgctgtgacttccgttgttgtctgtgctgtgacttccgttgttgtctgtgttgcgacttctgtgggatattcgttggagaaggagccacacagctgtgtgggacccggcactccttcatcaccatcatccagggccacggacaccccctctcacaagtcgctgggatatgaaattagggaataaatgggaattttcagtgcgatgcagctggcgctaggatcctcctcagtgtgacgtctgagaccttttcccagctggagccctgtcattcattcattcattcatcccatgccaggctgggcggctgccagaggcacaatccggaaccgccccttgctaatgggcggaccagtgaaagcaaagcgggctcactgtgcagaccaatgattgacagttccagggtgtgatggacacaggcggctgccaggaaggagccccttcagaagcagtgggcggggcggggtggggaaggccgtggggaggagtgacttccagatgaggctcacaggactgtacccggagggagggggcagcaaggaccctgtgggcagccgggggcacggcacaggctgtggctgtaggtgtgggtggtgcccaggcattgacagaggggagctcactggacggggcagcgtggaggtgagggtcgggtgagggcccctcgggagcccctggccatgttagttgcacatttcatgactctttaaggagttagtgaggcctgggtgtgacctatttcccgttccaattaaacaggtcattagtccgtgtcgtgctaaagcagatcactcgcaaggaatggaaaacccttgaaatacgttttttaaatcggtgaaagtgagaaactgatgcctctgtgggaaaagaccagactccagggtctgcaccctcagagtgatgagctgcgtctgttaggggtgacctgaggtccctgctttgaaccagcttgttgaaaccggaagccatttctcatcttctgtaagagcctgcagcccctgtcagatgccagccattccccaggtcttgctgacactgtcattaggattcctatgagggccagtggggagacagctcagtctcggccctgcttccgaccccaccaccacccccaaatgcatactgctggcctttcctgggtttaattttattttgcagtggtagaggttgttttgctaaaattatttcaaaatctgccttgtggaaaaacgcccacgtcagggtgaccatctgtggtaaccgagaattccttggaggcagcgtcttcaccgcctggctaagcggatggcacaagctgccagccagacctctgtctgtccctgcccagaggccccagctgccccttcctccaggcacctccctgatctctggagtccaggttttgttcccaaggtcctacctttgtatctaaatgctgtgtcctctccccggacgatctcctccaggcactggctctcaggggccagctccccatgggcgatgatgtctctgatacaggaacttatgggtaccttgcaagtttgcacagaaagtggagcccgtctgttccttctggggtgtgcgagcggggcctcggggagcaggtgcaggacagggcacaggaggaacaggcacggctggtggtgtgcagtgaacagcagtggtcacaccaggtggtggctcccgtgggacttttgaggccggcccagccctgagcaggtggggtctgcagaggcctcgtgggttggaggagacttattcagagggagttttggtcttgctagaaattgcatgagatgaaagatgacattttaattctatcattgaggcatagtctttccaacacaccccctgaggtgtgagggaggctgtccctatatgatgtggtccccgctccttcaggctggggctcctggccagttcatctttcgtcctgtgtctgactttctctatcatttctaaaatgactaagacaatttattttgttaaaaaaaaaaaaaaaaaaaggcgttaagatgattctactttgtagagggatcccaagggagcgtctcctctgggactggccctgtcccccatcttgttttccctctaaacgacatgtgagttcccaactcttgattttagttctgacaactggagactttattcccatacctttttaaaactttttaaaaggtttaacttcaaggagataccattccttttgtgtatttggttactaaagctgtcttgcatctcaaatgtgatttaagaaatcaagcaaaatgcactggccacgtcctctcagtagggggaggccagcgggcatctcccctcctcgccccttctctggtggtctcactgatgtcccccggcccccagccctccttcctttctttcccttgactttgtcctcagactccagggacaacccctggtgcgagacatcctgttgctgatttacttgttctctcatttgtttctgtgtttgttccatttctttcgttcattcattcattcattcatactcagctgcggagaccatcagccagtctgcgttcggcctgtgtctgccactggctgcagggcccggggcaaaggtcttcaagtgccctgggcttcagttccccttcctggagaatgagggtgggagagcacctcccctgggggtttgcgaagatgacatgagcccgtgcatcctgggtctggaccgcatctgatacttagcaggtacttagcagcaggtactgagtagacacagtgctccacagcaaagatgtgtggcagaggcgtagtggatgcgtgatcgagacgcacagtagacacgcaaggatacacggcagagatacgtggtgggtatataatggatacagcgggcgtggtggatttataacagatatgtagcagatatgtgataggagccaggcatggtaatgacaagtcaggaatgtcacagaggactgtgtcttctgggggtcctggggccttttcacgaggaaggattgcaggtggggctttggaaaaattgtccaatttccatcccctgtctcctttccccggtcaccgctcctacccagtagcaggtggagaaggtgacttccatactgggggccaggatcaggagcagccacatgccagagcgggtaggcagcccctggtgcctgcctggccctgccccgacctccacaccagttcagccctgtgtcctgcccaggatggatgggtgggtaatttattgattcattcatttccagggtctcgtgtgggctttgtgaagcctagtacacgttttttattgcgtttttttttttgtttgttttgttttgttttgtttttgagatgaagtctcactgtgctgcccaggctggagtgcagtggtgcaatcttggctcactgcaagccccgtctcccaagttcacaccattctcctgcctcagcctcccgagtagctgggagtacaggcgcccaccaccacgtcccgctaattttttgtatttttagtagagatggggtttcactgtgttagccgggatggtctcgatctcctgacctcgtgatccgcccgccttggcctcccaaagtgctaggattacaggtgtgagccaccgtgcccggccctcgtttttgtttgttttactttgttatgagtaatgatagatttctagaaacttcgtgtatttttttctccactttatttcaactttgtagaaagagatctaaaaatgcaagtctcctcccccaacccccaactctcctgcgtcacggattggttcagaaccaggagacacagggcccagaaacctaggggctggaggggccttaccctttggactcttgactgtttttatattctggcccctccccccgtctgtctctctctcaagagacagggtcttgctctgtcgcccaggctggagtacagtggtacaatcacggctcactgcagctgggctcaagcaagcctcccacctcagcctcccaactagctgggacttcaggcgcgcaccaccacgcttggctaattttttatttttagtagagttgggggtcttgatttgttacccaggctggtctggaatgccccaagtgattctcccacttcgcccgcccaaagtactgggagccaccacgccgggctagactgtggggtttttggggggcaagaattgtactcatatctctgtttccacagtgggtcttacactgtggacaaacagcagctgatgttctcacccggccttgttctaagaggactccaaaaagcaagtcgtagccccagtgactgggaaaggcttccccgggagagcggccgacacagctgccgcagtagtaagggtttatttatcaagactgatttatttatcagttcaagacacagttacacagagtgtgggggatggttcatcagcagctggcacgtccagtggcgcgtgtgcctcgggaaggcctgggagggggacacaggtgctccgcagggaaagctgcccccaccccagcccaaagaagccctccaagctccatcagtcatgcagtcatgtacttttcctcatcagcacaaaccccgcttccttgaagagaagcgtgaggctgggcacggtggcgcgtgtctgtaggcctagctacgagggaggatcgcttgagcccaggaggtcgaggctgcagggctatgattgcaacactgcactctggcctgggcaacagagaaagagagagaggactgtctagaagggaaaacagggatagcaaagtagatgggaaggaagggcctctggggcggcgggtgagtgctggccgctcccctctccacaagctgctgtggtctctgggggctgcacctgaggcggcagtgggaggagaggggtgaagggcaacgcgcccccgtttaaacacctcctggcctggacgccagctgttcacttgtaatcactggtcaccctgaagagatgggatggacccctgcccaacatttggctcaggtgtccacacagatgacagcaccgcacgcagacgggagggagcttctcaccacataatgaggttttctggggagagcaggggaggggggtcttccaggatggtccagaaaggtcttgagcgcgcctgtaaggagactgtctcggtttccgtggcggctctggggcaaggcggggtgagcaggggctgaggcttgcagggtttgaactttccccagggccctcatcacctcactgggatgtgggcgggaggggagcgggtcgtctcaaacacctccagcagtcgaacatcaaaaagggggtccaactcttggttgcgatttctttggctgaagcctggactcctagccccacgggctgagggaaggttacggctggtggttggatagacgccagtgcttgccccagagctgcaggggaagaaggtggcctgaacctcagggcctctgtgtccagttcaggggccagtacagcagcatcggtctgcgaggggtatgtgttctagaggagtgaggggacagacaggggagccccagaggcatccagtggcgcgaatggtgggaagggccctaagaggggaggctgggaggggacaatcccaggtggcaggggatggccgcgatgaggccctggggtggagcccaggcagggagcatccaggggaagccagtgtgggtggggactgggaggagagagggaggctgggcctgccctggcgaggggtggtcagaacatcgctcggtgccagacaggcaggacgcagcgggctggcctgcggggctcactgctgccccccggggccgagcacgaaagggagagttggagggcgcttcctcgccgggtgttgcggtgtgagcggggactggtgagtgtgtgctgtcttcagagagagaagagcagttttcagggtgagtagcctttattcttcacacctcattacacagcacccaggccttttattcaggagggcgcggccggcctcaccccgacagccaccctggcttgttgaccttgatctgtgacagctcccctgtgagttcagacttctcaaggacgcttgcatagccaacattgttgagaacgagtaaccccttatcacagcacacgtctgtcgtgccatgaagcaatttcccatccctgtggctttgaaggcataagtcactgcgtcacggccatgctgttccttccaaacctgctcgtcaggagacagctcttgcgctgtgtaccggcactgccgcccagcaggtgaccccagcagctggtttgtccctgcctgggggtgagggcctgcagggtgtttgtagacgcaactcttgaaaggccctgaggttggggcttggtcatgagggtgcccggggcccatccgggagtagaagtaagtgcactaggcatttggccaagggtcacgttaggccttatttatttattttttgagacagtctcactcttttgcccaggctggagtgcagtggcgtgatctcagctcactgcaaccttcgcctcccgggttcaagcgattctcttgcctcggcctcccgagtagctgggattacaggcacctgccaccatgcgcagctaatttttgtatttttagtagagacggggtttcaccatgttggccaggccggtctcaaactcctgacctcaagtggtccacccacctcagcctcccaaagtgctgggattacaggcgtgagctgccactcctggccaggtcttttttcaaataaatgtctaagcaaaatgaatttggggtgaagtagtcacagagctgtcaggaggagcagggtggctgcgtgcccctgggagctgctgtgggtgatgaccaggtgatgccgggaaggtcactttcagacacatagttgtcatcgtcggatgagaattattctcaggtctcaggtgggaggggctgcccaccaggcctggatgaggccccacccccccacacacacatgctgggaccacgagtggcaccccctgaggatgagggggctcctgcgtttgtgccctgtgtgggaggtgccacctcatttgcatgtggcccttccacgtctcctggccatgccagacaggtcctcaggattgttgggagatgagggcctcgcccaggacttcgatggggtgtccccccagccccctgtggctgatggagcagcctgacattttgtggacacaaagccccctagagccagggaaggacagggccggacccagagccagggaagggaggtggagctccagccaaggcatccaaacatcaaaaggcagaactgagcggcttggtacttgaaaagtttttattaggaaaaatgccaaactgacagaagtagagagaattacatagtgaggcctcgtgcacaccctgcctggctcctggcaacctgcactccagccgatacctgtgactctcagcaagcccctctagtgggcgaggacctccacacgtgtcgccaggccaggcgactctcagcaagcccctccagtgggcgaggacctccacacgtgtcaccaggccaggtaactctcagcaagcccctctggtgggcgaggacctccacacgtgtcaccaggccaggtaactctcagcaagcccctccagtgggcgaggacctccacacgtgtcaccaggccaggtaactctcagcaagcccctctggtgggcgaggacctccacgtgtgtcaccaggccaggtaactctcagcaagcccctccggtgggcgaggacctccatgcgtgtcaccaggccaggtaactctcagcaagcccctctggtgggcgaggacctccacacgtgtcaccaggccaggtgactcttcagcaggcccctctggtgggcgaggacctccacacgtgtcaccaggccaggcgactcttcagcaagcccctccacacgtgtcaccaggccaggtgactctcagcaagcccctccggtgggcgaggacctctgcacgtgtctccagaggccaaagcagaagaaaacgttagcacaggagtcacttgacttcaccaaacgcagccaggattgcggtttctccggctcggctgtctcagttgtttaagagagttcatgcttttgagatcaaagttaaaagaaggcctgtgcctcgcagggcctgctctgcctcccccgtgtttcctcggggttctgcgtctgtgaccggggtgcggagcactggtgtgcagttctctgtctcgtgattcgtgtaacagtgagtgctgcctgcaccaacagccggctgccttccgtggctgtgtgggctcctgtgcggaggccgcccctctccctggccaagcaacactgaggcgggattgcgtcctccctctcctgaggcaggtcctgctccagacctgcttttttcccgcacgtcacgtgtcctgagacccctcagtggatgcgtcctctctccttccacggccgcacacactcccgtgcccgttgggctgggctgactgatgcatgtgggggctccgtcccatctttttcaactacagatggagctgcggtgggaaaacgtgtgcagatacctcccattttacttttgtgctggggcttttttgggatcagttcctagaagtaggggactgggtgaaaggctgatcaccctcagacaccgaacccctggaggaaacacagggagggaggatgagccctgcgaggtgcaggccttcttttaacactgaccttgggttctcaggactgccgaaatcccctctacccgggctgtgcctctccggcctgtgcctctccggcccttcggcagtgtcgagggagcccccaacacccagcagcatccagggatttcccccagggcagtgtcgggagcccccaacaccccaacagcgtccagggattccccccagggcagtgtcgagggagcccccaacaccccggcagtgtccagggattccccccagggcagtgtcgggagccccccaaccccggcagtgtcaagggagcccctggcagtgtcaagggagcccccagacagtgtcaagggagccccccaaccccggcagtgtcaagggagcctgcctccgtggggtgctgccagccttaggcctgggccagtcggggtggttggatgcctgttctgggggtagagaagtcaggtagcccagggcccgcactctcaatagaccttcagagaaaaggcatcgaggtaaatgccgcactcgagtacccgtgtgatctctgggtggggccatgatccttctgggcgctggtccaagcgcgtggtgaggccgtcctctcctgcagaaccccggcctcttcgcccctgcccgctcacctgttctgtcctgctcacctcctccaggaagcctgcctggccttctccatgctgatgggcgtggccccttgtccctgcagccatgcattgacctccgtggctcctggaggccaggccacgtcctcatcccctctgggtgagtgagaggcacagcctgggtgcgtggggccgtggcggctccgaggcgccaccgctgtgtcctctcatgagtgggtgccgtccaggtctgtcctgggctggctgcgaggaggaggttggcctcgcgcggccatgtgcgtgacagtggagacatcgccagcctcctgcttgcacagctgacggcagcccctctctctccagccatgtccccaggactcttgagtagttggcctggtggccgtgggagaagcaggccccgagtccccagggctgtgagcgaggctgtctgatgtgctccctggtcaccaccccctgcctgtccgtcttgcctgggcagatggaggtggatgaacttcctgcggccgctgtaacagtggccgccactggggggcttaaagcaacacgcatttgttagctcagcggtctggagggtgcgagtgcagatggagctcactgggccaaatttagtcaaggcaccagctgggtgggttctttctgggggctccagggagaccccgtttcccgccttctccggcgtctgaagccgcctgccccttggtgcagccctgagtcaccccagcctctgcctccgtctcacgtcaccgcctctgatacagccgcccccccatccctcttgtgaggaccccgcaatgacgtgggcccacccagatcatccaggaacatctccccatccccacgtccttcacttcatcgtctgcaaagtcccgtatgccacggaaggtgacacagtcttgggtcccgggacttgcatgtggggctgtctgggttttgcacagctgaccatgggtgcttccggatgcttggcattggaggtttctgtcctctgctggaaggattcctggagtgagggcagcagagggcacccagatggaggcactgccggacgcgcaggggcgatggtcggggggcacctgggagccaccttcccttgtctctggggggtgacccttgaccttggtggcctcagttttctcatctgtaaagtggtgcacacgatacctgctccgtcctcctcactgaattgtcctgagatcaggtgtggtcgtgaatattaaacatgtggattgcaaccctagacagagctcccttggacggttgagcagatgcagccaggtgtgggtccggctgtgggcggagggggtcacacggggccgagtggcttcagcgagagtccataggacatggagagtcccggccgtggtgaggacacggggttgcggcagctcacgcccactgcagtgtccggaaggcggtgctaggtccacctcatttacggggtcgggctctcattctccccattgtacagcccagcctgtagaggcaggtgaggtccaggccatgggcctgtgggccgtgccacgtcgctcagattttgtggtgtcggtggtgggagccgccggggaaagccgtcatcctggagccgggcgagagagggccagggcagtggggtggactccagaaatgtccagtagcagaattgccagacctggccattggctggggtgttgagggagacgtctccagggatgtccagtgtctcccagtctgggcaagcggaggagccggccagcatgggccatttcatcggggccctccctgggggcagccaaggacctaaaaccaatgggtcccaaccaagaggatcccagaggtgagacacagaacggccagggctgaatccggggccctccctgggggcagccaaggacctaaaaccaatgggtcccaaccaagaggatcccagaggtgagacacagaacggccagggctgaatccggggccctccctgggggcagccaaggacctaaaaccaatgggtcccaaccaagaggatcccagaggtgagaaacagaacggccagggctgaatctgcctccagcgggggccccgggcgtgatcagagcaggcaggacctttcttccctctctgcagctccggcactggcttcctccgttcaggcttcatccccggtcagggggctcctggtcccgtggcagccccgtggctcctgggtcgcagcttcatgggggaaacagagactcctctggtaccagggtcccctgaatctccggagtcccccaagtccattgagtccactgggcccgaagagggaaacagagactcctctggtacgaaggtcccccaagtccctggagtcccctgagtccactgggccctcgacacccttgggtcacttgtccaccctcacaccatcgctggcccagggaatgggggtttggatcggccttggtgactgtgggcctctgcctgaaaccctgtgagtgtgggtggggtgggctgggtcctgagagagctgggagcagcggagtgaagggggctggggtggggctggtgacagtggagtccctgtggggggcagggctggtggacagtagagtccctgtaggggctggtgacagtggactctgtggggccagggtggggctggtggacggtgtagttcctgagagaccgagccggaaggtgagggactggaagcttgcacacgtccctgcggccttcccctcgggtgcgaggcctgccatcctgagctcccccaccctaccccgtgcccgccctgagggcgggacccaggccagttcacacagcatggcgaggtaagggctcaggatggaaggcaggaggaaagttgggcctgctgcacccatgggtattgcggcagggaaggcgaggaggagccgaggtgggtgctgggagctgtggggctggctgtgcgtgttgggcctaactcgggctgagctgaggttactgagccctcaggagggtgctgtgggaaaagaaagaggcagagaaggtgtctttggaccacttaggggacggggagggaaccccacggcaactgtgaaggtctggggcacagccagggagggtcccaggttgacagggacaggcggggtgggggtgcaacatggaggcctggggctgagcctccgagaagtgatgggcaggatgagggggccagaggggatcacgcaacaaggggtgcaccttggtggtctgggtgtctccagagaagctggttgtcaggactcaagaggcggacagggaggggctggggttagggaagagtgtgtggcagggggaggaagggagcctgcttgccgggtcacctggcattgggagctgtcccctgcctgctgcgccccgcctgccattgttggagttctccagtctgggctggtctggatgaggaactggcggggctgctgccggcctggactcaggaccctcaccctccagcccgcaccctcgactccccaccagccagaccctctgtcctggtgtggacagcacccacatcctggctccacccttgtttcttgccctttgacctacagcctcaggacgtgcaggagggaggtacgtaggcacttgtgggtccggcctcctgaccgaccgtccatccaccaccaggcttctggatgttcacccatgtgggagagacgggtgtcggggaagggaccacagcttcctttcagaagacccgggaagggcagtgccgtgtgccagcctcccagttggcaccttcctttcaccttagtcgtcttcgaggcgatgtttcctcgggacaagtcattttcatgaatctgctgtaaaacgtctcccaaactccaagtgtttcccaaactgagtgaaaatcgctgcagaatgtggtttccagcagagcttttcccctctccttccttcacctctgcctgggttacagggtgcgggttccaggagtctgcctagaaggcaaaaaacaggctttgcttagaatcccctaaattgctcataaaacacagtgtttgacgtttatgtgtagacatgatccttatgtgggttaagctgaggcccctgccccagtgacacagaggcctcaaacggcacagtgcaccttctgtccgaagcagccggcgaggcggcccgcgaacctctgacgtgctccattgcaatgaggatgaacgagcctcaggcggagggtcagcctggaacccctgccccgtgaacaccagccagcttcatgctgaggacccctcagtccaacccagaggcccatgctgaggtcccggcatgggggactgtggggtgcagccgccgcttggagcggaggtgaatgggaccccacacgtttcctcctccttctctggatgcctgtaatcatcacagtactcaaaaaaggaagaagaaaaaggtccttgaaacttgctggagttgcagttccgtttttttgtttgtttggttggttggttggttttttttttttttggagacagagtcttgctcttgtcgcccaggctggagtgcagtggcgtgatctcggctcactgtaacctccacctcctgggttcaagggattttcctgcctcagcctcccaaatagctgggactacaggagctcgccaccatgtctggctattttttttctatatttggtagaggcggggtttcaccgtgttggccaggctggtctcgaactcctgacctcaggcgatccgcctgccttggcctcccaaagtgctgggattacaggcttgagccactgcgcccggccccattttctttacatttgtgacttacagtcatcagctgaaggaaagacagtggcttggctagggcctgcccactgctggccgaggctggccgggtcacccaggtgcctgcctctcctgctctggagccgggcactgcctgagggcctgcagcaccagtcagggccccgggggatccctccagggtctcagttctgactagcgagtacctcgattcatgagtatgttttttaatgtaaggttttaacgtaaggtttaaaaaggcagccgccccgtttcctccccactggtctcgccttcagcagtgatttgtggtgactgtgacgttctcttcggtgggctgcctgtggatcgccaagtatgtgctcctgctgcttctacctgatgtctccccatcttgggctttgaggggggctcatccggggcattcatattttctgcccgagttcgctcctgacccagggcaggtggaagccagcaggtgaggaccagggtgtcagccagaaactcggaagtggcacagaggcagcatccgatagcccctttgtcagaggcgaccagggccttgagtgagctgggatggacttctcttatcctgacatcctggaagggggtgcagcctgcctgtctgtgtcccagttgagttggcaacattttttgtctttcctcatgatgcacgaagtagtggtatctctgagagccaatggcagcctagctgccgtggagaatgctggggggtgggtgagagttggggcacagaggactcatggggcagaggctgtggtccagtccttgtgggggtgactccagggatggcaggtgggtggtgtggccaaggaggagggaggtcaaggcactggtgttggggcagggagaagggaccgcagtgcccatgtgtttgagggaggggagatgatggtgtgggagtgtagagagggcgggggcccagcccacagcatccatgccctggggattgggtgccaccggtcaagggctccacggggctggctctgggggagggagagcgggcgccatgttgtgtgtgtggtgcgtgtggcgcgtgggtgagggtatggccggctgcgtaagtttgtggaagcgttcggaatgctcaggagataaaaacagcagagggctgcacccccccaccctcccaccccagcttttctccaggaggacgctccgtcgtggcctgggaggacgtggaaggagggaccccggatgcagggcaggttcgtcttgtgtgttgagaacgtgctctccagggatctgtgttaatacaggtagcccaagcacagtgtccaatgagggaaggaacatttgaaacagaagagatgacttattttgttggacaaaaaaggaatatggtggacattaattcttagaagaggttttatttgaaacaagtcacaaaaataatcaaacagcaggttgactttggagttcagctcacaaaagttaagcttacagagcaaataaaataagctgaagaaaaagataagatgactgggcgcagtggctcacgcctgtaatcccagcactttgggaggccgaggcgggtagatcacgaggtcaggagtttgagaccatcctggctaacacggtgaaatccagtctctactaaaaatacaaaaattagccgagtgtggtggtggacacctgtagtcccagctgctcgggaggctgaggcaggagaatcgcttgaacccgggaggtggaggtggcagtgggccgagatcgtgccactgcactccagcctggtgacagagcgagactccgtctcaaaaaaaaaagaaaaagaaaaagaaaaagctaagatgcagcaggtggagccgcctgccgttgggtttcagcttttcttatggaaagaatgttacggcctgggtgcctccattctctgatttctttttctttcttgactttttaaaattgaaacaaaactccctaaaacatgaaatctgaagcgttcaactccacgagtttttacaaagcaaactgcaccgcgtcacatagctgatccgtgtgtagcttgtcctctggacgcggggccacccccacaccccgaggtgaccccaggcgtaacctacccgtccccggccttggtgcctgcagatagttttgcttgtttcgagcttttgtcttgggatccggggccatccaccctgggtgtggccgctcagtcgggcccctgtgtggggctttcccgtggtgtggggtgcggttctgccgtgtccgtccccactgcggggctgctctgctggctgaattctccacgtcttatgtatccaccctcatcttgcgaggcaccggggtcccggcttttggccacagacatccgagcgccttctgttgcccgtggcgcatctttcatgtgggcacacccaggagtggagtttccgggaaacagacgtttccctcgcgtggccgcaccaggtcgcactctgcactgtgtttctgcctccagttatgtggggttttctgcacccacagccactctggcgccagctgggtgtcctgtgtttccattcagctctgacatcaattacctgacgttagcgcagaccctgcagatgaagggctcattcccacaagcctgcccctacttgagagccagctgcaagtgccaggtgacaacctggattctgaccaactggctgtgaatcgggggtgtccgtgaccccttcctgaggctcgggtgggctagaatagctcccggaactcaggaaaacactttgcttagtgtacccgtttattagaaaggacagccacacggaggagctgcacgggaggctgaggtatggggggtgcagagcttccgtgccctctccaggcacgccaccctccagcaccttggtatattcaccaactcggacactctccagaccatgtcattgagggctttttgtggaggcttcgtgacaggcacggttgattcaacagccagccactgctgattacctcagtctctcctgtctcctctctggaccgtgggctgtgggacggaaagttccaacccgctaggcattccttggtcctgctgaagaccagccgcatcctggagctgtcccggctcccggctccccgtcatctcattagcatgcaaaaagacactcttaccgcactccaggattcctagggtcagaggggctgcgcgctgggaaactgagacaaaggctgaatctgtgttgatggcacagtcactctgggtcgtgtgggaattcccgatgcacctccttccagcacatggactgtcagagccctgcgttgtcgccagcacagcagatctgaaaggcactaggctgtggcctcgcgacggctgaggtgagctgcttctccgaggctcccgggttattggggaccctccttttaaaggtgcctgttccagtcttttgccccatttcaaaattgggctgtcaaagaacaatgtcattggggggtccgtcttttttgttggttcctgggggctgtgtgtgttttagagacaagtgctttgattttttgtgttgcaaacagcttctgtcactccgcggctcgccttccactccatggatggtgtcttctgatgaacagaaagtaaaagcttactttataattagggcttttgcgtcctggctgtgtgtggggcctctttctggactgatctgtcccctttgttttttgcccccatgtcgtactgttctgatttcttctgctttataatcaccattggtaacttgtgttatgagtctccaatttggggtttttagttttcaaggttatcttggttattggctttttacatttccatacacatgggcttgttaataagccatttacagttggcttatttgctttcaaaatctccataagacatttggattgcatttggatttcttgatcagtatgggagattagcatctttacaatactgaggtttccaatccgtgaacatatctttaggcctttgattggggtttttttggcaggggagttgcggggggcagacaggacctcactcttgcccaggctggagtgcagtggcatgatcatggctcactgcagccttgacctcctgggctcaagcaatcctcccacctcagcctcccaagtagctgggactacaggtgtgcaccaccatgcccagctattttggcatttttttgtagagacagggtctccctatgttgcccaggctggtcttgaactcctgggctcaagtggtccttctgcctcagcctcctaaggtgctgggattacagatgcaagccactgcacccggccttaaattctttcaataatattttgtagtcttgtgtgtagcggtcatccacattttttgttcaaatgattccctggtatttcagtgcttatgctgttttaagccgtattacttttacagtttttttttttttatctttttgtttatagcaatgtgtaaagaagtgtgattaactcatttgtcttggcctctcctggtccccgtagtttgtctgtggttgctccggaacctctctgtgcgctgccattttgtcagtgaccggctgtttgtttctgcctttccttcagatgttgccttgttaccctggcactgttgatccttccaaaacagtatgggacagaagtggtgacagccacatcctctcgtgcctgatttcagggaaaagctttaagaattccaccattaagggtgctgtttgcggaaatactgtttttccttcgtaaatccccaccaacaaattaaagaggttctattttattcctagttgaaagttgttaatatgaatggtgctgaattttttcagatgctttttttccttcatctattgatgtgacagaacttttctcctttattctgttcatacgatgaattctatggattggctcttaatggtagaccgatggcattcctgtagtgtgcctcgtttggttgtgatgagttcgcctttttatattttgcttgattcagtttgctattattttgtttgttgtttttgcaactgtatttatgagagagattagcctattatttcttttttttttttttttggagtctcactctgtcacccaggctggagtggagttcagtggcccgatctgggcgcactgcaacctccgcctccctggttcaagcgattctcctgcctgagcctcctgagtagttgggattacaggtgtgtgccaccacgcctggttaatttttgtatttttagtagagacagggtttcaccatgttggccaagctggtcttgaacccctgaccttaggtgatccgcccgccttggcctcccaaagtgctgggattacaggtgtgagccaccatgcctggccatatcttccttttgattgatgcttttatcatcatgaaatgtttttgtttttttttttttgagacagagtgtcgctctgtcccccaggctggagtgcagtggcaccatctccactcactgcaagctctgcctcctgggttcacgccattctcctgcctcagcctcctgagtagctgggactacaggtgcctgccaccgcgcctagctaattttttatatttttagtagagacgaggtttcaccgtgttagccaggatggtctcgatctcctgacctcctgatccgcctgcttcggcctcccaaagtgctgggattacaggcgtgagccactgtgcccggccaaatgttgctctttagatgaaaatattattgtcattaacatctgatctgtatgatgttagtgtgaccacaccagctctgtgtgtgtgtgtgtgtgtgtgtgtgtgtgtgtgtgtgtgtgagatgaggggagggagggaaggggacttagtgtttatatgctctattttttcatcctttcactttcttttctgtatattttggaaatgactcttaaaagcagaagttagttatttttaatccagtctgaaaatggctgtgttttaaatgaaagatttagtccgtttacatttaatgtcattctgatgtgttacattgtagctttgtcatcttgctatgggtccttatttgtccggtctgttctttgttttgtccctctttcttgccttcttttggtttaatcagatgtttttattccactttcctccctttattattatagctttgttaagtaatacttctcttaatgttattttaatggctaccttagaaattatgagtcacatccttggaacgtagcataaactacttttaccattttcttcaaaaccttataacagtttaattcttattttttccttttttttttttttttttgagatggagtgtcactcttgttgcccaggctagagtgcaagggcgcgattttggctcactgcaacctccacctcctgggttcaagtgattctgctgcctcagcctcctgagtagctgggattacaggtgcccaccaccatgcccaactattttttgtatttttagtagaggcagggtttcaccatattgaccaggctggtatcgaattcctggcctcaagtgatctgtctgccttggcctcccaaagtgctgggtttacaggcatgagccactgtgcctggcctaattattcttctttccttattgttagtttgtgctattattttatcagtctttgtgctgttattatcatgcctgtaaattctacgtgtatttcagacccacaaaccaagtgttgtcttagacagtggtccttcagatttacccccaggttacccttctagtcttcctgcaggacggcgcttacatggagaccagcttccttctgcctgaagtagtccctttagtattcctttcagcacagacttgtaattaattctttttatttcttttcttttcttttttttttttttgagatggatttttgctcttgttgcccaggctggagtgcagtggtgtgattttggctcactgcagcctccacctcccaggttcaagcgattctcctggctcagcctcctgaggagctaggattgcaggtgtgcgccaccacgcccagttgttttttgtttgtgtgggaaatgtctttggcattctttctggagggtgttctccactctgtgtggagttctaggcaggtagggggtttcccccaacaggtttttgtgttggcttggagtgtttgtcatttctgtggtgagggcgccttccagcctcactgccacccctggaaggcaacatctcttttctctgactcctgttaaaagtgttttcatcacaacagcagccttgtgaaggacagaggaatcgagaatttctcctaattgagattggtagagcttcttgaatcagggacatgatagcttttgtctcttttggaaaatatcagcccttgacttttcgtttttttttttttttttttttttttttttgagtctcgctcttgttgcccaggctggagtgcaatggcgcgatctcgactcactgcaatctccacctccccggttcaagtgattctcctgcctcagcgtcccgagtagctgggattacaggcacttgccaccatgaccggctaattttttttgcatttataggagagacagggtttcaccatgttgaccaggctggtctggaactcctgatcatacatccaccttggcctcccaaagtgctgggattacaggtgtgagccaccgtgcccggccagcccttggcttttcaaatagcatcctgttctctctcccctgggacccccacacttcacacctgtgtgtctaatgtgctcttttttctgggtttcttctgcgttggttttttcccgctttgtgcttcaatgtggatttttttctactgttatctcttatttcacccaatctactcttaaatctaccctttaaattattaatttcagtcacttcattttttacttttagaatttccatttgattctttttttttttttttttgcccaggatggcaatggcacgctctcggctcactgcaacctccgcctcccaggttcaagcaatattcctgccccagcctcccaagcagctgggattacagggtcacactaccacgccccactaatttttatgtttttattagagacggggttttgccatgttggccaggctggtctcgaactcctgaccttgggtgatccgtttgcctcagcctcccaaagtgttgggattacaggcgtgagccactgcgcctggcatcgtagttctctcttctggggtgggaatgtctattctgtgtccttctcacgtgcaaaatactgtcattacatcccaatggccccagaacccttaactcctcccagtgtggcgggggcagtcttgtctgaacaaggcatgggggagcctggaggcccattcctcctgaggccaagttcctccctggctgtgggccagcataagcgaacaaggcgtgtacttccggaatgctatggactgagtgtgtgtctccccagaatccatatgttgaagccctaaccctccagtgtgatggtgtttggagacgaagcctttgacaggtagttagagtcatggcggtagttagttagagtcatggcggtagttagttagggtcacggtggtagttaggatcatggtggtacttaaggtcatggcagtagttagggttatatcagtagttagggctatggctgtagttagggtgatggtggtagttaaggtcacagcagtaattagggtcatggtggtggttagggtcacagtggtagttagggtcacggtggtggttagggtcgtggtggtggttagggtcacggtggtggttagggtcacggtggtagttagggtcacggcggtacttagggtcacggcggtggttagggtcacggcggtggttagggtcacggtggtggttagggtcacggcggtggttagggtcacggtggtggttagggtcgtggtagttaggttcatggtggtggttagggtcgtggtggttagggtcacggtggtggttagggtcacggtggtagttagggtcacggctgtagttagcgtcatggtggtggttagggtcacggcggtggttagggtcacggtggtggttagggtcacggcggtggttagggtcacggtggtggttagggtcgtggtagttaggttcatggtggtggttagggtcgtggtggttagggtcacggtggtagttagggtcgtggtggttagggtcatggtggtggttagggtcacggtggtggttagggtcgtggtggttagggtcgtggtggttagggtcgtggtggttagggttgtggtggttagggtggtggtggttagggtcgtggcggtggttagggtcgtggcggtggttagggttgtggtggttagggtcacggtggtggttagggtcacggtggtggttagggtcacggtggtagggtcgtggtggttagggtcgtggcggtggttagggtcgtggcggtggttagggttgtggtggttagggtcacggtggtggttagggtcacggtggtggttagggtcacggtggtagggtcgtggtggttagggtcgtggcggtggttagggtcgtggcggtggttagggttgtggtggttagggtcacggtggtagttagggtcacggtggtggttagggtcatggtggtggttagggtcacggtggtggttagggtcgtggtggttagggttgtggtggttagggtcgtggcggtggttagggtcacggtggtggttagggttgtggtggttagggttgtggtggttagggtcgtggcggtggttagggttgtggtggttagggttgtggtggttagggttgtggtggttagggtcgtggtggttagggtcgtggcggtggttagggttgtggtggttagggttgtggtggttagggtcgtggcggtggttagggtcgtggcggtggttagggtcgtggcggtggttagggttgtggtggttagggttgtggtggttagggtcacggtggtggttagggtcacggtggtagttagggtcacggtggtggttagggtcacggcggtggttagggtcacggtggtagttagggtcatggtggtggttagggtcacggtggtagggtcgtggtggttagggtcgtggcggtggttaggttcatggtggtggttagggtcgtggtggttagggtcacggtggtagttagggtcacggtggtggttagggtcacggtggtggttagggtcacggtggtagttagggtcacggtggtggttagggtcacggcggtggttagggtcacggtggtagttagggtcacggtggtggttagggtcacggtggtagggtcgtggtggttagggtcgtggcggtggttaggttcatggtggtggttagggtcgtggtggttagggtcacggtggtagttagggtcacggtggtggttagggtcatggtggtggttagggtcacggtggtggttagggtcgtggtggttagggttgtggtggttagggtcgtggcggtggttagggtcacggtggtggttagggttgtggtggttagggtcgtggcggtggttagggttgtggtggttagggttgtggtggttagggttgtggtggttagggtcgtggcggtggttagggtcgtggcggtggttagggttgtggtggttagggttgtggtggttagggtcacggtggtagttagggtcacggtggtagttagggtcacggtggtggttagggtcacggcggtggttagggtcacggtggtagttagggtcacggtggtggttagggtcacggcggtggttagggtcacggtggtagttagggtggtggtggttagggtcacggtggtggttagggtcacggtggtagttagggtcacggtggtggttagggtcgtggcggtggttagggttgtggtggttagggtcacggcggtggttagggtcacggtggtggttagggttgtggtggttagggtcacggtggcggttagggtcacggcggcggttagggtcacggcggcggttagggtcacggcggtggttagggtcacggcggtggttagggtcacggcggtggttagggtcacggcggtggttagggtcgtggtggttagggtcacggtggcggttagggtcacggcggcggttagggtcacggcggcggttagggtcacggcggcggttagggtcacggcggcggttagggtcacggcgacggttagggtcacggcggtggttagggtcacggtggtggttagggtcacggcggtggttagggtcacggcggtggttagggtcacggctgtagttagggtcacggctgtagttagcgtcacggtggtggttagggtcacggtggtggttagggtcatggcggtagttagggtcacggctgtagttagcgtcacggtggtagttagggtcacggtggtggttagggtcacggtggtggttagggtcacggcggtggttagggtcacggcggcggttagggtcacggcggtggttagggtcacggtggtggttagggtcacagggtagaacccttgtggtgggatttgtgccctttataggatgagaggatgagacacaagagaggttgtgctgcgcctgtgctctctgctccacatgagaacatggtgagcatgaggccgccagcaagcaaggagataccccgccctgcaggttccgtcatcctgactccagcctcggaaacatgagaaagtcaatgcctgtcacttaagccgcccagtctgtggtattttgctgtggtggctgagccgacggagacagttccataggtcttgattgtcctggtggccctgaaccccagtttttgtctccagtgagatgcctggcccggctttctgtgtgacctccgaagggtcagcagacgccgtgcatgtgcagggcttgggtggcgcatctctctggcaacaccttctcttctgacgcacttgtctggtctcggatgcctccaacgcggtttttacttattttccagctttcgtcgattgttcgtgggaggagggttagactcctcgcgtggcgtccctggccacatcctcagcgctgtgtcccctcgcagctcagttcctggttctgagttattgtgactcagccgcacgtcctcccaggggccttgccagcctggctctgtgccgggcgctgggcaatctctgcctccagcctgggcctttgggtctgtttgagggtgggggacacggagctcagcagtgaggaactcggagcagcttcttgttgttggtgttgatgtgttttgtttgttttagtgaatccagaaaaaaaatttcttacatagaaaggagcggtatttggtatgaatttatttgcaactgactgcttggaagttggcgtacatctttccacggaaactatgaaaatactggtcagcctctcagtcatttcataaaatcttgattttgtattacaacaaattaggatattttcagtagaactgattgtaaggccagactgttggaatgtaattccttcccaaacatctctcaggggcactttcctgaacggctgctgacagcagcatttgaggacggtggggcggaggacatcctggggggcctggcttcttgggaactggaggctttggcccttgtcccacccctgctcccctgaggagggaggcgtggggccctgggctggctgcaagacgtggagtgactgtgggtccccgtggcccctgacatgctcccagggaacccaagaaaagactgagaccctgtggtgcctcccgctttccatccgcattccatggcaggtgagtctgattattcgaaggaggctggagtgtgggcggagggcagcgccaggtttcccaatcagatttgctcagggtccctccagcagtccatgccgcagaggctgtcccttgggggcccacgcatcctagccacggcctcctcacgtccatgcggggatttgcgccctggaaggagccgcccggctgcctctcgccaacatgcagcacttcccttcctttccatggagcacggttcctgtcccgggggtccatattggccactgtgggagagagtcgggcagctgaattcccgcaggtgggaatgccagggcccgaggatgttgcccctgtcctgaaggctgtcgcccgatcgctctatccaaggctgccctggggcagcgtcacctgggggtcctgcgggggcttctcagcacagcatccagcactgccacctagtgtgttcccgtcacgtctcctccccccgcctgcaccaggcaccagagacccggatgccaaggcctgtcagcttcctcaatgggaaacttttcttcagtgaacaaagctctgttttatagactttttaaattttcagctcaaaaaccaaagtctgccagtgttggtggccttggagggctggtctgctgacctgggctgcaggggctgcccggctggggtcgtggtcggggcaggtgccgcccacaggttgtttggctgcaggtgatgggcaggtcccccatcacgtgtccagaggtgggtgctgctggtgggtaatccagctcattacctgtctccccccagccgccttgggctggggaccctgccccgccgaccctgccatgcccacccccctccagcctgattgcgtgtctcagtcacatgaccgccctgggcccgtgatgtcactgggaaatgccctcatttgattggcttagaccccagatgaacaagcccaaggtcttggggcatcagagccacccatgagggcagctggatgcagcggccacagcctgtggttggggaatggcattgcgcagctccaccacgaggggacctgaggcttggactgtgagactggcccaggctcgccacttgcccctcacccggggttgccttcccgagggccgcggacacctgagcagtccccatgccactgcattgtggcagggacacggccgcccatccctcctgggtcccttatccacctgcctgtcccttcgtatcactgacaccctgatacccattgtgctgcgccgtgtggcccggtgcccacagggccgggttctgcctgttcctgggggtccgtgtgtcccacgtgcctagacgtgagaggacggaagtcggcagagcttggctccctgttcgcccgactggcgcctcggctgtgcctcttctgtctctcgagctcttctgtgccgtgtggttgcactaagcagctgtggggaagggggaggttgttgcctcagtgggagcctgggctgtggctgccagtccccaaaacagaccctgcgccccgggcaaccatctgcttcccgccacagtggtgcccaaaaccttttccaagtcgtcttctgtgactttagtgttattcttcagtcacctttaaaagcatagcatgttttcaatcacatgttcagctgggaaatagatctgtggttagaaacgggaagtttgagttgcaggcttgcgatccgggcaggtccctcagatggaggggctgcacctccactgccccccccaccgccgcccctgccccacggccaccccagatcctcagacgcccctccctgtgccttctcaccctctggtcctggctgggcccgtcccgccccacgtcccgcctcccactgccctcagcctctggaacggtgcctgcatggctggcactatccagcgcagaaggaatgaaggacttctgttcagacagctctgctgggagcgttctggcctgaaatgcagtgggagctctggtgcaggtgtagccgaggctcaggggctccacaccaggcaaataggcgaacggcgtctcccgcggctcccggtggctttttaggactctgcgttcgtgttctccattgtccctggcagcccctggccagggtggcccagtgcccactatagagggtgcaggtcagtttgtggaccaatggccaaccaggctgagtcaggtgaggtggggagtcccaccccaaaccccaaactccagtgtctgggccacgggcagccctgggacaccttagctctggacacgaatttgcggtcattgctgttcttgtgtctctatttgcctaggacatgctggcagctaactgggtgctggggaagcctggagaggaagccaggtggccccaggctcctggagctcagaatctagtggaaatcgctgcccagggaagaagctccggagtctagaggtggcagcacccattttacctgcaccctcagtgacagctgcaccctggcttctggggacctctgggcccaagggcacctcactgtctccttgtcctcctggtcactgacctgggccaccatagaaggcacctggctatctgcatgtggcttgaccactgccttgcacccatccgggccccgcagggccgtcctgtggcactgctttgggctgtgctggtcaccctgtgtagcggggccatgtccagtgaacaggagaggcctcaagtgccccctgacctgctgccagggactcggcccctccctcaccgccaccgcacccaagggctgtcgcctgtcccagcctgctgctccgagtttagtgttttaaaacgtgttttctacgtcttgtcagagtgctcaaggcgcgagattgccatggaaactgagctccttagaattcctgtggccgtcctaattatagaatctcaaagacacgcacagagctccttgaggttgtcggagttaaggctgaaagaggaggagcggcccctgtgatccccacaattttgttccctgcttgcttcagcagagcctggcacccagggaggtggcaggatgggtccccaatgggcacgtgacatcgagccagctctgactccaaagcctgacccgtgtggctgcaccgtccactgtgcgctgtccactgcaggagaccccaggctgtgtccacacgtacccccggaaggacctcctgctaacctgggcttgactttgagaccctgttccacagaggtagccgggggactcgcggtgccaggcccacagcctcctcgccggtagtatctgggggccaggggccgtttccagagcacactccccagaagggctcccttctccttttcacagcgctgtctgtcgcttaggtcagaaataggcccatcgctttccaagcagaaacccaaacactgaaaattcgactgtgacttttgaggggtggggaccgccaggtccccccaacatccctgcctgcgggcccagaaaggcagagtggctgccggcccgcgtgtccaggccccttacactgagggaaccttctagtcaattgcctgaagttcgaaggtttggggggtttttgtggttgcttccgtttgttttggcagttgcagaatcccccgaaaaggtgggaatgtggatttttcaaggcaggtgctcctttgattcagaagctaaggaggccctaagtgcagtctcaccttgagaaaaatatcaggccagtcctaacggaggggcgtcctgcagacacccagcctgcactcagaactgtcacggtcagaaagcacggtcagaaagtctgagaaagtcacggtgcagcagggcccgagaggcaagacggtgacacgtgggctcctggaagaggcaggatggtgacacgtgggctccaggacaggaccctggggcggacgcagacagtgggtgaaaaccaaggaaaggtctgaatatcgcttaaggtagccatggatcctgtctcattaattgtaacagtgtagcaggcgggtggaagatgagagctgtggggagccaggcagggggggtctctgggaactctccaatttaaagctgttcttaaaaatagtctattaaaaaagacagttgagggcggccctgcctacagctggagttgaggttctagcaccaggcttcctctcagcctccataggcgagtagggaccaggcagggccttggccacagggaggcttctggttaccaggttctccacagcctttgcagtttccctgtgaatctgaaattacccccaaataaaaaggatgggtttttttgtttgtttgttttgttttgtttttgagacagggtctggctttgttgcccaggctggaatacagtggtgtgatctctgctcagtgcagcctccacctgccaggctcaggtgatcctcccacctcagcctcccgagtagctgggactataggtgcacgccaccacactcggctcattttttatattttttttatagagacggggtctcaccatattgcctaggctggattcaaattcctgggctcaagtgatccacctgcctcgacctaccgaggtagtggggttacaagcatgagccgccacgcctggccaaaaggtgtatttgttaagtacaggctgccctgctgtccgttatcccttataactcacctggtccctgctttccagctggggactggcatggaccccatggggcttcccccatttcactgaggcaagacccagatgctgggggtattgggtgtcctgcccaaccagggtccccagggccaggggctcctggcgtgccttcccgtgggactccgcatggggggctgggagggcgaggaaaatgggaaacatgatgcctgcccaaaactcccacctcggagaccctgtgccagggttttccagagagaccaaaccaatagggtgtgtgtatagaaagatctattgtaaggaactggcttgttcatagagacttatgaagcccaaaatctacagggggcccagcaggctggagacctaggaggagccacagccgcagcactgctgcttagggagctcagcctttgctctgtggaggcctttttctgcttgggtgaggcccacctgcattgtggtgggcagtctgcttcccccaaagtcagctgatttaaatgtttatctcatccatactcaccctcatggaaacatccaggataacatttgaccagccgtctgggcaccatggcccagccgcgtggacacatacagtgaaccattgcaggcccttccttggcacttggcatccacgcatatccccttaagccacactcagtctccacacagcagtactcccgcctgacacactcggtctccacacacagcagtactcccgcctgacacagttcgaccctcccgcaagcagtgccagcacacttggccttcccagaagagggccaccatcatgggctcggaccttccagctggactgcagtggggtggggcgtggcctcgcctctgtggtctttgggtcacttgaatccccgcctctcactcattttcctttggtatttgcaaatttgtccccgtggcgcctggagctgactgccgggtgccacatgtgtcctgcctcaagccaagctccaggcggcacccgtgagcaggcagggatgccagtggtttctcacctgggagtttctttgcaggctcagagctctttgttcctttttaaaaatctgatttgaaggccgggcacagtggctcacacctgtaatctcagcactttgggaggccgaagtgggcatatcgcctgaggtcaggcgttggagaccagcctgggcaacacaggttggggcaactcccttccctaataaaagttcaaaaccaacccttaaagtttaaaaagtgagatgggatatttgaaggaggcaggtctgagggaaatgcttgaaattatcctctctgtccctgtgctgccaggtcatttagttccattgttattcaacataccatttgacacatgctaggagcgcaggactcggcaatataaagcgtggtaatcgatggacactgcccccggcagccagccaggggcaggacttaagccccacccaactgcaggctgtcccccgccgctgctagcctgaagttggattggttactgctgcggcctgaaattggattggttatttgcttactggaacatttttgtcacatgactgtgtattctaaaacaagatgttgtttttgtttttgagagagtctcgctctgtcgcccaggctggagtgcagtggcgcgatcgcggctcactgcaagctccacctcccgggttcacgccattctcctgcctcagcctcccaagtagttgggactacaggcgcccaccaccacacccgactaattttttgtatttttagtagagacggggtttcaccgtgttagccaggatggtctcgatctcctgaccttgtgatctgcccgcctcggcctcccaaagtgctgggattacaggcgggagccaccgtgcctagtattgggtttgtttgtttgttttttgacttacttgtttggttctatagcaatggcaccatgtttctgtcaccctagggtttgatttttggtgtttctaagacacctctgggccactgcacatggctgaggtgggcttcgcactggctctgtcttccgttggacgcccacacatcggtttatttatgcattctcttgtccacagaccttgaggtcatcagacatcttgaatgctcccgagcccaggagcgagcgtttctgagctttgacggagcagcagtggggctgccgggccctagggggagcaaatggtcctcgtttctgagctgcgaggctctcccagagaataagccatttctccggggcactcctgggcctcgaaggtgtttggggctgcgggggattgatttgtgccgaccccgcagtgtaggagacgcctgggcggccttgcgggttgcttcgatggttctcggggctgagatgcttgtgtctctctcgggcgagacgcctgctctgggcttctgttcctattttgactgctttttcctcatggatttttcagtccagcatccctagccacgggccctttgtctctcatgtgtgcaggtgactcacggtgactaaaatcttctgtaattccttctaaaatgttttgccgctttgctgtccacgtttccacccttagtctctgaggggcctagtgtgtgtatggtgggaagcggggtcagcccccgcctggaccgctgtgacagaaccccacagacagggtgacttacacacgacagaaacgtcttttctcaagttctggaggcgtggggaccccatctccaaatacagccacattgggggttagggctccccacgtgaatttaggggacacttcagttcgtcccggcggggactggggacgccgggctgtgtgctgtgtcctgtgggagagtttgttcaccctgctggaggctccctgatgagccctggcgtctgctaggacgtcattctctttactgattgaactcgaaggatgtccagttggcgcattttcagggtttcccaggcgcactgggggtgggtcctgtgtgtccccgctccagccagcttcgacccccagctgtgcgtcagtccctcagctccgccccccagctgcgcggccgtccctcggctccgccccacagctgtgtgaccgccctgcggctccgcccgcagctgcacgttcgtccctcggctccgcccccagttgctcgtcggttccctcggctccgccccctcggctgtgcgtctggccctcagctccacccccagctgcgcgtccgttcctcagctcagtccccaagctgtgcgtccttccctcagctctacccccagctgtgcgcccgccccttggttccacccccctccccagctgtgcgcccgccccttggttccaccccccccagctgtgcatccgtcccttggctccgccccgcactgtgcgtccatttttgactccgcccccggctgtgcgctcatccctcggctccgcccccggctgtgcgtccgtccctcggttccgcccccggctgcgcgtctgtccctcgactcggcccctcagctgtgcgccactttctctgtggcccacagtacctccgtctccgccgcttcacacccttctctttctttctctcttcagagagggttgttgggcaggcagagcatcccccgaggggacaagtcaggcctacggactcctggagccaggacctgccgtaggctggttagggcaggatgcgccctgtcttcgtgggtagagccacatgaggggtcacccgaccccctcagggctgaggggcacaggggccgaaagtgtggccgcccctgggggtctgcgcctcttgtggagcccaggcctggcgcccaggtgggtggagtgtggagggggcacaggctgcacgaccccagcctggcctcgggcttgctgggagtcgcgtctgtggccggaggggcctttggtgtcaccaggcctctgtcaaaccccaagccgcatcctgggagggctgggtgggctgagccgcccgctgccgtgaggcctctttgacctgcgctcctggaggacccctgacttcttggtttcgctctgaatcttccatttaaaggaagaggagcaggttttaccatccgtgtggcctgatttcagcagtttccagtcagggctagtcatttgcttgttttaaaaacattccgttacaatttccacttcagtatatttgtggcactttcatttggttcatgaaagtcgcttttatgatggaattttataaaagcacaaagcttcccattgtacgttccgtttctgaagattctgtttacacacacatccgtttcaaagagttttggaggagcaaagtgggacacggtgttgaggaaggacaagaccagccgtctggttacaggcttggtgccgcctttctcataagaggcacagtccgcatgggctggactgtcaaatgcatgttataaagatgatgtttttggtaacttgcgaatggaaacgggtgcacggtcggtttggctctcctgccctgagatttattaggttaaaggaaactcgactggagagcccggggcctcgcgccgcttgcgtctggcgagttgttgaagtgaagtcagtggcgctctgcaccttagcctggcccaggctccactgtggcgtccactcttcctcctctgacagtcatgtgtaaatattgaggcccgtttgaactatccctgtgcggaaaaaaaggcctgtttttcacagggctgcctggggaggaggggggtggaaaggaaaacaggcaggggacagacggacccggcctgcgttggcctggggtgacttcacggctccactgtcagcaagcggccgtcccgtggtggatcctgtccgccctgcgaggacacctggctccatccacacctgggcctctgtctccagccgccgaggccgtgacaccatgaggatcatgtgaggaggggcagagagaggcctccgggaggccgtcattccagccctgccttccctgcctgggaggacgctgcggccgccaccacctggacgggagtggcctgtcgcagctgcaccctgcgtgggctcgtggctgccacgctgtttctttacacctttctcatatcctttccagaatctatctaccgccggggagccagaagatggaggaagctgtaccgtgccaacggccacctcttccaagccaagcgctttaacagggtgagtggcccccttgggactagtccctcaaggggccttttgttacttttaaaagcaaagagagaggaggggaggcacgtcccgctgagcccaggctgggctctttttggcgcccgagggcaaggttacagaaatgctttctctggtgcaggatgaggctttgactagggctgtctgaggcgggaagtgccctccgggcctttccctgcgtggtggctgcccagtgaatgctgtctgtgtctgcctggctgtgtgactcttatcagggctcagggctcactggcctgaggccccagcctgcctgcatccagagtggggcggccgcattccatccgcatgtagcgccagggtgtgtgttttcagccgcacacagtgttgcctagtagctaagagtctccgtgaaccctggaagctccttcagccccatccctgcttgggcctctgtcttcccagcggccacccacgggggccctttccagaggacacttagcttattttccttgtttctctttatgatgcttttctagttcctatgaaatgggtgattcagatgcttttgtaattgttctgtttcacagtggaaggggaggtgtctgggtgtgccttggtggccctggagttggtcccacacagggagtgtcttgggggtgcgtggaagtatacagggcctgtccccactgcgggactccacacagagcccctgacagcccctcacaggagcggtggccctggggctacctttgcattccacactcacctgccacgtggcctcacgtgtcaacctccgctgggtgtacggcacctctgtctcctggagcggcctcaagtcacctgcccctccttctactcccatggtctgccctctagaccatcaggaagttctgttcatgtgagccactcctcctgcccctgcgtgtgctcggtccctgtcatgtggcaagagtgggtctggactcccattcctcttggggctaacacaggtgaggatgcaggacaagctcctgagtgactgaagaggggtgtggtgggaactaggctccaggagatgagcaggtcagcactaggaagacctggacattgcctggagagcccagaggacttcctggaggaggaggcatctgatcatactgcctgggaggtcagtgcagaggagatgccaggagcaccgaggatgtggcaggcacgggagagtccagccagtgtctgggaggccctgaggacgaggttggggacaccaggaaatggggagcctaggcggctgtgtgcttagggcaggtgggtgtgggtgaacaggcagtttggctcaggctgggactcaggagagtgtggctggaggtggccacattgggaatatctgtggagtatggtgccagggagtgttgcagcacagagatcccgtccgcaccccagcccaccctggccgccttttctgaggacacacgttgtgagtcttctggggctgcagaacacagcaccactaactggcagcttaaacaatggaaacttgctctccggcagtctggggctggaagtccaaaacgaaggtgtctttatgagtcagggttctccagagggatggtaccaatgggatgcatgtacatgaaagggagttgattagggagaactggccctcgggcgcacaagacgaagtcttacgataggccagctgcaggctggggaagaaagaagccagcagtggctcactccgagtccaaaagcctcagaagcagggaagccgacagtgcagccttcagcctctgccagaggctccagagcccccggcaaaccactaataagtcccggagtctaaaggcccaagaacctggaatctgatgtcccagggtaggacgagtggcaggaagcatccagcatgggagaaagatgaaagccagaagacccaggaaaactgcttctcccacctgcttccgcctgctttgccccagccgcactggcagctgattggacgccaccgcccacccacattgagggtgggtcttgccctcccagtccactgactcaaataccagtctcagggcagcgccctcatagacacacccagatgcaatacttcaccagttctctaggcatccttcaacccagtcaagtcggcgcctggtgtgacccattacagtgccgcagggctgcgccctccttcccccgcagccactggtagctgcgggcagccttgttcctgtgctggcagaggaaccactcacctctgtttccgtctccacatggcctcctctgtatctgtctcttctgtcattctgcatgacggattagcccagagtgaaccctacccacccagtgacatgggccagggctccgggcagcacagggtgtggcctctcactgtgcagctttgaggagaaaagtccattctgccgatggcaggtgcagaccataagtgaccctccccctccccaccaccaccagtgagcaaaagcttttcctttccttcctgcagacactggaggaaagggtggcaggtggacccaccacagccccgctctgctgtggaggtacagcccttctgggcgtgtgaacgagccagtttcacaaacacagaggccaaggcgagagtggcccgaaagcctgcaacctgactgctcagggagggcggctgccctgcagttcagcctgtccgattcccgcctaattgtgcccgggctctgatctcgccacctgctcgtaacgttctctgtccggacctcagagccgctccatgtagtgctcacttcatgttaattgcaggaccactcagatcacctctgctgtcacttaaaaggggcatttcaggaggaaagcacttggttttgtgtgaatcagtaagacttaaaggggaacaagcacccaggagaagagagacttttccgtcctctttgttggtgaagcgaggatgaaagagtgggcatccgtcgctggggactgggctccccgcccagctctttctgtgcacttgaaagcactgcccttggactttgagaaggaagcgttcagtgggggagccaaagggagagagccagcgaggttctgaagaaggaggtgaggaggggctgcctcctccatgaaggatggtgccgggggtggcagggaagcccactcagtggaacagaactgctgggtcagagctggcccagggctgagcacttcttgcagaggagggaagggatcctccagtaaatcctgaggaggtgattggttaattatcagcccaggaatggggggtgaggtgggtaggaatccaggctgctggctcccatcacagtaaacggcaggtggattgaggttaaaaaaaaatcacagggcccggcgcagtggctcacgcctgtaatcccagcactttgggaggccgagatgggtgatcgcttgaggccaggagttcaagatccatctggccaacatggtgaaacccatctgtactaaaaatacaaaaattagccaggcgtggtggcacgtgcctgtaatcccagctactcaggagtctgaggcaggagaatcacttgaacccaggaggcgggggttgcggtgagctgagattgtgccactgggcgacagagtgagactccgtctcaaataaataaaaagaagaaacctagaagctgtgcagatctctggagaaaaaccgggcagtgaggaccagagggtctttagactcagccacacagaattttcagattttttcagtttccaaattaaatgcaaaaaacatacaggaaaggggtttgtagcacgtaaaacccagaagagatccagacatctcacacttagaattgaagagctcctacacaaaggcttttggtaaatgctgggaccgagaagctgagaaccggtgtgaatggttaatgaagtaagactgtaattgtttagagatgaggacagcatgacctccacaggtgatcagggaaacacaagacattttctctgtcaacatcaaagatgttaaaagtaattaaagccggccgggcgtggtggctcacgcctgtaattccagcactttgggaggccgaggtgggtggatcacgaggtcagcagttcaagaccagcctggccaagttggtgaaaccccgtgtctactaaaaatacaaaaaaagtagccaggcgtggtggtgggttcctctaatcccagctactcgggaggctgaggcagagaattgcttgaacccgggaggcagaggttgtagtgagccgagatggcaccactgcactccagcctgggcgacagagcaggactctgtctcaaaacaacacaaaacaaaaacaaaacaacaaaaaagtaattaaagcccagggttgctgtcatggggtctgccaaccctggggatgtgggacaggcatggaccctactctctggaaatcacgcagaaatgtgcagcgatgttcccatcctgcctctcttcaaaagaaatcacccgtcattcggaggtttgtgtatggggaagatcagctcagcattatttttacaagcaagagtgggaatcgtgtctggagttagctactccctttgctgtgaacaacccactccaccacgtggggtataaaccatggtagggccacgtctctgagctgtggctgctggagagccctctgctggtggcacatagggcacaagtgccgcagggacagctgggtggatggcccaagactttggcctttatcatgagtggacagaggagtgaccacttgggtccctggagaagaggctatagagagtgagggtggggaagggagatcagaagatgccatccatgagcagcagtgcctgtcagatttggtccaagcagtgccctcaggtggctggcagaggccaatgcaattccttttcaagccagcatcaaagaattcctgatgataaataaatcaggcatctgagctcgcaatggaaaaccacaaaacacagtgggaagcaggatatcctgagtccaagctggtaaaagcccagacagaggctccaaccatcagaataggtaagggtgtgacaggtctaaaacatgaaaatgggcgattgaaaatatgagcaggaggccgggcgcggtggctcacgcatgtaatcccagcactttgggaggccgaggcaggcggagtgcctgaggtcaggagttcgagaccagcctggtcaacatagtgaaacactgtctctactaaaaatacaacaaaaatttagccaggcgtggtggtgggtgcctgtaatcccaggtactcggtaggctgaggcaggggaatggcttgaaccagggagctggaggtttcagtgagctgagaacatgccactgtactccagcttgggtgacagagtgagactccgtctcaaaaaaaaagaaagaaaatgtgagcagggaggccaggtgcagtagctcacacctgtaatcccagcactttgggaggctggagcgggcagatcacctgaggtcaggggttcgagacgagcctggccaacatggcgaaactttgtctctactaaaaataaaaaatcagccggacgtggtggcaggtgcctataatcccagctactcaggaggctgagacaggagaatcgcttgaacccaggaggcggaggctgcagtgagccaagatcgtaccactgcactccagcctggggaacagagcgaggcgcgaggctgtcggagggagggaatatgagcaaggaacaagttggcagcatgtaagacgtacttaaaacgtttttacccattaatctatgaattcctctgagtttctgagaatggaaacttggggtttaggttttatttttttaatgtcacatttcctgaaatgttactattcaaatatagatttgaaacaagagcttttgacagagcttgggcagcctcacttacaaagcacacacgtgaggtctctgtggtgggtgccaacccttggcagattcacactgcccttgtcagcagatgtcctggcctgaccccaggtaagggtggctccccacggaaaggaaccttggtcaatttgttttttgtttgtttgtttgtttttctttttcttttttttttttttttttgagacacagtctcactctgttgcccaggctggagtgcagtggcgtgatcttgactcactgcaacctctgcctcctgggttcaagtgattctcctgcttcagcctcccgagtagctgggattacagatgtgcgccaccacgcccagctaatttttgtacttttagtggagatggggtttctccatgttggtcaggctgatctcgaactcctgaccgcaagtgatccgcccgccttggcctcccaaagtgctgggattacaggcatgagccactgcgcctggccaatcttggttaatttgtaaagatacctggtggctgtgaatttggtcttaactaggaccgtagtgttgcagagtaagatgttaaatggtgacctagagaaagccaaacacattaggcacattataccaaaagaacttgacttttaaataatggttttagaaatggaagctggtgttcttctgcgctgtggacgcggaggagaatggagcaggtctgcacagccaaagtgcctcctttcactccagggtccaggcatccagcagccgaagcgcctcctttcactccagggtccacacatccagcagccgaagcgcctcctttcactccagggtccacacatccagcagccgaagcgcctcttttcactccagggtccacacatccagcagccgaagcgcctcctttcaatccagggtccacacatccagcagccgaagcgcctcctttcactccagggtccacacatccaacagccgaagcgcctcctttctctccagggtccacacatccagcagccgaagcgcctcctttcactccagggtccacacatccagcagccgaagcgcctcctttcactccagggtccacacatccagcagccgaagcgcctcctttcaatccagggtccacacatccagcagccgaagcgcctcctttcactctagggtccaggcatccagcagccgaagcgcctcctttcaatccagggtccacacatccagcagccgaagcgccctcctttcaatccagggtccaggcatctagcagccgaagcgcctcctttcaatccagggtccacacatccagcagccgaagcgcctcctttcaatccagggtccacacatccagcaggtgccgactggggcaaaactcccaatgccggcattaagctagattggcccggaatcagaggtcttgggtgggatgccccctctcacccatccctccttcgaatagagcccacggtcctggtgtggctctgtcatggctgggctgatgtaggtagcatgtgcagaggatgtggagtcggctcctttttcctgtgacgaagttgaaagcgatgatgcatgtgtgttttcttacccgatgcccactgtgtgctgggcactgtcctaggtgctggtcatccggccccacccaaacaagtgggctgtgtgggcggggggagggtccccgggccctgacgtcccgagcaggctcttctgatgagcaggagagtcccgtagagggtctggaccccctttgctcagccgcacctgatgcccacatgtgctgagggtcccggttcctcacgtgaactcagtgctgtattttctcttcagtcccgtttcctcacgtgaattcagtgcaggcggttcacagtacactgtatttcctcttctttttttttttttttttttttgagatggagtctcactctgtcgcccaggctggagtgcagtgacgcaatctcggctcactgcaagctccgcctccggggttcacgccattctcctgcctcagcctcccgagtacctgggactacaggtgcccgccaccacacctggctaattttttgtattttgtagtagagacggggtttcaccgtgttagccaggatggtctcaatctcctgacctcctgatccacccgcctcggcctccccaagtgctgggattacaggcgtgagccaccacgcccggcctatatttcctcgtcttaactcaggtgtgaggtgagctctgtaataggaaggaaatttgtgaaaaatggtaaaagagggaaaagcatatgaaagggctgtgtctggaaagaatctgaattggaggctctgggcacatggtgacagtgcagatgcacccctttactcccaggaacactttgggcacttaggcaaggcagaaaatgtccaagcaggtcccgacaacattcattctcatgccttttgtaacatttaaacgttcatgaaaacatcgccaaacaagctgataattaccatcattttggaattgttcagaaccatgaagaataaagaaggatcatttaaaatcttgaaaaatactgaacaaagaatactaagataattgcaggctgccatgtagcagttcaagatgttcatgagtccgagttccccttctctgaggctgtcaggaggaggttctgtttgaatgaaggtcaggcagggggtacccccacacactctgcttagccctagacgggaccccaggctgctctacgcagagcgcagcaggagctgcagccccccagcccctgcaagccacggggccttgcctgaagcagcacctcgtcacccctgcccgatggcacctcccctgtgtcccctcatgcagagcagggttccaggcctctccttggggccactggttcccccaaccttgggatagacccaagaggaggctctcaagcttgggcaagcctggcgcccggaagggacaaggtgccggggccacctgttgcccggctcagtgtcctcttttgagaaggtataggtgtggaaggccctgcctgtcctctccgctggcccctcagtgtggcctgggcctgacgctctgttcccacctgcagagagcgtactgcggtcagtgcagcgagaggatatggggcctcgcgaggcaaggctacaggtgcatcaactgcaaactgctggtccataagcgctgccacggcctcgtcccgctgacctgcaggaagcatatggtgagtggcagggctggggaggcccggggggcacgggcggggtcggggcgtggcagccagcccattgtccaagcagaccttggtgaccctgggttcttcaagaggggccgtggtgccgtcctagctctgggctgcagcgtgagactcaggcggcagtcttggataggacccatcttcctgagcccccacaagcccccggcacactctgctcattggggcatgaggctcaggcagcaggctcaggtaggacgtggtacgctctgctcagtgggtcggaggtaaggttcattcataccccagtcttgaaccagctcttaaggactgtggaggtgaaagccaggtctgacctagtagcattgggcacgctgaggctccgaacatctggagcctctccctggcatcccccctgggaagccatgcccagcctgtgatgagggcggcaccttccctccgccatccccgagtgcttggacttgaagcatccaggcctttgggggccttattgacttttgcttattgaaggctgcctctggcatttccgtgtggccccctgcatcccactgaaccacgggggtgaggcctggactgaacattcaactccctgggccctgctgcagcgtgcagtgggtgtgtctggggagggtggcttgtctgcatcttgctgtggcatgggaggaaaggcgcctgtggcagtgacgtgccctctcctctgttacgggataaagacagagtctggatcagggtgtcaccccaggatcaccagccacagggatgggggaccacgcaggctggtgcatgcgttggcacagtccttccagaggtccttcagctgcatctgccaaaaagcctgtaatgccctttgacctcataggtccactttagcgtaagcaaatgagaccggccccagaaatgtggtcagctagaggcggagggaggccagagcctgccacccagctgaccaccagtactggtggctccattatgacatatctgcaggcggaacccagaggcccttagaatggccccctgatgcttggttactgacaggatgcagctttgggacaggggagatgaccaagcattgtgcaaaatatcccgttgtataaagcacttggtggaaaggtcatggcctgcagtaccgagtggccacctccgtctgcagaatcataggtaatgtttatgttctttatctaattcagtaaaatagcataacaattagatttttatatactatattacagtatacccattgtaatgtgtaaatatgtaaatcataaatagtcttgaagtggccaggtgcagaggctcacacctgtaatcccaacactttgggaggccaaggtgggaagatcacttgaggccaggagttcaagaccagcctgagcaatatggtgagaccccatctctacaaaaaaaatacaaaaattagccaggcatggtggtgcgcacctgtagtgcccgctgctctggaagctgaggcgggaggattgctcgagctcaggaggttgaagctgcagtgagccgtgatcgcgccactgctctccagcctggatgatgacagactgtgaccctgtctgtaaaaaaaagttcttaattttaaaaagtcacaaagtgtttacagaagctacattgtaacacctgctctagcacttggtcatgctgccatctctgtgtctctccggcaggattctgtcatgccttcccaagagcctccagtagacgacaagaacgaggacgccgaccttccttccgaggagacagatggaagtaggcgctgctttcttccggccgggtagagcctgggcatcacctcaccctgctcacctctgccttctagccacgagtcctttctcagtcccatctgctctgcaggggtcattgtcttcaagcctggccacccttccctggggctggggatgaggctctccagggcctcctctcaatccccggcagagatgagcagggtgagctggccctccctggaggctgctgggcagggatgcctccgtgaagtgctgttgtggttgcccaggggtgcagagcctcttcctctaaccagctccgggagttctcgaaggcacttagtgcagcagccaccatggccgggcacctcccacaatctggctgctgcacagagctgagccctatctggggaaagcctggcgaggtggctgctgcacacacagcgtggcagtggcatggtccttggatttttgtgaggttttgtttgttgtggggaaggacttgttttattgctaagaagcattcagagagagatctcaaacaccagttggacttacagcccaggtttgagcctccacacctgcacctctgcacgggggtgtgagagcctcactttcacttgatgcatgtgagttctgtctcattgggagaccacagaacataaagcacttatgagaccacagaacataaagcacttagttcacacagtgcctcacgcaaaagagatgcctcacaaacaactgcctgcccacctgctcctccacccacctatcctctatacagatattcatccgtacatcatccattcacccacctagccaaccaaccagccctcatccagccaaccagccatcctccacccgcccattctccatccatccaccacctatccatctatccacgatccatccatctcgtcatccagccagccagccagccatcctccacccacccatcctccagctatcttccattcgttcatctgttgtccactgacctctccatctatccatgtatctattgtccactgacctctccatctatccatctattgtccactgacctctccgtctatccgtctattgtccactgacctctccatccaaccgtctattgtccactgacctctccatctatccatccatcttttgtccactgacgtctccatctatccatctgtctgttgtccactgacctctccacccatctatctgttgtccactgacctctccatctttccatctgttgtccactgacctctccatctatccatctattgtccactgacctctctatctatccatctattgttcactgacctctccttccatctatctgttgtccactgacctctccatctatccatctatcttgtccactgacgtctccatctatccacacatctgttgtccactgacgtctccatctgttcatctatctgttgtccactgacctctccacccatctgtctgttgtccactgacctctccatctttccgtctattgtccactgacctttccatctatccagctattgtccactgacctctccatctatccatccatctattgtccactgacgtctccatctgtccatctatctgttgtccactgacctgtccacccatctgtctgttgtccactgacctctccatctatccatccactgtccactgacctctccatctatccatccattgtccactgacctctccatctatccatccatctattgtccactgacgtctccatctgtccatctatctgttgtccactgacctgtccacccatctgtctgtagtccactgacctctccatctttccgtctgttgtccactgacctctccgtctatccatctatctattgtccactgacctctccatctatccatctattgtccactgacctctccatctatccatccatctattgtccactgacctctccatctatccatccactgtccactgacctctccatctatccatccatctattgtctactgacctctccatctatccatccatctattgtccactgacgtctccatctatccatctgtctgttgtccactgacctgtccacccatctgtctgttgtccactgacctctccatctttccgtctgttgtccactgacctctccgtctatccatctatctgttgtccactgacctctccatctatccatctattgtccactgacctctccatctatccatccatctattgtccactgacctctccatctgtccatccactgtccactgacctctccatctatccacctattgtccactgacctctccgtctatccatccatctattgtccactaacctctccatctatccatccatctattgtccactgacctctccatctatccatccattgtgcactgacctctccatctatccgtcttctatccaggcctccattcatcccccatctagtcatcctccatccatccaccagacatccactcctgcccctacccacccattcactagacaccaaaatccggtgacgaattatttgcagatggacccctggggacgtatgtcacgaatgtacatccccaggtcccatggtcagagtcggcaggtgtgagtggggcccaggaaactgcattttcagaagactctaaattagaatcagacatggctgctgtgtggattcacccttcaccgtcaccctgcagaggagcaaggtccacagggtcgctgtgttcccagtgcgttcctgaccacaccgtaacgccccttccttcctccctctctcaccagttgcttacatttcctcatcccggaagcatgacagcattaaagacgactcggaggtgagtgtgtggagcagctcgctgccatttccgacgtcctctggaaagtctgtgagcctgtctctggggtagtcacggaaatctagatgtgaaatagacatggtccggggtgttgctaactaatcttcacgggtgtggatgtctagaaggaagtccttattcttgggtcttacttcaggcatgtccttgatgaatacctgcaggcagctgtccccgcaggtggtctggggaccacaccctgcgggggaagccgtgccccacatcctctccattcaggtggtacagtggcccaggggctggcttttgagctgcaatttttatcaagttgtgtctgcaccatgccttccgaattgtgttgcctcatttggccatcctggcaaaccctctgaagccctttcatgtccttccccaacttgagccaagaggctcaactgagcctcacgtctgtggccagctctgcaccataaaccctgagaagggaacagaagagcttgctgcgttctcagcctctgctcgtaaaacccagggaaggactgcactagcgaagcccactcctttccagagcaccaacaagtgtcaccctcacaactcgtgctccttcctggccatcctgtgtctggagggaggccggggcacttagaaagcagaatctgaggctgagcacggcgactcacacctccaatcccagcattttgggaggctgcgcacatcgcttgagtccaggagctcgagaacagcctgggcagcatagcgagaccctgttcctacaaaaataaatacaaaataattagctgggcatggtggcacgggcctgtggtcctagctgcttgggaggctgaggtgggaggatcgcctgagcctgggaggtggaggctgcagtgagctgagatcgcaccactgcactccagcctgggcgacagaggaagagtctgtctcaaaaaaagcagaatccggctgggcgcggtggctcacgcctgtaatcccagcactttgggaagctgaggcgggcagatcacgaggtcaggagatggagaccatcctggctaacacggtgaaaccccgtctctactaaaaatacaaaaaaaaaaaaagctgggcgtggtggcgggcgcctgtagtcccagctactggggaggctgaggcaggagaatggcgtgaacccgggaggtggagcttgtagtgagtcgagatcgtgccactgcactccagcctgggcgacagagccagactccgtctcaaaaaaaaaaaaaaaaaaaaagcagaatccattttgccgcacagaacagcacctcccaaggaaccgcctcctccaccccgacctccttgccaggtgtagcttgcgggaggcagaggcttctgttcttcctcggagcgcctttctcctgggtatttctaataattatttctaataatgtgtgcctgccggtttgggagctcttggcaggcattagctgcattcgctttaccttccttcccctgagggagggcactgatcaggaaggatgggcccaggccctgggccacatgtccctgtggccacctcttcagccccactgatagggctgagggcctgggggtccctcccacctgcagctgtgaccagagccatggtctgtggaacgaacagcttctagctttctagcaccttcctcagaagcacacagccttaaattcttacctttcatgccccagtttagatgggagtttgggggtgggatatgtgggacgcagaactgagactcgaatcatgaggccctgggctctgaggagcaggtctctgttgggaccgcatgagtgatgcgtggtcctctgagtctcccgggaacccccctctcactttctggggtcttgttctccctccctaggaccttaagccagttatcgatgggatggatggaatcaaaatctctcaggggcttgggctgcaggactttgacctaatcagagtcatcgggcgcgggagctacgccaaggttctcctggtgcggttgaagaagaatgaccaaatttacgccatgaaagtggtgaagaaagagctggtgcatgatgacgaggtaggtgccgcttctcatggggcccgggggcccgggaacgcgctgccctggggcctcctccgggctttagcggaattaatccatgcacgagagacctagcctcacgttgacggagtttgtgcaaaatcaatagtcatgcatcgtgtaatgaccaggatgtgttctggaaagtgcctggttaggtaatggcactgttgtgtgaacatcacagtgtgcactccacaaacccaaacagcacagccaactccacagccaagatgcacagtgcagctcctgctcccaggctgcaagcccgtacggctgttagtgcactgcacactgcaggcagtgaggggaccaccacgagagcactcacgtgtctaagcttagaaaaggtgaagatgggtatcgtggtctctgcaaccttctcatgtatggccaaccactgatacgttgccttccagcagactgcggttgagttttaggatgtcatcacccttgttaggaaatctctggggttgagctgaactggacgggtgatggggtgggacaggaagctgcccagaggcactgccctgctccgtcctgcacaaggccccagctttgcagtacatgctgagctgccgtggctctgtgtagcagatcttcccacaccagctgtttctaggggagaagtttgttgattataggatcaatggtttatttgttgaaatctttttttttggaaacggtcttactctgtcacccagactggagtggcttgatcacagcccactatagcctcaaagtccccagctcaggtgatcctcccacttcagcctctggagtgttgggactacaggcatgagccaccacccccagctgtataatttttgtattttttgtagaggcagtgtctcattctgttacccaggctggagggcagagcatgatcacggttcacctcctgcagcctccacctcctcctgcagcctccacctcctgctaggctgaggtgatcctcttgcctcagcctccagaggaaccaggactacaggcatgcaccaccatgcccagctattttttgtgttttttgtagagacggggttccactatattgcccaggctggtctagaattcctgcgctcatgcactctgcccgcctcagcctgctagagtgctgggattacaggcatgagtcactatgcctggcctgtttgttgaaatcttaattctgacttcatagacctttttcttttaattaaagtaaaatacacatgacatagaatttgccattttaaagtgtacagttagggccgggcgcggtggctcacacctataatcccagcactttgggaggctgagacaggtggattacctgaggtcaggagttcaagaccagcctgaacaatatggtgaaaccccaactctactaaaaatacaaaaattagccaggtgtggtggcgcacacctctaatcccagctactcagaggctgagacaggagaatcgcttgaaccagggaggcggagattgcagtgagccgagatcacgctactgcactccagtctgggcgaccaaatgagactctgtctttaaaaaataataaaatatgcaaacaaagtgtacagttaggcggcttttagcatattgagatacagagttgagcagctatcacctctctgattccagaacattttcctcaccccaaaaggagaccccatacccactccctgcttctgctctgcgtcagccccatggcctccaatctgccttcttcctctgcggacttccgtcttctgcacgcttgacagaacggagttgtgtgtgagcttttggtgtctggcttctccagtgtccgtccatgtggccgctcgctcaggccttcctctctctgcctggccgggtaatgttccgttgtccagtggaggccccacgtttgtgcgtgcacctgccaaggggcattatagtgttcccacccttggctgttgtgagtggtgccactgtgaaggttcgcgtacaagaatctgtttgagtctatttccagttcttttgagtgcaaacctagcagtacagttgctgggtcacatggtagttctctgttcaactgatggggacctgccaggctgcttcccacgcagccgcgccgtttcacctccccgccaacaccacacgggcctgtttctgcaggtcctcagtgacgcgtgtgattgtgatgatcgctatcctggcaggtgtgcagtggtggctttgactcccatgtctctgatgactgacagtgttcagcatctttcatgcacctgttggcttctggtatttttggtcttttgctttcattcctgaatgcaggttgcgtctctcaggattagataaaaggccaacgtgtgggtggcagtaatgctgttgtcaccaagtgctgctagcacagaaggcaactggctgctcgtcgagccccgatgggccacagagggggtccctcctcgccagccatgctcggggctgggagggcagagctggggctggggctgagcctctactacctcccagcagggcgtgtctgtgcagtgcacaggctgtccaactggcccctcatccctgggtgcagaactcaaaagtgggtggcagcgtccatgccctgcgccgaggaacagaggccccaagaggtgtggtgccctgctgacagccccgctgctggccagcggcagcacaggaggattccagccccctttgcagcacgtcccggtcagctggaaagttaatgccacgtatgagagcaggtttgcgggaccctgagaaaagacatttggaagagtcgctgctgcggttttgttctgtcttgaaatcatcctctgtgggccgggatgccgaggtggggactctggggttgtctttcgagaagagcctgattgcaggagttgttgaatgcttggatggtttctagaaatttctttctccccacaaaaagactgcactctctggggccaggcttgcctcttgttcccccaggagtcactggcaagccccttcccaccgattctgcagcgccagccccacgcagggccttgaactcagcagtgctgtgtccaggaggttccactcagtttgggtgctgagtgatatgtgggtcatgatgccaacgccgacgtccctgcggggccacagtgggtgggtgctgctggtgagggccactgggggacgggtggtggcaggtgaggggtggaggagtcaccgccgacccactaggtcttcagccactggagatgggaggagatgcgggctggcgaggagctcggcttgtggcctggggtggcgtgagatacccgggtgcacatgttgagcagccgtcggggggcaggtctgcagctcagggagaggccgggctgggagctctcggcgtggaaagatgagactcgaagccactccattggatctgcctccgaagagaagggagggtggccgaggaccaagcctcgaggaggaggagggcgctgaggaggaatgacacagtctcagaggctaaatagatactcactaatggtttgttgatttgtttccacgaaacttccgggagtgggggcaggcaacacagtaagaccctgcctctacaaaaaataaaattgccaagtgtggcatgtatctgtagtcccagctcctctggaggctgaggtgggaggatcgctggagctccagaggtcgaggctgcagtgagcagtaatcgcacccctgtgatccagcctattttgacgcatttctttcactgtcatttttctaaccccgaagacaaggggttgacctaggaaggcttgagaacttcgtccagctctactttctggggtcaagatgagaccaagctgttggatctttgtcactctaaagttgactttgaccttgcagcattttgctgaactgcagcatgaattgggagggtgacagtcctatggctgaagctagtgctctggtgatgggtgtgggcttatcactcggtagcgctgggaccttggggaatctgcttagccctccacctcaatttccttgtgtcctaactggagataataatacctgcctcctggaactgttagggcaaagcctggaggccagaggccagtataccaccagaggccagcatacaaccagagctggtagctttggtgatcgtggtgaagatgatggtgatgatgatggtgacaatgatggtgacgatgatggtgatgatggtgatgatggtgaggtagtggtgatgacgtggtggtggtgatgaagatgttgatgatggcggtgatgatggtgatggcgatgactgtgatggtggtggtagtgatgacattgaggatgacggtggtggtgatgatgatggtagtggtgatgacaatggtggtgatgacagtgatgatggtagtggtgatgacaatggtggtgatgacggtgatgatggtgatgacagtggtgatgatggagatggtgatgacggtgatgatggcagtggtgatgacagtgacggttgtgatggtgatgatggtggtggtgatggtgatgatgacggtggtgatgaaggtgatggtaacagcgacagtgatggtggtgggggtagatggtgccaatggtgatggtggtggtggtgatggtgatgacagtgatgatgcagatggtgatgacggtggtggtgatgatgacagtgacggtgatgatgacagtggtggtgaaggtgatggtgacagcaacaatgatggtggtgggtggaggtgggagggatggtgacaatgatgacggtaatggtgacagtgacgatgatagtggggggtgggggtagggtgtatggtgacagtggtgtgacggtggtgatgatgacagtgacaatgatgatgatggtggtggtggtggtagaggtggggtggatggtgacaatggtggtaatgcagttcctaatgggtgttttcttttcctgtctgcattgtcttcctgaaagcggaggaaagagactcctcccttgcctcccccttgcccaggatgcctgtgaggagcattcgggagcctcattaccactccctggtttctatttcaggatattgactgggtacagacagagaagcacgtgtttgagcaggcatccagcaaccccttcctggtcggattacactcctgcttccagacgacaagtcggtaagaaaaagaagggtatttctgatattctgcagatttcagatgtgaactgcacagaagctaagtctggtgtgatgtgtcaactgtcacctgtaaggttctcccagttgctgtacgggtgttttcaggccagcagactctctttgttgttctccttggttggtgtcatattaagtacatttcatgatctgaagttatttaattccatttacgaaatacttactggaggtatcccactgagtgcaggcattgggtcaggtgctggggctacaaaagtaagcaaaagaggtggatttctgtgcttattaaaatatgtacagcttcaccttcaagctttatatatactggaattctgtggctttgaatacatttgaaagctgatgatctaggatattaaatgtatgccctgtttaaaattttgggggccagttgactttgacctacctgatttgtttatttgaagagttattaagtatgttctgcattgagtcctcaagaccatccccaggttcgatgattggctaggaggactgctgggatcaatcatggccgcactgggggccacagctggcatactgcactggggagataaaggagacttggccaaggaaaaaggcacatggggaaaattccagaagaaaccagtcacaagctcccaagagccctctcccagttcctccagcaatgaattgtgacaactcatggtttttgtcaagggctggtcatgcaggctgcacacgaaccaaaattccagactcccagtggagagcaggtgttcagcattgcgttagtcagggttctcctgagaaacagaaccagttgtgtgcacgtgtgtgtgtgtgtgtaaagagatttattataagatactggttcatgggattatggaggctgagaaatcctataatccgccatctgcaggctggaggcccaggagagccagtggcacagcttgaaggcctgagagccaggagctgatggggtcgcttccagtccgggtctgaaggcctcagagctaggagcaagggggccagaaggtggatagctcggtagtcagggaaacgcagccttcctcctccttcttgttctcttcacgtccccaggggcctggatgatgccagtctacttcagggagggccgtctgcttactcttccagaagccccctcaacaggcatgcccggaagtcatgtacagccagctactagggcgtcccgtgcccagtcaaggtgaccgttgaattcaccatcacgagcataaggcatcctgttcaggcacacacagtttgggcacagcaagcagctcttattccaaagctttttttttttaatgtgcttttcttgtttttgagatggagtctcgctctatcacccaggctggagtgcagtggcaacatcttggctcactgcagtcaccacctcctgggttcaagcaattctcctgcctcagcctcctgagtagctgggattacaagcacctgccaccacacctggctaatttttgtatttttagtactctgtgttggccaggcgggtctcgaactcctgacctcaagccatctgccctctgcagcctcccaaagtgttgggattacaggcatgagtgactgagccccgcctccagagtttttttttttttttttttaaataaagatagggtcttgctctgtcgccccaggctggtctcaaactcctgggctcctgcctcagcctcccaaagtgctgggattacaggtgtccaccactctgcctggcggtcatgcagaagcatgttatatccgtgtagggaactgtttgcagttcacgttcccagccccagctccgggccagctttgcgggccaggcttcctaagcacagcggtcctaggccctgggtgcaaccctctgctgctcggttcttagctgtacatctggcgacttgctctcctccgctgcactcttggctctcctgaccgcagggtcctgctcttgcctgtgcttggcagccacctctgtctgtcggaagagccggcgtgacccggccgttccccgacctgctctacgtgcggtgccgtcctggtcaagggttcctgttttctggctgcttacgcctcctaagtgtgtttcagggtcccccaccctccccacctgaccccagggctccccagtgttggcttccccatgttgggcctgagccatatttgagaaacacagatctgaagtctttttcctgcctcaaagctcctctgattcctcctccccagttgcttctggggtaaattccaagcttcctgtgcgtgtggacgaggcttgtggtgaccaggccccagtgccccatcgtgtgcttcagcgtggcgccctcgcccgcaccgcctgcgcctgacggctctgtcccctttccttctgctcccctgcttcccggagtgagtcaatgcctccctttgtgcattcccattgcgcttttccaggcctctttccgccctgactgccatcccttgcgatttgggaatacgcccaggggaaggcagcccggccccccacacttcctaaatggtgaggttccaagaagggttttgttttgctttggttcttcttcatatgtgaacttgtagggatgtagatgtataaggggtccgatatcccaccctcacttcccctgagtggcccaaagctcagccccttctgcacttgtgtctttggactcttctgtcaagtcacaagttcccagatgcgtaaacctgaacttaaagaattgtcgtctgtggggtgtctgtgggatccccgcagcggcaccaatcactgtcctgtgggagcattcggcattcacagttgggaataattcctatgcatgtctgatttttttgccttttttttttttgagacggagtcttgctctgtcacccaggctggagtgcagtggcacgatctcggctcactgcaacttccacctccctggttcacgccattctcctgcctcagcctcctgagtagctgggactacaggcgcctgccactacacctggctaattttttgtatttttagtagaaacggggtgagctccgggttggggggaggaccggcagctgccttagtccaatagctggggggctgtgaaaactgcccacaaattcttactgaccacacagcaccagacacccacgtgaagcaaagccaacatcggcaaggcggccacgcgtccgggtggcggaaaagtctggcctggcccaggtgggtgtgctcggctgtgccgcctctgctccctggtcactggaggtgactgcaggctttatgaggacttcctctttgtgcgttggttctgctggaacatccagctgaggttttgcgtgggccccttgctgagggccaggtgaataacacgcagaacaggacactccttcgctctgggcggcctcacagctcccgggccatatccagggggaacctggccgatgaaactgcagaggtttccacacaagtttggttcccataaagggtctgtgagtggggaagaatcagaattgctttctttccaccccaaatctggtcttgcctcttctggccggccatgttcgtgtccactgggcggctacagggaattcctgaatgttacagttcaacattagtctcacctcgtgtgtccagatggagagaaacaattcattcgcagttttaagacacaataagcacctgctttatggacaaaccataccccatatctacacagacagcccaccttttccagacagcagccaaaattgaaatgagccataaagtctccaaaacgagaaatcgcttcagtttaagctatttcaggaaaaccaggtaactagagatttagctgaaatgactactttcagcgtcccccgccccattcaactggagtcggaggacactttctcactaaggcacggtgatctcagatggtaggtgagcaaactacccttaaaatacgcccattcactcgctgttctaaaataaaatctcttactgtttgccacggttgattattttacattcattcacactcaatgtttctttaaaaagaacaaacacacacctttgcttatctgtggaagcgcttctcaggccgtgcactgactgagacacttgagtaagctcttcttggtcaaactgacttctagacatgaaaagcacttcacccagcagtgtgcgtgtgtgtgtgtgtgtgtgtgtgtgtgtgtgtgtcagttatgctttgaaacctgcccgaagctctggagagggagacagctttactaacagcagagagtgacgtccctggaactggtcaccagcgtcaggaggcgtggcacccggggagggtccgcagggagcagagtgggactccgtggagaggggggcaggcaagggttgggtcacgtaggaggggctcatgggggacaggcctgtgggaaggacgagggcaatggtgtgtgtcagggacagaagagaaccaggcctgaaggtgccaggggctttcgaagctggacttggccaagaggccctgggatgcggaggccccagggattctcagtgcagtgctggtgttgggcaggcactcgtgtgaggagtaggatctgggccgcagaagccagagggacctgctgggcctgtcatggcctggagggaagccttagggggtggggaggaggggcctgtccccatgtgggggagtcaccccggttcgcagaagtcagggcagtgctggccagacaggcacagagcggagccagcctggacgtggaggactcgggggtgctgtggcctgggatggagacgccccgccccgccgggggtgattgtggttgtgggtgtgtgagaaagaggtgagggtgtgacggggtctgaccctggggtgctgcctcctcagggctgcaggaggaggcgccgccgtcggggtggaggcagtagagggaagggctcagtgggtgccacagcaaggacagcctcggccgcgaccttgggaagggcaggtgcctcttcttggggaacatgagtcacctccctttcaaaacccatccgtgtgctggagtcatgggagctcagaacagaaggagagatcctgactgacacccgtagggcccagcgtgggcgcagccgcctcagcctttgttctgccgacacacggtgacggctcagcggccccctgatttgctcacttttcatcggggttgcctaaaatggtaaaagtgccaccctaaaccctagcacttccggagcaggacgcttgggcctgtggcccccacaaggctgtgcacgggagaaggggctcttcccagcatcaggggcctggcaggagccaggggcttggtttgccttttgcattgcgagggcgtcctgcactcttcgggaacactgcggacagctgcgcatgcatcctcccagagccctgggcagtgaggggccctcggggacccccaggacatgggctttgggacacacctgcagtgtacagggggccctgctgtttcctgatgtggtgtcacaggccacacaggactgtgcagaacacgggagaaagggatgcgttgtctgtagttctaatcgggaggcactggccgctcttagaacaggtcagggggcaggtgtcattgccattcggggtcacgttaggaccgggggacctccactgcaggcttggagatgattttgctagtagtgagcagagatgaggtcatggcatctccccttctccatccagacccgaacgtcccatgccactgcgccctgcatggttcccaggatgagcagggataggggtggcagccctggagccacctggagtctccttagttgaaggaactttcaggaccggtcctgaaattgtgcctttgctgcttaactactagataacgacagagaccacataaaacaagagcctctttataaacttgtatcccattttaacgtgcaggaaagaaccttcgtccgcactccaaagacccttgactaaccagcgtcaccatccagacagttttgcctcgtttttccttttctcttgtttatttttccatgtggactttataatcaacccgtctgcctccagaaagaaaaagaaactgggattttcttttcttttctttgagaaggggtcttgctctgtcacccaggccggagtgcagtggcgcaatcttggctcactgcaacctccgccccctgggttcgaggaattctcatgcctcaaccccccgagtagctgggaatacaggcccctgccaccacacccagctaatctttgtagttttagtagagacggggtttcaccctgttggccaggctggtctcaaactcccaacctcaagtgatccacctgcctgggcctcccaaagtgctgggattacaggtgtaagccactgggcctggcccgaaactggcattttcattgggatttgttaagttcacacattacctggggcgaaattgacatccttctaagtgttggatcttcccattcaggaacccggtttaccttttcattcactcacatcctctttcaggagactcttgaagtcttcatgtggttttcttcacttccttgtctaattattattattattatttttacagatgggggtcttgctatgttgcccaatctggtctcaaactcctgggctcaaacgattctcccacctcagcttcccagagtgctggcatttcaggcgtgagccacggtgcctggccacttccttgtttaattttgtcttgagtgtttcatctcgtttctgttataaacgaggtattttttcttctctcagagcatccagcagcaggcagcttggtctctgcgtggtaactgtgggccccatggcttctgagttctcttccttgtagtaactttcatggcttctgagttctcttccttgtagtaactttcatggcttctgagttcttccttgtagtaactttcaggtggttttctggggctttggatgcacagggttagcatctgcaggtggggcagcatcacccacctcagccgctgcaaccaggtcgtgccgtctctgttcatcttcctctctggtgacagtggccagcacctgcctcactggggtgacgttgacactggacggccctgtcctattcctgaccccagctggaacactttgcaccggaagcgcagtgccatcctcaaggcagaacggaagcatttacccatctcgggcaggcagcatttgccctggcatgtgcaaagggtgttgggagggccacaggggagaggagagacaggggctctgcctgcagccgtggaactgggttctggagcccacagaggagctgtccctgcctgagctgttggagacgggaacggaccctcccagttcctgggcccatcatctggtctctgaggacacctgctggcaaaggccctggcaatgatacatacagcctctcagcccccagccactgggagaaggttctagaaaggctgagcagcagcgtgaagctgagagaagatgaccgataactgcatgcagaggtgtgacttgtcctattaagggactttccacccatttctgttttgctatcaagaaaaaacactgaggccgggtgcggtggctcacgcctgtaatcccagcactctgggaggccgaggcgggtagatcacgaggtcaggagatcaagaccatcctcgctaacacagtgaagccccgtctctactaaaaatacaaaaaaaaaaaaaaattagccaggtgtggtggtgggtgcctgtagtctcagctacttgggaggctgaggcaggagaatggcgtgaacccgggaggcggagcttgcagtgaacggagattgcaccactgcactccaacctgggcgagagagcgagactccatctcaaaaaaaagaaaaaaaaaagaagaacactgcaagttgtgcaggggcctccttgccatttgtggagatcattgttacgatttttactccttagggcctcctggaatgaatggtgtcatcgtaatgtagctgctggtattgaaccatccttagattcctggggaaaaccgtgccctgtcttagtgtgctactctgttaatgtgcttctgaattcaatttgctgatattttatttaggattttttttggttgatattcatattgttttagtttagaatcttcaggacacagagctactgctccagtgatcaagggagacacaggatggaaacacaccttttgtcacccacaggccttgggggtacacaacctgctgggaggccagggagcgtaaagagagacagggaccctttattgggtccagggtgttctgcacacaggtttcccatgggaagttttaactgatggacttaaagcaagcaggcctgagctccgtggggccacactgtgactgtcgggggactctgcagtgtggctgcacagtccatgttgggtgtggtatcagtggggctgcagggaagtcaccagggggcagttgcatagggtgggtgtctggatgggccagctcgaggaatgggggatgtggaactggaaactgtcagggcgacagccctgcttctggtgggagaaagtccagcttagatccagaatggatgccgaggcagcctaaaaccatgagcgttccctgcacactctggcgtctgatctctagcttccctttcttgtgcaagcttcattggatttttaaattttcctaatttttcaattcccgggaacattctaaattgcgttattacctcttggcgggatccctgtgcgattgccgggccttgggtgtcgtggagggcagctgcctcgctccgccctggctttcgtgatgttgtgagctttaccctgccgaggctgggtgttctcacccagtcccacggctgcaccctgccttgccttctcctctgctcaacttcaccccaggccgtgtctcctggctccaggaaggtgaggggctgcctcccatgcgtcctttcatgttgaggacacccgtgtttgcctttgcacgtgagccccattgtcgctgggacacactgccctccagtgctcgagtgcatttcctgggcactttctggccttttatctttgatggagaaatccgaggcctgccagcatccccaccagtagatttctttggacgaagtaaaatccttctgtggattcagctttaccgcctttcctcatctgctggtgtcttcctcagagctttaatgtccgtcctgctctccgagtcaggaatctgattttccagcgtgccctgtaatgacggtgctgtcaccgctgtgatgtccgctgtgaggtggggacaggacctggaagtggggtttccaagtgagggttctgggcccgcccgagtcatctgatgttgggtctgacaagccaggagctgtgtgagccggagaacgtcccctaacctgtctgtgcctcggcttccccatctgtaaaatggcgagagctgaacttacttcctggtgatggggtcaagtgcgttaacacagagggacttggagactgacgcttactgagggccacaccagcggtcagcaaaggttgtcttaaagggtcaggcagtaaatatttccacctttgtgggccatgcggcctctgtggcaactatgcgttctaaaacagaagcagccttagacactgcgtgaagggacgcgtgtggccgtgttccaccagaactttctgtacacacatggtggtggcccgcccggacccatctggttaattcttgactctcagggcagcgtctcctgtgcctccaggagagggctgtggttcctccctctgagccgggcaccttgcattcctggaaggggtggggggagtggcgaggagggggcggcaccaaggacagggcccacctcctaggaggttttgtgagcttccctcagcccccggccgccccctaggaggtttcgtgagcttccagcatccccctgcggccactgtccctccatttcccatgtctgttggatggtgccggttccagggcagggtcagggactggatccggctgcggtctgcgtctcgcctggttcctgagagctgcactttgtctttggttgttgatgaatccatttttgctggcgttcttcacgtttgtgtatttgattaagtatcatggacaggcatgtgcagtggctcacacctgtaatcccagccctttgggaggctgaggccggaggatcacttgaggccaggggttcaagaccagcctgggaaatatctcgagaccctttctctacaaaaaatttaaaaattagctggcggtggtggtgcaagcatgtggtcccagctcctcgggaggctgaagccggaggattgcctgagcctgggaggtcgaggctgcagtgagccatgatcacaccactgcactccagcctgagtgacagagtgagatcttgtctcagaaaaacagccccgagggcacgtgtctcatgactcccgcctcccgcctcccatctgggctctgcttgctcctctccccttgcaaacatgagaggagcgttaatgccaggacagggagcagggaggggcatccccagcgcctccaggccacaacatggcgagtgtggctaccaggacacggaggggcagcctcagccccctcccccaggccacgacatggcgagtgtggctaccaggacacggaggggcagcctcagccccccccaggccacgacatggcgagtgtggctaccaggacatggaggggcaccttcagccccccacccccacccccaggctgtgcttcccagcatcccttggggtcaggactgtgtgtgtcactgaggggctacgggtgaagccacacacgcccctggcctggccttgcgcccctgcctgagagcctctatgcaggacagcgcctgtggggcacccaagtgggccgagcccatgtggattacaggtgcacaccaccagcgtgaggagaggagtgggctcggagcatgctcagccatggtcccaggcatcttgtcagcagccagctcagcttgtgtcacgcagagtcgccttagagtgaattgacaccagattgtcctggtgggtttttgctctgaagaaatgtcaaaagtagcattaaggtttttctgtagacaaaaaaaccccaccatcattgcagcttgagcagttgcaaattaaataaattccttcctcagcaagctgcctgggtcctaggccttgggcagagagaactggctttcagcacagttcccgtgattggcttttctctggagaagaaggggaagcggcctccgcctctacctctctaagtgtttaaatgtcccccaaattctctcagcctcctgaggcattgtattgatgcttttctctagaattcatgtatttctttattttctctggaaatggcattggctttgtccccgtcctatgggccgtgatagcttaaagttaggatgaacccacagaggccgtggaggcccttcccaggcgccgcagcagcactgttggggtgaacgtggctcctctcggggggacaggtggaagggaccagcacccattggggcgtgtaactcctggtggcaaaaaatgtgcggtgaagtcaccctaagggtttttgtggttttttgtatttttattttattctttgagacagagtcttgctctgtcgcccaggctggagtgcagtggcgcaatctcagctcactgcagcctgtgcctcctgggttcaggcgattctcctgccctcagcctcccgagtagctgagattacaggtgcacaccaccagccctgggtcatttttgtatctttagtagagatgaggtttcaccatgttggccaggatggtctcgaactcctgacctcaggtgatctgcttgccttggcctcccagaatgctgggattacaggcctcgtgagccaccacgcccaggcactctaagggttttgaataaattctttcttaacgttttctgaccgactcttaggtcgtgggtgtcctccaggggttggaggccttcatggagcttcgttccgtggggttgacgttactgaacgagtccctccacgggtgcactgaggacgttcctgcacatcgagggcaccctcagagctgctctttctgtcattgctattttgtttataccggggattggcaaactttttcttgaagggcccaagagtagacatttttggctttgcggccacagggtctctgttagcaactccctctgccacggtggctggaaagcagacatagaaaatagatgcaccagtgagcatagcctcgttccaataaaactttatttacaaaacagggagcagtggaccagcgagtccccaaggacaagggccaggttaccagagaatttccaggcacatccgttggaggcaggggagacaacaaaagccgaggaacgagccttccccagccgctccccaaaggcacggcttattcttcagggtgcccgactggccacgtggacgtctctccagctcctcacttggggcccagggctctttcgatttttaggagtttgtttccaatcagaaacttcacagatgatttgcagccagttcacctgccctgtgtaaactggcctctgtcctctctggcttaattctgggagcttgtggagggcaggagcagggacaggtgccttgaggcgtaacagtggcggtggtgtgggagcttgcgtgggatcgaaggaaacgggcagagtcaccacacgcttccctccttcactccccgctccacgaggggcagccaggagcagccaccagtcggaagcaaataaacaattcaggtgccagaggagccgctgacctaaaaaaacccgccacagggtatttctgggagattgtatgagaatttaattttgaaaattgagtctcatgaaatgtaggaaaagatcttattaggaagagaaaccatgtggcccagtccctgagacgggaagggcctgcgtggtcctgatgacatctgcggatcttttaaaatcatacgatcatgtctgcgaaaccgggatgccacttcccacctggcttctccctgaccccagcttgttcccttggagggccggtggactcctcagccttgcagcaatgaaatcaggccttgaggccaccccacccgtgacctgcggtgctgtccccatgcaagaaactgcctcgctccagcccccagcagatcctgtcccagcccccagccctggtccaagccacctccactcccacctggtgacgggccacctccttcattccggggcccacccacacttcccaagtccacacacagtggccaagagtgaaggccggcgaggcccccgcatgactccctcacctgcacccttcacgagcggccccgcagcccgtccccaccagcccctctctgctgccagggtgctcctgctgctctttgctctttgcaagactgaacctgcgggagggttcgggcccacgaaggccgcttctgtggggcttctgtctaaggaggccgccgtctgccgaggtgactgcagcctccggcgcctctctccctgcaggttgttcctggtcattgagtacgtcaacggcggggacctgatgttccacatgcagaggcagaggaagctccctgaggagcacgccaggtgggtgcgcgtggacggggccgggtgggtgcgcccggagttggggatgggtgggtgcgtgcggtgttggggggctgggtgggtgcgcacagagggatgacgggtgggtgcgcgcggagttggggggccgggtgggtgtgcgcagaggggaggtggctgggtggggtgtgcacggagggggtatgacgggggcggggggggcggggtgcacgtggagggggccggggaccttctccaggggtcagcagggagctcaagggagggaagtccaggtaggatggcagagggcatcatgtcccccacagtgtgacgtcccctgcattgtgacacattccatatttgctccagagtcacaacatttgggaggtctcctgagttatggtgcctcagaccagtcccccaggccccacccctgaagcagcaccatgcctcatccgagagaagtgagagtctcctgggattgtgctgtcttcatggtggctctgccctggttctgctcttcaccctgttagtggcacagcatggccagcatttcctcagcgttaggagcagaacgagagtggtctgtttctagagtgacctgagagactccttcctgcccttccctttcatctctgatatcttcgggcctcccctggcagccgaggggcctccagcatggttcaggagcctcccccggcagccgcgggacctccaggaccgtttgggggcttatttcagctccctggacctttcctgtcttttgtagtttctccttttcctcatttccttacttaagaacgttgcatgcagttttgtgagtcaccttagattgtttctggcaataggacagtaggcaataaatctagaacagtacacttcccacaacgctgtttttaaaaactgtggcaacacacaacataaaaggtagcattttggggcatggaattcagtggcgttgaatgcaccccatgctttgcagccactgctggcccccgtctcatctccagagcacgcccctcttccctgctgaagcttggcccatcagacactccctccctgtcccccgccccagcctcacatcctcaccccagacgggcacgtcccactttctgtccctctgattcgaggactctagggacctcatcggagtggaatcacagtgttggtccttcggtggctcattttcctgagcatagcgtcctcaagattcatccgtgctgtggcctgtctcagaattgccttcctttttcaggctggataatgccccgttggatggaggggccacactttgcttatccgtccatccctcggggggcacttgagtggcatccacatgttggccatggtgaacagtgctgctgtgaacatgggtgtgaagtaatctcttgaacaccctgcttccggttctttggggtatacacccagaaactgaattgctaaccacataagaattccatatttaggccgggcgtggtggctcacgcctgtaatcccagcactttgagaggccaaggcgggcggatcacgaggtcaggagatcgagaccatcctggctaacacggtgaaataacacagtgaaaccctgtctctactaaaaatacaaaaaattatccaggtgtggtggcgggcgcctgtagtcctagctactcgggaggctgaggcaggagaatggcgtgaacctgtgggcagagcttacagtgagccaagatcgcgccattgcactccagcctgggtgacagagtgaaactctgtctcaaaaaaaaaaaaaaaaaggtcatatttaatttttttttttttttgatggagtctcgctctgtcacccaggctggaatgcagtggtgggatctcagctcactgcagcctctgcctcccaggttcaagtgattctcctgcctcagcccccagagtagctgggactacaggtgtgcgccaccatacccggctaatttttttgtatttttagtagagacggagtttcgccatgttgcccaggctggtcttgaattcctgacctcaggtgatctgcctgcctcgacctcccgaagtgctgggattacaggtgtgagccaccaagcctggcaccgtgtttaattttcgaggacctgccggactgtcttccgcagcagcggcgctgttctgcactcctaccacaacgtgccatggctccggtctttcccgcatggaagctgtcgtgttatttgcccgctcctccccttgtggaggctgccacatcgttctctgtgtctttgacagcaggccatcctaaggcgcatggggtggtgtcctggagctttcattggcatttccctccctggccctgtgcactgcactttcaaatcctgggcctggtcattgagaggatgccgggcccgtggtggggcaaacgggagtgtgtggcccccaggctggagctgttggcgcagcctctggcacaggcactgcccccatgacggcatccccacccccaggttctacgcggccgagatctgcatcgccctcaacttcctgcacgagagggggatcatctacagggacctgaagctggacaacgtcctcctggatgcggacgggcacatcaagctcacagactacggcatgtgcaaggtgcgtgccttggaccgcctcccctgaccatcccgcatgtgcgtctcggggcgcctgtcccgcggggtagtgtctacaagaaccctctcccagtaactttgcccccacaggaaggcctgggccctggtgacacaacgagcactttctgcggaaccccgaattacatcgcccccgaaatcctgcggggagaggagtacggtgagtgccgctgccctggcccctctcggagcacacagggccagagatggcttcgggcctggcccagcagccagggagaggtgtccttgaccatcttacacccaaaagccacacactgtctttcccagccggatgtcatcatctggcctcagccccttatttgaattctggaaaacctcccatgtccacttgagcagctccttggggagggcactgcacaggattcctcctgccagggagccccggggcacagggaggggaaagacacagaaagcgggggtgggacagggtgcagcacctgagtccccgtgctgcacgagtggctgggggagaagctgttgtctggggagccccagggggtgcaggagcgtgtggacaggaccccacaggccctgcggctgaggacgccgtgcacaccagagtgtttctgctcctctcccctctctgggcgtgaaacggggacatgggcacgcgtgtgcagccgtgtgtgcgtgtgtgaaacggggacgtgggcacgcgtgtgcagccgtgtgtgcgtgtgtgaaacggggatgtgggcacgcgtgtgcagccgtgtgtgcgtgtgtgaaacggggacgtgggcacgcgtgtgcagccctgtgtgcgtgtgtgccgttgggctgagtgttcgtgtgtcgggcatccatgtgtgttgtgtgcacatgcatactgtgtttgtacacactccacccacttctgcatcctggtgttttcaatgaggcatgcatggtgtgccttcagacatttttacacattttttttgccatcagaatgggtgtggggcaggcagggcgggcaggtcactcgccgctgggataactgggctccccagcggccacaatggaagtctcagtagccagagaaggacagacagcagattggaggactggaatatagtctagaacccagcttgggatggggattccgtgtgggacagcggcagcgtctcacctcagcagggaccagggggacttccggggacgcagagacagctgctgtccttgggcaaaacgggtcagggtctcccacccctcattcgctggaacacattcccaacaggttgactacttgaacctttttaaaaaacaaaatggctgtagaaggaaacacaggagagtatttccgttactgcagcgaaagggcttcttcaagcttagttctgtagaagcagaaacgagagaggagggtcgtccgcaggttccaccagtgcctcgtgccggtgtggtcacaggtgccctggcaggaccgacagcccagaggcagcctgggagacctccgtagtgtcagggacggtggcagggaggccgagctgccaggtggaggtgctggttctgtttgggaagtggaagtcacagaggcctgtgtgccgcctgctcaagcctggctcacactcgtgtcaactgggcatgaaaaccaacgccagccaggttcgtcctgctgccggcccatgtggccccactcggtgatggctgtgtgctctcccccagggttcagcgtggactggtgggcgctgggagtcctcatgtttgagatgatggccgggcgctccccgttcgacatcatcaccgacaacccggacatgaacacagaggactaccttttccaaggtgcgtgccccgctgtgcgttcgtacccctcacctgcacgactgtcttccttccttttcaaaggtgcaggtggaggggtcccgcgggtgcctggagcggcagtgccatgcaaagcgtaccgggaaccattcctcctggccagaccctgtgtcacatgccactccccgggccgtggggtggggttaccacacctgtgggtcagcaggaaagagaacctgtccccattcagctccaactccctcctgccctggccagcagcacatgctggagccccagcatgtccttgaccgaggctgtaccgagctgaaagcacagcccccacccccaaaacccacagccaccatcatgggctccttcccacctggaggccccgggacctgctcctggtctggaattcagtgctgtggggatgtgggatctgggaacgcggctgtctccgcggtgccctctggtggccagcctgcagaggcacccgtgtacctgcgatcttggggctgaggaaggggagctgctggttcacgtccgatcctacgacacgtgccagcgcatgtaaccaggaggcccagggaggacccggcgggactccgggttatagatattgctgggctgtaggaagggaggggctccggggccccaaggctgagctcccaaagctcttgctcagagtcagagtctgggcggcactgggcaaatggcacacaacacaggcaagtcctcaccaggctccgcccttgcagtgatcctggagaagcccatccggatcccccggttcctgtccgtcaaagcctcccatgttttaaaaggatttttaaataaggtacgtttctggccatgctgacaaaatctcgtttgtggcctcggtgttggtgggcagagggccaggcacggctgttggccattttttcatgtcggctgctgtgtatcgggtgtgtgggttgattttccgcttcagtatttgagctctgtgttctgtgaatcgtccgtttttactcacacctaacaaaatgagaatgtgtgcccaaggaaaatggaacggagcttaacgtacggggaaggaactttcaataaaggaaacatctgatttccaccacctgggtcagagcatcgggggagggcttgtcagcactgggagtggccaccaaggagagggggtcatggggcttccgggatggggctgacttgtccttgtttgaactctgacctccaggaccccaaagagaggctcggctgccggccacagactggattttctgacatcaagtcccacgcgttcttccgcagcatagactgggacttggtaaagcatcacaaagcctatttgcacccccatccccatcccaaccccaaatctacccaacccccatcccaaccccaaccccaatattcacccaacccccaccccaccccatccgaaccccaatatccatcccaaccccaaattcatccaaccctcaccccaccaccaacccaacccccagcccaactcccaccccaacccccaactcaacccccaccccaatatccacccaaccccactccaacccctacacccccaacccctccaacccctataatctggtggacagagccggggctgtgtgggccgggtgggctgtgtgagctcgcgcaccgccgggctggtctttgacatggccccacttgcgtggagccaaggctcctgtctcccagaagggtcagctgggaatgggggaccaccctccagggccccgaggagggatggggagacacatttcgtcctccggagccaggagagtgaggggccggacgagctcggcccatggcgcttcctggcaaccctcgactgtgctggcttggtgccgccaggagctagcggcacatgcgtcctgacctgtgagcacattggctgttggttccacagggatctgatagtgggggccggcctagagaagggcgtttgctttggtttcatggccggttttatcagcagttactggacaggaccagcagtcgcagcgttcacggcttgagctttagcgtcgggtattgaaggagagtgagtctgtggacagggtgcgacgtacactggctcgatttaggaatctgatttcggtggtgtgtgagcagggtgcattcggtagaaactactttgagttttgaccgttccccagctggccgtatgaggtcagtactctcctgtgatgaggggcggtgactgcagccccagcgggccacgtgatcaggagggggccgaatgtcccgaggggctctgcgtgcagggggttttgccggactgtaggctggcgtgtgtctgtcaggttaaggcaggtaaggctgcgccgcttggtcgtgggttctgtgtggaagtgcagtctccacccaggatgtttccagcgccgctcggtcgtgggttctgtgtgggaagcgcagtctccacctaggatgtttccagcacatggagggtttattgggaggtgaccttgtctgaagctgaggagcgtctgtggaatttgtttccagctgtgtaaatggttgcagagctactgaaataaaacctttaaaatacactctcaaggaaaaaagcagattggatagctcgttcagtgcattttggaggaggttgaactgaatcaggagaaagcccagctctagctctgtcctccaccccacccaacttttccaggcagcctcggccagcgtgggaggtcactccctggcccctgtggtcagtgggggcccttgtccacacagcccaacaagtcactttctagtcgaaggccttgctttgcctgtgcatgtgtgggaccgtgggggaaggtggggagtgaagtggtcagaacgtgcccacaccccttcctacatacagcccttccagagcccagctgggctgctgccaaactaggacggggccattctctgtcgtgcggttgtcagatgcacacacttagaaatgttctgagcataggcacctgccacggaatcaccttcgcaaattcttcatttaaatttatgcctctggtagcataagggagaagagatctgcctttggttctaactgtcagtcatcctcacgcccaggccggggttagaggtggcgtcccttttctctggctcaggcacccctggcctagtggggttactggtggcgttcccctatctcaggccacacctggcctagctggtgttagtggtggcatccccttgtctctggcccacagaacccctccggtccacacacacactcaggtccaggtaccacccggctgaacccgtagcaggtgcttagtagaattacgtgaggagccagcatccccgctcccagccacctcccctcgcccgtctcagctcagtctcccccgtgcctttcccaccctctctcttccaagcccaccaccgtatggggcccaccagcaccatgggatccagggagagcccgatcctgggtgcagccttggtgccagccgggcccctgatcttgtctctcaaccactcttggtttaccgggagtggacagatgaggacagatggctgcctgtggagtgacgggctccttctcttcggagcactgtctaatctgagtgtgagtccaaccctgcccgagccggaactcaaggagaccatgaagccacccttggcctctagctgggagaggtctgcgtccctgcagcgagcacgccaggtgatctctggcacacacttgccgcgggctgtctctcggaaggtagtcagcggccctggcttcccacctgggtcccaccactgcagaatcacccccgtggctgcccacaggggcggcttccatcaccctgcttcttcctggctgctgcgggctgtgttgtgacttccatcccagcctgagaggcctgcgaagggcttgccaccgactgccagccctgcctctgccaccgaccgccggccctgcctctgccaccgaccgccgaccctgcctctgccgtttccttgccacccatcagctcttgaggcttttaggaagaagtgtggctgttttggccagattgctttagctgtcctcagcagggttggtgtggggtcaccaccacccccatgtgaccttggcagaaggaaggtcctcctcccattcacccaacgcctgcaactcagtggttctgagcaatcccagagttacatgacgtcatcgcgatcactttcatcaccctgtacccagagaagacccgaacccactccagcctctccccacaccctgcagtggctgctccgccaggctgtgtggctctgcctggtctgcacatgtcatggaagtggacctgggcacaccgcggcctttcgtgcctgccctcccctcagcattgtctccacaagctgcacccacacagtagcacgtggcactgcctccttcctgcgctgaaccccacccactgcgtccactgcgtggagactgcacctctgcatccgtcctcagtggacatagggtggcctccactttctggccattgtgaattgtgctgccgtgaacacctgtgaacccgcttctgggtggactcgtgctgctgtgagcacctgtgaacccgcttctgggtggacacgtgtttatttctcttgggcacgtgctcagggcgcagttgcaggtccggtggtctcagtctagcctttcaggggggccacctgttcctgcagcggctgctttctggtccctttgggggccccctcagtctgtgctggacttagttccatggctgtagtgggcacagcttgagaacagtccctcggtgggtgtcagctccatgtgggagtggggcacgtgtgaggccttggtccccacctgtggactcagggtctctttcacggactgcggggaaggcagtgggagcagcaggaatggatggtgaaaggacacagtgcccgccccccgagtgtccgagggtagagctgggacagggtcacagtcaccccaaagccgccccctccttgcctatccccagctgaaccagcaccactcaggcagtcgccgccactggggtgtgactctggggcccggcaccgggtccccaacactgctttcctcctggagcctggcctctgcacactgccctggagaagagaggcagtgtgtgtgcagagggccccgtcagccaggcagatccacctgccttgcccctgcactgggaggtggcgctcatcttgtcgggggctcccatgggccgtgtctagaccccaccctccgccggtccaggcacatcctcaggctcctaatcctgagtcctccggtttggctgtgggagcaaaggccgtggggaagttgctgggcctgtcccgggtgagctttgagtgatggacaggctcattctgaaggaactgggtccagacagcacgtcctggcctggtggctggggctgccactctaagagggtccccatccccgcaggatccccggtacttggcacactgcaaagcctgagtatttgtggatcacgtgatctgtgctagtgactatcaggagtctgagatttgaagcgatggatttcccagcatggtcccagctccccactgatgtgaaaggtggtggtgagttaacagctgagccaccacctgctgcccaaccccacgtgtcccacatggccgggcggtgctgcgctaactcatctccccctggatggaaacgtttgcgtggtgacagccgattctcttgagagtcatttgctgcccatgttgctggggagattctgcctcagggccaggagtggtttgctcctcccaccccgggcccagggctgctggtgggaggccccagggaggagcaaggactctaatgcttcgtgtggtgggagcctcaggactttcccacgtgcgacaggcacgttcctgggagctcggtgggaggaacccagccacgttgtgtgctgcgcaaggagccggcggcagggaggggaaaacggaaagacgcagaggagggcaggtgacaagaggcccacagagagatggctgggtctgggcagcgggtgggagcaggagggaggcggttatgggagacgtggagcagtggaggccgtcagaagtggggatcacagctgtgacctcatggagagggacaagccccacagctgggctggtgccagctccactacccagggccaacctgtgtggccgtaaaattctcaagcctggagtgtgtagaaggcagcagtgccctggcctggccacccgcgaacccctctgtccaccccatgctgcgtggcacagggcaggcgtggggcctctagctggagccttgagtgggtggatcctcggtggggctttaaggccaacctgtttatgaaaatgcatggggactgactgcagatgcacagacaactcagatgcacagacgcccggacgacgtggacacccagacgatgtggacgcacagacgacatggacgcacagacgatgtggatgcacggacgacgtagacacacggatgactcatccacagatgactcagatgcacggacacccagacgacgcggacgcacagacgacgcggacgcacagatgacgtggacgcacagatgacgtggacgcacggacgacgtggatgcatggacgacgtggacgcacagatgacctggacgcacggacgacgtggacgcacggatgactcagatccccagacgactcagatgcacggacacccagatgacatggatgcacggacgactcagatccacagatgactcaaacgcacagatgactgggatgctcagatgaccgctgctgtgctgccaccccagggctctctgggcgtttcctgtggtttgggcaccaggagcctgggagtcccatgctgcccccagggcactacctcctgggcccagccctgcatccggtggcagggctcaccgtcatcaccccaacagtgcagggtggtctcagggacctcctctcatcattgccaagaactggctccaggatgtttccatgtggccggctagtatggccaaagtggaccctggcgtgctgtccccttggacgcctccaggccctgcccagcacgtggggctcgtccattctgtgcctgaccatgctctgccatgcggggcctagcccagccccccagccctgctgcttctccccaccccacccccgccacctccaccaagccaccagcatcctgcctggccctacggacagcagggtcgtcctgtgtccaaaagcctcctccccctcagccccttcactcgggtctcatggggcccctctgtggcccccagcgcacaaggcacacacccactatggggcctttgcacagctgtgccctccccaggctccagccctcacctcccccaggctatttctcagatgtcccttcagaactagagcccttgggcccccagccccattgacacggaacgggccccctgttgtatctcaggtcactgctgtggttgcagccacaggggcaacacctgttactgccacagcgtccgacctggggccagcgtgcattcaaacgcactgctctgagaggccaggacgtccatgggttgggcgcagggggcggcggtgggaaaaggtgtcaggcaccatgggtcccgacctggagcccacgtgccagctgcagagatgggcactgaaggcttttgagcaagaggaggaggtaacgctggcccctggggatgctgtcagggaaactgaggcaatcttgagccctcggagcagagaacgggctgggccaggggctggaggaccctgggccagctccagctgggtcctgctctgttcccacccctgctgcttattaaacccttgtaaagcagcacaggactaaggtagggaaagtactttaggaaatgcccctttttcacattttatcggcaggtgtttcatacaaagaatacaagtaactgatgaatgaagggggcatcttgtgtccccacaatcctgctgtgcgcacaccacaggtgagccgttctgcctaagggaacagccccggcccctccctccggctcctccccagcaccgtctcctccacccagtggcctggccgtggatgctgcctgtggcccagctttgagacaccgccctgacacgtgtccagccttacgtggaaggatttgtctgttttgtggcatcctagtagatgccacgttagtagatgccatgttagtagaatggatgtgggcatttctttgtaagttcccaaaagcctatgagggttttttccacgattccgttcccagtttggcttttgttgttgttgtggctgttcttggcccccctgggccctgcagtggagtggggggctgcacctgggagcctcgagctgaggcccagcccctcctgccctgcattttcctgccaagcagcacctgagactctgaagccgatgcctatacaggcagaaacctgccaattccagcttgaacgactggagggtcctgaggatgggggtccctggggtgccatcatgggcagggtgcatctgtttgggtatgctgccccccagctggcggggcaccggggacaggcacagccacactgggggcatttctggtcttggaagccttcttggctcttccggagggaaggcggctgctgggtgccctgtgatccacccgcgagctgggctgttcggcttggtctgcaggggctggggggctgcatttcttttcaccagctgcacccacccggccccatcctggctggcaccgaagggagcagcgcgccgtgacatcctcccctcaagcctggtgaatggtggttccatgaggctggagtcagtgggtgcctgttgtgacagctggatttcagtgttggtacaggagcacacacctaaggggcgggccagtgaatgagtgtgcgagggtgggctagagaacgagcaagggaatgagagagagtgggttagagagtgagtgagccagtgaatgagtgagtgagcaggagtgggttagagagcgagggagtgagtgaatgagtgggctaaagagggccgggcgcggtggctcacgcctgtaatcccagcactttgggaggccgaggagggcagatgatctgaggtcagcagttcgggagcagcctggtcaacatggtgaaaccctgcctctactaaaaatacaaaaacaaaattagccaggcgtggtggcgggcgcctgtactcccagctactcagaaggctgaggcgggagaatggtgtgaacctgggaggtggagcttgcagtgagccgagatcgtgccactgcacttcagcctgggagacagagcgagtctcaaaacaaaaacaaaaaacaaaattagctgggcatggtggtgcatgcctgtagtcccggctactcaggagactgaggcaggagaatagcttgaatcggagtcagaggttgcagtgagccgagatcgcgccactgcactccagcctgggcaacagagcaagactccatctcaaaaaaaaagtgggctagagagtgagtgagtgaatgagtgaatgggagtgggttagcgagggagtgagagggtgaatgggagtgggttagagagggagtgagagggtgaatgggagtgggttagagagtgagggagtaagcgagtgaatgtctcttggtgctgctgtaacagaatacctgagcgagcctgggtaatttctagggagcagagttctttcccagctgtggaggttgggagtccagggtcatggtgccagcaggcttggtgtctggtgaggcctgatctctgcttccaagatggcgcccaaacactgcattccccggaggagagaggggaggaaggccacgtgtccacatggcagaaggcagagaggaatccatgcccaagctgtcttgacagctacaggagtttgtctgtgagggcggggctcccatcaggttccacctctctacactgttgctctggggaatgagtttctcactgtgaatctggggggcacattcagaccctattgtgggtgagtgggagagcatggctgtgtcactgggacaagtggccatgagtcgggggaactgaggggttttcagtgtcctcacccgtatgtgttgtggcacctgtgccaggcaccagcgttctgccctccccggcacaggcgcatcaccgagtcccaggcccgcctgctgggcattttcctgccaagcagcacctgagattctgaagtcgatgcctggataggcagaaatgggccggcaggaggctcctgacagacgggtctgtgcagtgccagcgcaggcagggtgctgtggccaggtcctacacctttatggtcagggttccaagacgtcatgagacggcttgttcagccagttagttgtcggtgcccctctgaacaaggacccccccaaggaagggggtggcctcgcatgggtggctggggatcctgctccgtcccacatgtggccagcatggccgacactggcatttctcagctcgacaacaatttttctgactttggatattttctagattttgtgttgtaagaaaaaacacttggcagtcaaatactaggcagattgaaatgctgactttctcactgtttcattttgtgattgaagtgcgtgcaaaacactcaatctggtagggatgatgcccgcgcggagctgacccttctcctattgtttttccaagctggagaagaagcaggcgctccctccattccagccacagatcacagacgactacggtctggacaactttgacacacagttcaccagcgagcccgtgcagctgaccccagacgatgagtgagtcccactgggtgcgggtccctggagcacccctcgggcagccccatggcaggccggcaccttgggcagctggtgacccagcctgcccttgagtcccacccgcctggtgtcatctctccagtgggcgttgggggaggattcttatgcgaacgtgactccgcttcccccaagggaatgaacacacggtcacccccctcccccctgccacctttgcccacagggatgccataaagaggatcgaccagtcagagttcgaaggctttgagtatatcaacccattattgctgtccaccgaggagtcggtgtgaggccgcgtgcgtctctgtcgtggacacgcgtgattgaccctttaactgtatccttaaccaccgcatatgcatgccaggctgggcacggctccgagggcggccagggacagacgcttgcgccgagaccgcagagggaagcgtcagcgggcgctgctgggagcagaacagtccctcacacctgggcccgggcaggccagcttcgtgctggaggaacttgctgctgtgcctgcgtcgcggcggatccgcggggaccctgccgagggggctgtcatgcggtttccaaggtgcacattttccacggaaacagaactcgatgcactgacctgctccgccaggaaagtgagcgtgtagcgtcctgaggaataaaatgttccgatgatgtggaagctcctctgatgccttttttccgtgagtggcgcctgccccacatctcagacgcaacccacacgtaggggggcagcttaggagccagcgggacacaggtgggggcgggagttgaagtacctgtggggacacaccgcaatcaagaattgtttcctaaaaaccccggtaagttcctgttgttcttcctgcagagtgtgtcccagccgctgtggtctagggtgaagtgacaccttaagcagatggcagctgggccagccagctcactggaccgatgggggaaattggatcatagagattctaaaacgtggcccaccaaagcacagtagaccaaaaaagagaaaaaactgaacactaaatctgcacaaatcatttctgaccacactaagcagtgcctgcacgatgcctcgtgcgacgcatttgatttttggaagatattcttatctgtcacacagcactgagagttagggaaaactaaaagatgtgcatgtgacggaccccagccttaaagttgaacgtgatgaccctacaaacacccagaaacacaggcactcttcccagcggcgcggacctcctgctcccgggaacacacccgcgctctccgtccacccacccctcaggtgaaggcacagctgtccagagctgaggcttcctagaggcagggctgccagctgccaggtgtcaggtgtggcagagccgtcttctgagctccctgggagagggggtcgcgccacctcatgcctctgagtgaggcctggtgcacaggtgtggaaattgccacgcagccctcttggccaggcgcagagaccccaggcctccatgactcaggggccgctccaccccattgtgcggctggtggcttggggaagagagacgtaaaaccccaagttaggaggtctgtgccgcgccttgccttgcctcaaggtcatccccagcaggtgagcgtggcccaccctacacactcaggtttctcagggtgccactccgtgcctggcgctcagcacgacatggtggattcacacccaagccccaggtgccaggacaagaatgccagcgctgggcatactgccggcccattccccccggcccgagaccctggacacccgcccccccccggccagctcaggcttctaggtggaatgtggagacgggtttcagccacactcccaaccttagctgttgagactcaactccaaagacggaaagttagaaaccccagggcagagtccaggagccgacctgggtctcacacaggtgtcccagaccagcgtggggatgcccaggtggccaggcccagcctgcggccgctgaagttacacctgccgggtgagtagggctgccgggaccccaccttgagtgggagacccccagtgtatcccagaagtggttaacaagcaaactgctttccatgagcctccttgatttgttaaatattgaaggcacttacctaaatactgccgtgttgccagtagcgtgccggttaccagtttggccgttcttgtaca

SEQ ID NO: 486 - DNA, 1383244 bp, Homo sapiens
  source 1..1383244: mol_type = genomic DNA
taggattttcttaaaaaaactgaacatcgatattctccacactatcagaaatgttctagtaagggcagatggagatgaggcacgtccactacccaaacagggattgccggctttaccccatgtctaatgctgtcttctgcataagcatttcgcatttgtgcttattcatttccactcacaatattaacccgaattcacaccctggacatcatctgcacatatagcgtgcgcgcgcacacacacacacatacatacacacaaacacatacacacacacacacagctagcatagcaacttacctttataggaacacttctggggctgtctagaagataatacaatatacgtatatgcaacatgagtcacccgcctctaacacgaatccctaaatctacaattgtgtgctcaaatagatattcctggcacttgtcatcactttgcattagttttgtgttttctgttattttattctgtagtttccaatgactggttcattttttaacaatagcgaacaattacacagtgcttcgtttatcctacacactgttccaggtgctttaggcaaattaattagttgtgacaacaacctaacgtggtgcatgctattattgtccccgaagctcttacacaggtgcgttttggaggtggggttcccaccctggcacccagagctcacccactttctctgcccccttttgctctatcatcacctgggccaccattcccatgacctttgcatatcctcggagtgtttcctgtggctactggcacccagaggacctcagtgtgtacttctttgcctaatgttgtgcaggccctatctcggaatgttccattccagatccctccaccatgggctcattgtgaaataaacaatgcatggccactaaagcagttctttgaaaatgcagcgtcaacacacccacattgacagcaatgcaaagtcactgaaattttctagaatgacatgagaaaaaatccttatagatagtcttttccaatgcaaacttctcttttaaacacttttattagaaaagtttgctagtaaggcaggaaagtaacttttagatttttatgaatgagggtttgctttttggaaccctttcaaattttgatagccttaaaaaactactcttatttaacaaagagaaacagccagcggtaatctggagcttggagttgatatgagaatggctatttcatcaccaggtaattcctccaggtcactgaatggctatttcatcaccaggtaattcctccaggccacaagtgaggcccatggagtaatacagcctgtgattccctccgtcacccttcacattgattgaaaatgtatcttcaaagacagactcagaagctcttttgatgctttattgacaatttaagtacaatcttagagttgtcagataatctcaacacacttcagagaaaaacagactttttctgcaaagactttatttctattttttgatacattcatattttgttacacccttcctgtgcaaataatactgtgattcatgttcatgtgtagtggatgatcttgcttttttgtttttgttttttttttttttttgagacagagtctcactctgttgcccaggctggagttcagtggcgtgatctcggctcactgcaacctctgccccccgggttcaagtgattctcctgcctcagcctcccaggaagctgggattacaggtgcctgccaccacgcccagctaatttttgtatttttaatagagacggggtttcatcatcttggccaggctggtcttgaactcctgacctcgtgatccacccacctcggcctcccaaagtgctgggattacaggcatgagccaccgcgcccggcctgctctaacttattttaagaatcactgttctattctggaaagggaaaagaccaccaccaagaagggaaaggagaccatgctggacagcctaatagtctaacaggggatcctagggtgcctgagctcatgggagcaaaccttgttcaggcaccgcaagcccaacgcagcatgcagattgggaaggcgcaataatgcaaacaccatcaggaagaaagctatggatgatggaaaacactgtgtgctccacgtgacagaagggagccacctgatttgtcgcatcgggccagtgtaaggaagtgtaatttagtgggactgccagtgacactaagtcaggccttgatcagggtctggactcagtatggacacgagccactgggtgcagggggctcatgcctgccacctctctttttttcccttactatagagactttgatctgtccaccatttctatgtgagctttgggcttcctgtcacaggtctgttgtcaccgtggggccatgttggagtcggtagattttcagacagtgaagccacatgaagctgtgaatgctgatgtggctgctgcagagcccagtctctccccggtgcagggcctctgagacgacgggactgtcctcagatggttggaagaaatgggttatcttaggcagttaggaaaagagggacaggtgtcccaggatgtggaaaacttgagttcatcccctctcttccctccagcaaggatttcagtgctacatctaaaaagagaagccctgttgccgatttaataatttacagtctctaaatccaaaagggcctccatgtgctagtgagactcatgccctcagttatgttcacgatcttcctgagaagtcagacaatacaggtagaacaaaagatagtggttgtactttctcttctgcgtagtgtgggtaagagcatgcggtttgccgcatgcagtgttgttaatcttttgattgtgttgtgaatggctgaaaaaaaagctgaaagtttgattgaactgaaatccaatccatgtcaacataaggaatattctagtgagtttactgtcctaagagaaggtctctcctggggaacccctggtatgcagagctccctgggacttgcagattggacagagagggtgtgccaaaggggtataaacccttctgatggagagagtcgggcgtgtcttcattttggtagttctggaaaggctcctctttaaagattctgatttaataatgttcacttttgttaagattgaatatcattttgaaatcatttctaaacgtgtttcctttataggcactttatctattaaatttacagtggagccaaatgtattagcaaaatctccaagttgcaaaatgaatactcagaatcaaactatagattttttggtgatactttcagaaaaacaatttctttctaaagttgcaaatcatgaaagggaatgaaagtacattaacttgatttcttccctgtaattcaaacattcaacattcaaattaactttcataatttctcactttgtgacaagttgatttacgcatagttggtatttcattaatgcgatttatatagatggaattcttaaggataaacaaatgtttttgactattgcctggggttctttgggaatagatgctttctgaaaatttaaataagaacattactgttaaagccatgaatctagtttggagaacccactgcagttcattttacagagaaacaccttgtcaatggcatcttcatggtgtttactgaaggtaaaaggcaggatattaaatgtgagaactctctctccagctactgattctgcctgtctcgaattcaggtgagaatgacccatacagatacatggattgcacttgaatctgtgctctggtatttgtgtcatccggaggctgagaacgcctgttggtggtgtcgcagatggctctgctgtcttgtgtggacaaactgaaagggattcaggagcttcttctgtaattttactctgctgtttttcatggacatagtgaaagggatccaggagtttcttctgcaatttggctgtagttggactttgaaaaaaacttgaagagtgtgtgtgcgcgcgcgcgcgtgtgtgtgtgtgtttgaaaagagaattagaaaatgaaggtagacactgggtatgctcccccaggatgtggcgatggggcgcccggccgccctggctacacgtcgaaccagtggtcccccatgcagacgcggttccactcgcagccacagttccagcaccactcgagcctgcactggggctgcggacacttcatgtgcatgcagcctcctgttgggggcagaaaacaaaggtgtggtgggttcgcagcaagtacctggaaaacacgcattcccaaaccagcacgctagcctagacatcactttctgagcgaataatcacaagcaatacaagggcagagagaaacttaactgaggggaaaaacttcataaagcacaatagggcagctctaaagtgatgatattcattaagaaatgaatgaaattgaagcatgtcacttttgtcgggaacaaattttatttgtaaatctgactttattctcctgaaaggggatttagagacaaacacttcatgtttcatagataggggtcaattcctcatttaaatatattcaaatattaatatatttatatttaaaatatataaatatatttttatatatttatatttaaaatatatatatttttatatatttatatttaaaatatatatatttttatatatttatatttaaaatatatatatttttatatatttatatttaaaatatatatatttttatatatttatatttaaaatatatatatttttatatatttatatttaaaatatatatatttttatatatttatatttaaaatatatatatttttatatatttatatttaaaatatatatatttttatatatttatatttaaaatatatatatttttatatatttatatttaaaatatatataaatatattttatatatttatatttaaaatatatataaatatattttatatatttatatttaaaatatatataaatatattttatatatttatatttaaaatatatataaatatattttatatatttatatttaaaatatatataaatatattttatatatttatatttaaaatatatataaatatatttttatatatttatatttaaaatatatataaatatatttttatatatttatatttaaaatatatataaatatatttatatttaaatatattgataaaatttgatgatataacctaatataatgtataataatttaaatatattttgatttatttttgctctttctatagtgccacttacttggcttggccaaattcataaaacaggaactgggatagcatattgtaattattattatttctatttttttttttgagatggagttttgctcttgtcgtccaggctggagtgcagtggcgagatcttggctcactgcaacccccacctcccaggttcaagtgattctctggcctcagcctcccgagtagctgggattacaggcgcccaccaacatgcccagctaatttttgaatttttcgtagagacagggttttgccatgttggccaggctggtctcaaactcctgacctcaagtcatcctcccgcctcggcctcccaaagtgctgggattacaggcgtgagctaccgcacccagccagcatattatttttaatagggaatatgttccttaatgctatccaaaattttaattaagatgagagggatagaaaggaagtaattaataatgctaggtgttctatgtatattatctcatttgcttcccaaagcactttgagataagagcatcactctgctatagaatttccccaaggtgaagcacttttaaatggtgaagacaatgatctcaccaaggtctgtgtgattccaatgtcctgtcattcacagaacaggttattttcagcataagaggaaaagtcccttatcttggaacttattttggaattattcacctccctcacttgttaaacatagactccatgagtttctggagtgcacacagccctgcttcagtcgctgtgggggaactgaagggaggaggaagtgatttgtatgaggatgtacagagaactgtttctgtccaaatttcctggaaaaccccggcaaacgcagtttctttgcttgaatcccacctagcgttgaaggtgctccattactcactcttaccaattatcttgttaattgatttttcctgccaaattttccaagtaattggttcggtgctgtctcacttttattattagaaacctggcatgagaactttcactaatttaaaatatttatgaatatataggaataggcatttgttttaagataacttgccgacatgcaaaatctcctgttttcctaatcctttctggcttgttttaaagatcataaattacagatctgtggaaaataaaggagaaaacttacaacacttttatcttcatactttccacttaggtttgtgccattttcagcacatattgcatggttgtatatttatgatgtaaataatatgttatatggtgtgacattataaaaccacttgtttctctaaaatatcataaatattttatcatatcataaatatatcattattatatcatgtatcgtaaaatatattcaatcaaaattattgagcaatacattaaaacttaatgaactattaaagcaattctaaatgaaagggtaagaaactttcctattgtgatatttaatatatataagcatatataaacacaaatatgtatgaagagtgtgtgtgtgtgtgtgtgtgtgtgtgtgtatatatatatatatattttattttattttattttatttttttgagatggagtctcgctctgtcgcccaggctggagtacagggcgcgatctgggctcactgccacctctgcctcccgggttcaagcaattctcctgcctcagcctctcgagtagttggaattacaggcacctgccaccacgcctggctaaattttgtatttttagtagagacggggtttcaccatgttgaccaggctggtctcaaactcctgacctcgtgatctgcctgccttggcctcccaaagtgctgggattacaggcatgagccaccgcgcctggctgatagatgtgtttttcatacacagtccctggcttataactcccatagctcttgttacagtcttttgtcataatgttggggcaattcaggcctcagaaacaggcgccagaaaagagaatctctccctccgacctttccttgccctccttttaccagcccagggcaggactggaaccatccgcagctgttctgactgtgggttataagacccggatttcagaaagagtcctgtccatcccctggaggaaggaatgctgcacagggaggccaagaagaatctagaccggcaggccttgcagggtctccccactccatcttttagcgtgagatcaaagcctttctgtcccaccgcatttcaacacggctgtccatgcttccatcgtgcctatcccaggaagtctccatagagggccccagaggacagggtttggggagcttccaggttgctgaacacatggaggtttctgatgggcggagcacccagggaaggcttggaagctccgcgacccttcccccatacctcgccctctgcatctcttcatctgtatcttttgtaatatcctttataataaactggtaaatgtgtttccctgagttctgtgagccactgtagcaaataacagaacccaaagagggagtcatgggaatctcaacttgaagccagtcgatcagaacttccggaagcccagacttgagaccggtgagtggcagtcctgtgggactgagcccccagcctgagggatcagacactatttcctggtagacagcgccagggttgaagagcaggacactcagccggtgtccactgcagaactgattgcttgcttggtgcgtggggaaaaacccccgcacattccgtcacagaagtcttctgtgctgactgttgttattgaatgagagaatagaagaagcatgttgtttgttctacacttagaccgaatgccaaaaattaataccaagcatttaatgaatctgggatactagcattgtaaatgatatcttggtacagaagctagaattacaatggcctggtacagtaagaatggaaatgggaagagaagatattcacgtcattagctttcttttctccctagggcttaatatacacaaggccatagagctagacccaggccatggaggagcatggaggaccgcaattctaaaagctttgccagcttaaaagtaagtgcatccaggaagcagctgaaacttcacgcagatttgtggatatagacatgaagggaatatggcttcctttgtagtgagttctgtctgcagatggacactcaaaccatgaaaagctcagcctacgccgggcagtcgacatcgtggctccggccagcaattcttccactagatttaatgagagcgtggaagtccctgaacaacctgaaggcacatttgaggagaagcacacactcagtcagggaatggagccagaatttcatctgcttgagatggaagtgaagaaatttctggagactggagtggattataggagaaagtaccagggtttagcctgtgcttaaaatggaaattcctcgcattctcatttcagcttctctgagggaggaagggcattcctgaaacacagctgagtatgtaacaggccacgaaccttggtgacaaccaggtaacatccttggtcatagaggctatgtcggtttcggttacagtgatgcacttttaaacagtttaggccatcgctaataagcttcaagtctcagcttttctgtttgtaagttaaaaatttggaggtaaaaaattagtgctttcatttatagtacatcacaatatttccaagaaatagcccgacagggagaaactttcctacagtcacgaaccatttgactcctacaactccatctttggaggctgccagcatgttctgagtccagggcagatccgatgaataattttcctgcttctcatcctagaatatctgcctgcctcacaggatcaagtccaagccccaaacctgccattcagggacctcaattctgcatcctacctactgcttcagctgaggctcctgcgtgcggtgcctggaacacgagcagcaggggctgcctccgcacaccggcgcgcgcacacccggtgtctttgctcatgcagtcctggggcctaggacgcctcctcctgctcttccttgccttgctcatatctgctcattcttcaattcttggctggtatcatctcttccaggaagcctcctcctccgggtctgtgtgccctgatagcttgcttcctctatgttattttattaaaaagatcggtttatgtgtatatctctaaactttacaagctaagtttttgtgtgtttgtgttttatttattctttttgagacggagtctcactgtgtcacccaggccgaagtgcaatggtgcaatcttggctcactgcaacctccacctcctgggttcaaccaattcttgtgtctcggcctcccgagtagctgggatcacaggtgcctgccaccacacctagctattttttttttgtatttttactagagacagggtttcaccatgttagtcaggctggtcctgaattcttgaactcaagcgatctgccagcctcggcctcccaaagtgctgggattacaggcgtgagtcaccacgcccggcctacaagctaagttttaattcagcaaatattttttgtccgggctctcttctgggattggagcctagacggtcaaggtccctgatctcaccggcttatgttctaaagagcgacagatggggaacatgtaaatgaacaaattaagcaatgatctgggaaggaagtggtgctatgaaattattattaaactggtgggtgggactcgttgggtaaagggggaagcagacactgagatggaaagggaggagggcagactgggcagaggagaagcccagctcgggcacagcctaagaggcctgagctgacgtccaggagctctggggatggggcagctctcagggtggtcctgaatttcgttagtgggttgggtattatgaccaaccagtagtcatgggacatgagctctccggggaaggggagggagccagaactaattgtcttggcagaggtgatttcccagagggctcaaggccatccacaggcaggccccctgcagagggaatggcagtgcctccccctcgagagatgggatggtgttgacagtgccccccaacaggagggcaggggtctttggcagggtggtaaggggcggtctgactgagaagaggtcagctggggtaagatctgaaggacaggaaggagccagccatgggcagtgacgacacagaagcgtcctggggagaggagcgggactgtgtggttgcaatgtcagtggggacccccggggggaagggcaggactgacatggcctttgagaagtctacacgtctatgtagaggacggatcataaatatgcgagagtggaggcgagagcccttttgggaagctgtgcttggaagaggaggcgggcaagcagggcactggctggggacgtggagtcagaggtgggcagacgctggatcagagcacggggaaggccgtggtgaccggggattgaatgcagggtgaggaagagcatggaatgaaggatgagctttagcttagcggcttgaggaactgggcggtgctgttgactgaggtggggtgcaccctagaggaaaaggttttctaggagcagctagcactctgctttgtgaaatttgagctgtccattgaacaatcagtggagacactaaggaagcagctggctattggagtcggaccgaggggcgagatgagggtggggtgtagatttgggagccatcagtatgtggatagtatttaaggccacaagactgggctgtatgttatgtgtcacaaaggtgaagtgtctcaggtgtccccacaagccgacagtaagtgctgaaccaaacaaccacggaggagagaaacagaaagcaacaggtccaggttcgctgaccacttcctttttttttttttttttttttgagacagagtcttgctctgtcactcaggctggagtgcaatggcatgatctcagctcactgcaaattccgcctcccaggttcaagtaattctcctgcctcaggttcccaagcagttgggactacaggcatgtaccaccatgcccagctaacttttctatttttagtggagacggggtttcgccatgttggccaggctggtctcgaactcctgacctcaggtgatccgcctgccttggcctcccaaagtgctgggattaccggtgtgagccaccactcccagcctcgctgaccacttcttatcttgcaaactgccaccaccagagtctgggctaccgaggaggccactaaggcatggaccccagacctgctgggtaaattctccacctgccgtgcctgtgacgcctgccagaagtgggaacatgggtgggtgtttaaggatcccctttccctccccactgcagacagagacctggctgatttttactaattttctaaggttatacgtcacacatgtttattacagaaaagcataaaaagaaataaagtcctctttggtcctgttatgcctagagctactcactatgacatggtaacatcttgtttccagtctttttcttctgattctattttttcccacacacacatttgtttcaaaacagacatatgtgccacttgctttgaaattctgatttctcactgaggatggatgtaaacctttccgccatgccttcataaccttcatccacacgaatcagagcacgtctcacggagcgtgtttgatgcaccgtctctgttactcctcctgcccatgctgtgaggaagtcccattgaaacccatcttatgaacgagcaaactggtgctcacacagccacagtccatggcagagtcctaactcctgcaacactgcagtgccgggctgtgtgaagctttaccaccgatttatcacaaaataaaccaatctttctcatactgaggcctttagacacttcgatgattttcagtttacgctaatataaataatgctgcagttggcaccttttttcctaaaatgtgtgtgggggtgtgggtgtgtttgcctattatatatttcaggttagtcctttaggatagattttcaaaggtagaattattgggtcaaataatataaagtctttatataggtattgccaaagtggtttccagaaaagttacgctaacttatgatgtcctcaccaaccttgagaattattattaaaaaacaaaacaaacaaaaattaaggccgggcacagtggctcacacccgtaatcccagcttggctttgggaggccaaggcgggtagatcacctgaggtcaggagttcgagaccagcctggccgacatatagtgaaatcccgtctctactaaaaaatataaaaattagctgggtgtgttgcgtacacctgtagtcccagctacttgggaagctgaggcaggagaatctcttgaactcgggaggtggaggttgcagtgaaccgagattacgccattgcaccccagcctgggctacagatcaagactgtctaatctctgtgctttacacccttgtcagcgaaataccaggcctgtttatcccaaaccatcacatatcttctcctgggaagggcccttccgtgttctttccctcccacttcccagtgcacccagtggtggtggagactagagaagctctttccttccatcccatcagtgccttctgctcttttttttttttttttttttttttgagatggagtctcactctgtcgcccaggctggagtgcagtggtgcaatctcggctcactgcaagctctgcctcccgggttcacaccattctcctgcctcagcctccagagtagctgggactacaggcgcccgccaccacacccggctaattttttgtatttttagtagagacggggtttcactgtgttagccaggatggtctcgacctcctgaccttgtgatccacccgcctccgcctcccaaagtgctgggattacaggcgtgagccaccgcgcccggccgccttctgctctttataggtgcatgccaatcccttcattttctaggagcactgctgcatgcaatggagtaataaggacacgctgggtaaattatttattttctctgcaggaagccactgatacagcactaaggacttgtactgagctaagccagcacctgcggctctgggatgtgttcaagcaccgtcttgtttgtattaatgaaaacttcctgaaggacataactgaaaagagagaggcttgagtgcccatcctgggatggccgggcttccctcccgcaagtcagctctgggcaacctgccagccagggcgtagctgatgctcattaaggagaagctgggagaggctgcgcctggcttcgtgtcattgctcatctgtgatggtgccgctgactctgccttgcacacgtacaagtgcatcacattgagaaagggctctcggaccactggttgtgatggctttgccctgagtggcatgtccaggatagacagcaggaagtcccccactggtactgtgagtcatcaggggcaggccacagggatctttaaatatagacgagggtttaattttgaataatgttgcaaagctggggaaggctacagactgacggccggcagacaacagggtcatacggtgcagccatcagcgctggggaaggtcaccagggaggacagaaaaaccacagctgcctcctgactgccacttatcctcaaccactttccatatcttggttctagtttctatatttattccctttccaaccacataaatgctaactgtgtgcctcacatagccatggaactactcactcattaaatatttctgtgtaacaaaaacaataataatagtgataatgggtaacattaatcgaggggttacccaacacaccaggcaccttcagacagcatctcctttaatcctggaatccctgatgggtatgattctcccccaaagagcacacgacatcctcattctctgctcagcacagactcaccatttttttccactggtacatggcagcggggacagggcttggtggttttcttgatggtttctttggaggctgcttcccaacgagcctgctcggcggctctttcatcgactctgtaggcctggggaaacaaagaggaaaggcgtttaatctcagctttctattactgggatcagagtttatgttccctgtacgtcggtacaggaaattcttgaagacaggagtgccttcgggcaagaagcctaaatatcaatgcacttgacaaatgctagacagctactaggcggatggggacactctccctggcatgtggcgtatgcgtaggagcggggaagagattgtttggttttgtagtgtgagctcctctattctgttgttttgcataattgtaataaataacacctatcaggtgcttaaaatgcaggcaaggtgatcaatgctcaaatacacttctcattagacacttcatcagatgtgaagtgaggatctagtttttattccacattgaggattcgatgggtgaaaacatggcccaaagctggtaagtgggagtatcagtgtgactctggaatctttgcttttaaactttgctctacatcttgttatccttccttgcacctggcaaatggggaactccaaatgttgtcacagaagggacaggagcaagaacaggaaatgaagtcgatgtgccagagagggcagtgggagctgtgagtgaagactgtggccctggaaccagctgtctggttcaaatcccagctctacccagacgggtgactctggaaacattccctaagctctctgacagtctttatctctcagatgaaacaccttgtgcattgggggtatggaggattctatgagttaatttcttcaaagactcagaatgactccagtgtggcaagcttttaatacatttgctgacattattcatgtcaccgagagctgggtgctgcctgcaccatcatgtataaggaggttttctggtgggggtggaagcaagaggtcctgggctagctgtgcttgacatctgtgaccttaaggaccagccattcgctgattatccccagataagatgcagcatcaccaaaaacatgaatccaaactttgtcatttcactttcgaattccaagcctttttgaaatgttaaagtttttgagtctttatagatgaagtattatgaggaaaataactgtactgcatttaatagtttctttaggaattagtgttcatgtttctgttatttctgtggaaagtcaattcttccagagccaagatcacatttgagacatcctcatatccccagtttctggcatagaatctggtacacagcaggcgatcagtacatttcaggcaagtgaatgaatgaatgacgcagcccaggaaggcactaaactttcaggggttaccaaatttcaggggttaccaaactttcaggggttaccactaaactttcaggggttaccaaacatccaaaataggaccccgtgaaatgggcagggcacatgggtggtatccctgacagtggtgggggcaccacagacaagctttgcctagggctggtcactgggtgaagccaatttcgtttctgttaatgagccatcatgggcacaaaggaaacacccttgagaactgccagggtgtcacgtgatttgtgaatactttgctagaataacgtggagtcagctgctcggaggcaacggtaggtcaatgagtgcttcctttgctaagatccactcacggcagaggcccagtgagggcgctgtggttagtgagggccatttcacaacttggtaactaggtatgcatcttcatggcacgccttccagtcaccacagagtcttgggtggtcctaaccgtcagtgacacgtggcaaacacccatccccccaccgacctgcaccccaacgccaccccggcctcatgttccacgctgttctttttcaggtctagggctctgtagctctgcagcaatggtttagattgcttgttggtggcaagttggtaagtcatacaaattggagaaaaatacaattttacttatcagaaaataatttcaaaatgccattttttagcaacatggcatactgcatgtgaagggcaatttctcccaggtccacacacctaaaaatgctggatcaaatatggaaaaaaatcttttttaaacgtacggctgatagggtgggaaggcaaaggaaacccttaaagacagcaaatcctcctggttcgggaggaaggaacctggcatttgctgtggggctatcttcttagtcccgcgctgcccatcatctgggtcttcccaggccctaagggcacaggcaggagacaaagcctccagccagagccaggtgggaggtggaatccagttttactacacacagaggacctggactcctgagggtgacgttctcagtggaggaagccagggcaaaagcccgccctgaagagataattgacagatatgtgctggtctcaggctgggttctgtgaggcagcaggtttggaaaacatttttctgaacattcctaaccatcaggcctcggacacgagggttggtgaaaagaattcatcctatctgattagctttaaaaaacctcaagtcaaaaattaatttgaaatattaccagattggcatataccctggaaccaggcggaagcaaaaatatcttttgtggagcacagcactttaaaaagccaaacctcaaggaaattacacaaataaaattctaagaaatctgggatcataataaaaaagttaaaaagtcacctaatacaggagaaaactagctacatgagtgaaagtcacagaattacagaaactacagaatctaaccagcaaaggttgtagatattggaatggccagagacagagtactggccaggcatggtggctcacacctgtaatcccagcactttgggaggctgaggcaggtggatcacttgaggccgggtgttcaagaccagcctggccaacatggtgaaacctcgtctctgctaaaaacacaacgattagccaagcgtggtggtgtgcacctgtagtcccaggtacttgggaggctgaggcaggagaagtacctgaacctggggggcagaggttgcagtgagccgagattttgccactgcattccagtcccggtgatggagtgggactctgtctcaaaaaaacttaactgagtataaactaaatatgtttgttatatttaaataaataaataaaggtgatgataatggaataagagactgtcacaattaaccagggagatgtaaaaaagaaacaaatttctttgttttgtccatttttctggacatgaaacactaataattaaaattagaaactcagttgatgagttacataacaaattagatacaaatgaagagagaatttgtgaactgaaagatggagctgaagaaattacataaaatgccaagaagtaaaaaatatgaaaaggagattaagagatggggggataaggtgagaaggtccagtgtttttctaagtagagttctggaaggagataacaaagagcatgagagagaaacagtgtttggagagagtggcaaaaaaacacacaaattatctacaaagaagttacaattattccccccagctgatttcttaatgcatgggtgctggcagacagtgatggtatcttcaaagcactgacagaaaataccagcccacttagaattctatccaagcaaaattaatttttaagaatgagcataaataaaaacacagtaataaaaaacagcatttcccatcaacagaagttcattaaagaaacatgatttggggccggatgtggtggttcacgcctgtaatccaagcactttgggaggccaaggcaggcggatcatgaggtcaggagattgagaccatcctggctaacatgctgaaaccccatctctactaaaaatacaaaaaattacaaaaaattagctgggcatggtggtgggcgcctgtagtcccagctactcaggaggctgaggcagaagaatggcgtgaacccgggaggctgagcttgcagtgagccgagatcacgccactgcactccagcctgggcagcagagggagactccgtctcaaaaaaaaaaaaaaaaaaagaaaagaaaacaaacaaacaaacatggatgtgggaggccaaggcaggcagatcaccaagtcaggagtttgagaccgtcctgaccaacatggtgaaaccccgtctctactaaaaatacaaaaattagctgggcgcggtggtgggtgcctgtagtcccagctactcaggaggctgaggcaggagaatcatttgaaccgggaggcggaggttgcagtgagccgagatcataccactacactccagcctgggcaacagaacgagactccatctgccaccacccgccccgcaaaaaaaaaaaaaaaaaaaaaaaaaagaaacatggaaataggaaaagtccagaaggagccaggagctgcaagaagaaactgtgagaaaagaaaaagaaaatgggtaacgtatggtaaatcacaggaaatactgattgtctaaaactgtaaacgatgcttaatttgctggttaaaaaaaaaaaatccaagtaggctgtgtgtggtggctcacgcctgtaatcctagcactttgcgaggccaaggcgggtggatcatctgaggtcaggagttcaagatcagcctggccaacacagcgaaaccgtctctactaaaaatacaaaaagtagctgggtgtggtgcccacactactcgaaaggctgaggcaggagaattgcttgaacctgggaggtggaggttgcagtgagccgagatggtgccagtacactccagcctgggcaacggagtgagactttgtctcaaaaaaaaaaaaaaaatcagagtagaactagatgccggacaagaatagcacagaagtgtgagaattggatgattctaatgcgctggcatgattcaggcagagggtccttagatttttttacattaatatatgtttacattctagggtaatcaatacaagagaaagcaatttgcttctaaacaaggaaaaatacagtggaaatggcaaacaaaagagtcaaaagaaaggcaagaagtaaaagtaaaactatagaaatgtagaatgtaatagaaagtataaaataaaatggcagaaatgactgcaaatatcccagcactcccaacccgtgtggacagattatcattgagggcaggtcttgctaaactctagagtcttagcacttatctgggaggccttgtctgcaagaggagcactcaggggctgaagtttctggctcaggtgtgtgcacacctaaagcctttgttacatgttgccaagttaagagcattttcaactgggcgaatacaatgtttattctaacaaaggatgttatactcagcccaagagaaagattcagagctcaacttgaagaaacctcctgcctgtcaatagcacattactggagaggaattacaaactggaaaattgcaaatttatattaatatgctttgttctgtccaggaagaaagattaaagttacagcaaaagaagagaaataattacttttcaaaataccaattttctctgacttccgatcccccgagcacacaaggcagagtgggtataacttgcaggcccaccagaaagccactaggatttccccaaacggctctggatgtaacacctccagcagcaagcgtccttcaaatcaggacactgcaagtttaatacctaggagtgattacaaaagactacccgtgtaaacatttccacactagtgtgcactgagctactggatgggccagttcactcaggggagagggaggtagctaggagggtttgatccttagactggaagagggaaaattgagagcagcaatttctgttttcacctgcaaggatatgtacccttatcatttccttcacagactctgcaactgggccaatgttacttcttccccggatcgatatgttgaaatcctacccaccaaggtgatgctactggaaggtggggcctttgggaggtgattaggtcatgagggtggagctcttatgaagggattcgtgcccttattaaagcaaccccagagagctctcttgcctcttccactgtgagaagatgcagtgagatgccagcagtttgcaggaagagagacctccccagatctagagcctgaggttgaggcttcctgggctgagctttggttcctgtaagccatgggcagcagcgtgggttaagaggcaccctcatgtccacaggacaccagagctgctgaggggccgaggcacacgtgagccaaggagtcaaggaccccctcatggagatgcccacactgaaggtcagagacagagaagaaagcctagggaagagaaaataccccaaaccctaggaaaagaccaaaatgctgatgtcgcaaaatggtttttaatactgttaaagcaaactaagtatggcctaagaaggactccgtacttctgtatttgagtccttgtggtcgaacttagccaagattgaaaacccaacttaggagtgtgtctgacttaatatgtagacaagattgaaagtctaactctagagtatgcaactgtaacaacagctgggtcttggccaatcccagcagccatgcttcagccactcatacactgctgagtgttcaaactgtgttcaaatgaggccgacaccaacttgtaaccagcccgggtgtttctgtacctgacttccgatttctgtccatcacttccctttttgtctataaatttgttctgaccccgaggcacccttggagtctctctgaatctgctgtaattgtgaaggctacccaatttacgaatcgcttttttgttttttttcttgctcaattaaactctgctagatttaatgtgtctgaagttttttggggtttttttgtttccttttttttttttttttttttttttttgagacagagtgtggctctgtcgcccaggctggactgcagtggcgtgatctcggctcactgcaagctccgcctcccgggttcacgccattctcctgcctcagcctcccgagtagctgggactacaggcgcccgccaccacgcccggctaatttttagtagagacggggtttcaccatgttagccgggatggtctcgatctcctgaccttgtgatccacccgcctcggcctcccaaagtgctgggattacaggcgtgagccaccgcgcccggccgtgtctgaagttttaacagtaccaagctaggggagggtgttttagccggcaggacagctacccactttcttttgcagtgggggtggggttcacgctgacctcctgggactgtcaagggcccaggcagatcttggccttgattggagagttaggggttacggtgtagaaaactaataagatgtgtcttttcttttttttttttttctggtagacagtatgtgctcaaaggttatggttttattcctccatagggcatgaagcagttctgttatctaacttagaagtcaaagttcagcattcctttcccaatgaacgacatggcattctgttcctcaaacgctacttgtgctgattttcccattaatctgatgactcagacctcggcacgggctaacacagagctgtgtaggcatggcgctgggacagctgcagggtgttagagggaggggcggccggcgggtccgagaccctgctgcccaggaggggaaggctttgaagaagtaaggacgcttctgttacatgaggaagggcactgtgcggcaggggctctgcccacatcacagaatgtagtaactgcgcatccctgaaggacggagcttgtcattaactatttcagctggagagatcagtctcagaaaactaaataacttcagacccaggccgcctggcctgcgagcagtcggttcagaatcggagccccgagctgcctgggttcatactccaggcccctgcagccttgatttcttcctgtcattatcaagtcacatgctacaaagagggctaagggactaaggctaagatgctgtcatggagatctggaagtccccggggacttttgagagcacagttttcaaacagcttgtggccaggcgcagtggctcacacctgtaatcccagcactctgggaggccagtgcgacggtcaggagttcaagaccagcctgcgaaacatggtgaaaccctgtctctactaaaaatacatataatatttatatatatgtatatatttatatatatttatatatatttgtatatatatttatatatatttgtatatatatttgtatatatatttgtgtatatatatagcaacctcagtcttgatatatatatatatatatatatatatgctgggcctggtggcgcacacatatagtcccagctactcaggaggttgaggcatgagaatcacttgaatccagaaggtggagattgcaccgagccgagctggtgccactgcaatccagactaggcgacagggcaagaatctgtctcaaaacaacaacaacgaaagcaactaccaccaccaccagcacccagcttgtggtaaagacagtgggagaagccacccagcccccctcccctcactgcagtggctcacctgccctccacttgcctgcttcccctggcaccagcactgcaactccactcccagctgcccacccgcccttctgccctgggccatcgctgctgcctggccggttctcccttccccaacctgccgaaagtgctttcaagaaggacaccaggaggccacggctgccaaagctcatgccctttctttgtcattgtctccaactgtcccactgcacctaacatgtgggaaagggtcaccaagaaggcccttggagttcctgcccttctcagcatcacagctcttcctgtgcttcctatcctcacccagcggatccacggggagggaggggagtcccagacccagtgactgctgccactgctgccagccccagggacctggggggcaggagaagcagctctatgacaccccgggagtgggcggtgcccaggccactggtttagacctttgactgccacttccgagaggggatttctaccaggaggagcacatctttgctttgcatccttcatgagtgtcttaatgctgatgtttaaatccttctggagtgatctcaagcagtggctgggtgcccacaggttcaagatcaccaaagcgattctaaaaatgatcccaaggcttgtgtccagactctggagattgggattcagtaggtctgtggcggggtacagaaattagaatccctaaaaatgccctaaggggttgcgaggggcgggaggtttgggaaccattcatcctctggagggcgattctccctttgcgcctgaagaggaacatggtgagctgggtaacttaccctctgttcccgccttagtcatcaagctctaaagcaatgcctgcttattgtgttgccaggaggggaaggttttgttgtgattcagcatcaccgcccgattgtgcaataaagtgtggctctcacggggcagtgtaactgttaggtaattgcatagaattctgtgcctgtctactgctcacccgtggcaggaggaattgcatgcatgcatgtgtgtacgcacgcgtggtggaggtgggggtggaacaggacaagtctctctcctaatatacttcatggctgaaaatagcgatttcataaatatatatatgaaacatctataatatacttatatatagatgtttcatatatatatttcatatgattataggaaatatatttcatatacatatagagagagacagagagaatcaaaattccctcagaaaggtaaaggcatgatcgtccatctgtggctcaagaggaataacctcacaagggtcatcgtgagtaagatcaacacacaaacggcttagcacagagccaggtgcaccctgaatgctaaccgtgtgttttctatgatcaccaccattattactttgttattgtaatcatcacgatcatctctaaagagatgggaatatgaccctgtgggagtttgtacacatggaaaagaccactgaaggcctggattggccttaaatctcctttaaaaacacaagtatgggaggccgaggcaggaggaacacttgagtctaggagttcaaggccagactggtcaatataatgagaccctgtctctataaacacacacacacacacaaaactccactggtaaatcaaaatgtacttatataggttttaaaagctgaattaggctgggcacggtggctcacacctgtaatcccagcactttgggaggccgaggcgggtggatcacgaggtcagatcaaaccatcctggctaacacgatgaaaccccatctctactcaaaatacaaaaaaaaaaaaaaaaaattagccgggcgtggtggcaggcacctgtagtcccacctacttgggaggctgagatgggagaatgacgtgaacctgggaggcagagcttgcagtgagccgagatcgcgccactgcactccagcctgggcgacagagcaagactctgtgtcaaaaaaaaaaaaaaaaaaaagccgaattagcgcctaggagacacattgatatacattgaagctagaataacttaaggaactgcatatgtgttatctttcctgctttaagagaaactcatttgtgacacctgtgtagccaataattagacaagtctattctaatcctaaaaatccatttaagcctgttttccaaaaaagagcagttgtcattaatcatgaaaacagagttggcttaattcagctatgaatgctttcaggtgaatgacagcttttaaatgtcagctttctcatcaacgctcgcctctcttctcacaaacactgaaaccttccacctttgcagacagcagccttcctggctcagtcaagcaggtgggccagttgagcactgctgcgtgtgagcagcccgcctcctgctggtgagtaagaaaatggcatcacttttcaggggccttgagctagtcaacgttactgcttggcaacgggtgtcaccaaaacatgttttgttgttctcacattgtcttatgactatctctttttggagaatatgtatatatgtatatatttaaatgtattttgttatttttttttttgagacgttgtttcgctcctgttgcccaggctggagtgcaatggtgaaatctccgctcactgcaacctccacctcctgggttcaaatgattctgctgcctcggcctctcaagtagctggggttacaggtgcctgctaccacacccggctacttgggaggctgagggaggagacggagtttcaccatgttggccaggctagttttgaactcctgacctcaggtgatctgcccgcctccgtctcccaaagtgcttggattacaggtgtgagccactgcgcccggcctattttgttattttttttaagagaaatcatcagagtgttgggatttaatggggtgtctagccaagggctccggggaatacaaggctacactgtaagcaatacaaggctactccactaagctccaaactccccaagccatgctttagaatgcaattcagaagggcatttgtttttatttatttatctatttttgagacggagttttgctctgtcacctaggctggagtgcaatgacacaatctcggctcactacaacctccacctcctgggttcaagcgattctcatgcctcagcctcctgagtagctgggattacaggcatgcaccaccccacctcgctaatttttgtatttttagtagagatgggatttcatcactttggccaggctgatctcgaattcttgacctcaggtgatctgcctgcctcggcctcccaaagtgctgggattacaggcatgagccaccatgcctggcccagaagggcatttttgacaatgattctaacagtggtgatttctgctaggagtggaatgtgtgccaagtgccacagacgagatcttacagagtcttgccccatggggccctaaatgcttcctaaaggggaagtgaattaaaataatatctatcaacctattttgagattaatgggggaaatggaacaacataaatattaagtagcagaattattaataggtaccatttattggttattttaaaagtgctttgtgttcaactattgttacaagttgacatatgggaaaaatctacacttgagctagaaaatatgctgatttgtatttttgataatgacattctctagtttttggttggcttaggtcagcagtgaccaaaattatccacatagatgggattctgaatgcggaatcatcactaataggatgtgagaggggtcaaagccgaccacagagcctaccttttgtgcaaagtatagttattctggcacaaagtagactattatttttgctagagtgaatgcagaaatattttcattcaagaaacatgtgttgggtgtctaagatgtgccaggcactgtcctggaccctggggatacatcccagtaaacaagagagatgacaaatagcaagccaacaatccctgccttgtggagcttccccattagcagaacggcggctctcagaccagcggcaccggaagcgcttgtgctgtggctcccccactacccctctgggtctgaatccataggtctgggattgcgctcaaggactggcagttcaacaaattcctaggtgatgccgatgtcgctagcctgcagagcttcggagaactactgctcgcagaaggtctacatacactgtggtcaacaaagacagagagaccctattttttttttttttttttttttgagacagggtctcactctgttgcccaggctggagtgctgtggcaagatcatagctcactctagcctggaaatcctgggctctcgagtagctgggactacaggcacatgcttctgtcctctgctgatctttaaaaaatattttttgtagagatggggtctcactttgttgcccaggctggtttcgaattcttagcttcaagtgatcctcccaccctggcctcccaaagtgtggggctgccggtgtgaaccaccacactcggtagggcagaatttttctcttctctgggaaaccgaggtctttgctcgtcaggccttccatggactgggtgaggcccacccacattatagagggtcatctccttgacctcaaagttaactgagtatagatgttaaccacgtctacaaaaataccttcacagcgacaccttgactactgctggttccaacaactgggctgtgtggcccagctacattgacacagaaaattacccatcacagctaggctgaaactcatgtttaagactagatctgtttgacttcaagccccctctgcttgtcttggattcctcagacacgggtgggaacacctagtccttgctgaaagaaggtaaatgcaaccctggagaacagcagtgctgagcctaaatgggctatgcctctgtgcttacaggggtgctgagtttaaacgagctatgcctctgtgtttgcaggggtgctgagtttaaatgtgctatacctctgtgctttgcaggggtgatgagttaaatggccatgcctctgtgcttgcaggggtgatgagttaaatgggctacacctctgtgcttgcggggtgctgagtttaaacgggctatgcctctgtgcttgcaaggaacaagtgtagagcaggtgaaccgttttcctcacacatggtcaacatgcttttctgtggagtgacaatattttgtcccccctgccagccccgtttttaatgaaggaattatgggggccaggatccagctgttagcttttcaaatctgcacacctctcagaaatgctcctcctggggacacagtccttcgattccctcttgcctgttgtcggctgggccactatgcaggcgtggctggggtgcctttcaaagtggcgttcactcccttttcccccaggtcattttatttttgtttctggacaaatccagcattttccttaagggtttagcgccatctggtgcatcagaggcgcactgcagctgcttccctcctgatactgagtggggtgtgcagagaattgccaggggcgctttcctttgaggagctccaaatgcccgtggggtatgcggtgtgtatgtgagtggcgagtgtgtgcagtgttatgtatctgtgtgtggtgtgtgttctgtgtgtatgtgtgttgtgtatatgcgtatgctgtatgtgcagtgtgtgtggtgtgtatgtatgtgtgtgtggtatatgtggtgcgcgtgtgttgtgtgtgtaacgcatggtgtgcatgttatgtatatgtgtgcgccgtgtgtgttgtgtatgtgtggtgtatgtggatgtggtgtgtatgtttatgtgtgtgtggtgcatatgtgtggtgtgtgtgatgggtgtgtggtgcatatgggtggtgtgtgtgatgggtgtgtggtgtgtgtggtgtgtgtgatgtatgtgtggtgtgtgtaatgggtgtgtggtgcatgtgtgtggtgtgtgatgtgtgtgtggtgtgtgtaatgggtgtgtggtgcatgtgtgtggtgtgtgtatgtgtgtatgtgtgtggcatgtgtgatgtatgtgtggtgtgtgtgtatgtgtgatgtgtgttatatatgtgtggtgtgtatgtgtgatgtgtgcgttatgtttatgtgtgtggcatgtgtgacatatgtgtggtgtgtgtgtgtgtgtggtgtgtagctgtgacaataagtttctataaaaatattttccacattgcgaacttgttctagctgcttgtttatggagtctagtacacagggtatacagggtatagacttgcaaagtcggttcagaatttacattcagaccttttttaccaactctgctgggatcctgaaacccctctggaatccaaaagccttcaggacagcatcattttcagaggagggtcccatgtgtcaggccaggcaggcatctggtggaggctgcactgtggccgtgcagaggaagactcaggggacccgcaggctgtgacccctacaggtgagtgagctcaggggacccgcaggccgtgacccccacaggtgagcgagctcaggggacccgcaggccatgcccctcaaggcagaactcctgggggtggagggaaccccccgggggtgctgaggctcctgcagagggaggacgcccctggccggaagctgcaccccagggaagtgcgttgcagagccttggtgctctgccgtgctggagtgacagtccagaagagaagaagggtttctgcagtgcaggagagcgcttggagagccccagccccaggtctgcatggtcaggatcggcctccaggggcaggcgtgtggtgtcactgtgtgtgtacccacgcaagcatgccttcacttgtctttcaatcccagtcaatcttatctttcctttcctctctccacagtgcctgacagttttagcattcagccttaaaaacccaaacccccaagtttcaccattttgtaatactttgcaacttacaaacggcgaaacacacactcatttcattatttatagcttggtagatcttactggctctgtgtggcaggcgacgaaaaggctgtgagcctttgagcaacttgcctggaagaggaggaaatgaaaccgggcctttgacgacctgccaagggccatttctgctgccccagagcaaaccttcgcacacaagctgagtgccttggaaacgcactgcagaggggcgggtgctgtcctggcactgactcagcttttcacagcgcaaggccgagcccgaacgacgcgctggctttaatggagatctgtcgcagccgttccatcccatctgcacatccacttaggcggcgggtccagggtcatggattcaagagaagtggcatcaaacctgctttacttaaaccaacaagcagttcagaaaatacactcccaaataaccggggatctagatctccgggaataataaattacacccatctcccaatactgggactgcatttgtgtgtgaaggcagtcaatggctgagagacggctctgcggtgagatgctggggcaaaatagatcaaaaaagatctcagctccctggagccactgctgcttcagtgtcctccactgagggaggtgcacctcctagcctctcctggactgtaactctgaaggggtgggtgtgggtgtggggagcatggataaggggcagttcgttggagattgtcagtcttgcatcttgatcgctggctccagcctggattctcctctgaggtggtctaggcatccactcctttccccactgaacccctagctgagatgtccacaatgaatgtgtgtctccccgaacaacctgcttttgtttctgtctcctcttccagccaatggcaccaccatcgttctaagctagacattcatgcatcaacattaacccgtctcctctcatcctgtcttctaatccactgccaagttctgcagatccgacctcaagcccatcccctcctctgtattccctggccggattcctggtgcctggtgtgtctctggtttggcccttttagggggtgctctgctctgctcccagtcccaccaccttgggactgaggtcacaccgtcacatcacggcgatagggcagctcacgcccagtggtggagggtggatgcgaagggctcacctctagcctcctacctctggctcccctcagtcttctgtggcaaccgcactgcagtgggactccacctctgcccaaccctgcttccttctcttcctgaaggtgctgttgagagcaccccaagacactccctgcctgcaagtctcagagcctgttctcctgggaacctataacctgtggcacttggtgcctggatagtcctaggaagcaaactctaaaatggagttagagctggaatccctcccgccagtggccaaagaggagcctgtcactgttggaagaaagtgctggaagctctgagtggggccccgaggagcaaagggcagggtcaggcggcatgcaagcgccctgtctctgcggctgtgcacgcaggcagaccctgtggattccaggtgtctgtggagggaaaagaggtcacgtggggctacctgcgggccaataagagcatcccagcaaagattttgggggttcagcagctgagaacgatggaccatttgaaagagagcccctggcacgctaccgagccctgtggagttggagcatctgtgcagcaattgtcataagacagaagtggggcatctaggcccaggcccaagcaggcccacggggcgtgagcgagctgcacaagcaggtcctcagacccccgtgccatccacaccgtggcatgactgcctctccttgggctcacaaccatggccccacggtggtagtggccgggctggggagattccttatgacacactgagggatccaagcttggttcacaattgagttagcttaacatacggctgcaagccaaaaatgcactgtcgctatcctgtaatcctctttagggttgaaagagtggtgaggggagaccctgtcaataagcagagccttgggcaacgcaactgctatggtccgagtgtttgtgtctccccagattcctatgtcgaaacctaatcaccaaggcggtgggattaggaggtgaggcctttgcaaggtgattgggtcataagtcagagccctcgggaatgggattagtgcccttataaagagagggcattaaccagtcacctctcatcctgtgaggccccagagagctgtcttgccccttctaccatgtgagggtatagctagaagacgtcatctacaaaccaaaaagtggtccctcatgagaccccaaatctgctagtgcattcatctttgacttctgagcctccagaactggaaggaataaatgtgtgttgtttataagccagccagtctacggtattgagtgacagcagcccaaacagatgaggcagcagctgacagtggactgtgtgtggaaaggaaagagtcctgagttaggaagagatacaagctcctaagcagtggcaaacgtcttggcagcctctttaagggcagggacagagaaaatctggaagactgaggacaggtaagacaaggagctctgcagagcaggcacgtggacagacccatgggaggggcaggacatgtccgcatgtttgcacagcatggcagagctcacaggagagcacttcaacaagcagatggagggatccggccagtggaccactgccagcctccgccactggccacagcagtcctgggccagggcactcccgtgtggaggaagcgtggtggtgaggtgaagccctgccaggccccccagctcgggcatccccccatctgccacaccgccaacattcaacctgccggcaacaaagagcggcacggagtcctgtgtgtcctccactcctcgaggagaccaactaactggccagtgggtgtcaggtggatcacagtgacaccagggaagatgaagacactccatcttgacaggaagtgactccttttctgggtgtgggtttgcctttcttggcaacagagcctcagccagcactagcatctgcaggctgccggcaccctgcatggcactgcattgtgtcccagtgggtgcatacccatgggaacactggtcctgtcacacatcctactgcccagaagctgttgacctgatgagacggatggaccaggcttgcacgatgccgctggagctgcactgtgatgtgggcgctatcctctaaggtgagatttacactctgaatcaacaactaccatggtgcagggtgtgtctccagcaggtagaacgcaatggttcaggaatcaaggggtggaagtagggacggccccacttctcactcccagtggtccacttggagtttatgctctccatctgtgcaacctggccttgcatatataggggccctggcttccagcaagagagtacttttgccagagaacacagcaagagttctggtcactttatgttgcattgccaagggattagcaggctagaaagggagttgccatcctggaaggggtaactgactctcaggagcaggcagggctgcagttatagaatggggtatttaaatgggaagaatgcatttggcacccaggtggttcactgtggcatctcttggtcctcccctgcccaatgttgatagcaaatcattcagtagtcatggctttagaatggcacccaggagcctggacccatcagggatgatgtctgtgtcaccccaccaggtaagccacctagaggtcttctctaagggcgaggggaatctagaatgagtaggagagaaggaagtcaatgggagtcagctgcaacttcaagaccagctgtggcagcatgagctacatatagtttaccctgctaaccttccatttgtacatttctccagtctctctcattccacaagcaaatgtctccaggcagtgcaaggggcagacgacagcagatgctgtgaggctggccagacccctcctccaggactgatatccctgctgctgggtatgtccgcagcagacagctctctgccaagtctctacccgggaagtgcccccagctgaagaaagctgcttcacccaaagcctttcttccttctgcgggaagcccacatcgaaaacctggtctatgcatagggatgtaaggcctgaccactctgtgtccatgcacaacaactcagaaggctcatccagctccagagctccttctaggacctgctgtggcaactgcacggcagttcagccttccttcaaactgcttcatgcgattccccacagcatcctccagtacacagtctgcactcgaatctcaagcagctcagggttttcttcctggaaaacatgtactattacaattccctactaagtgtttttcatattacagccagagatctttcgaaagcacccatctgatgacgtcaatctttaaaaaatctccagatgccttctcactgccctaaatcccaagctcctgcctgtggctgataaggcccttcatttcctggctccgtctccagcctagtctgtggccacagccaccatcactttatggcacagtcaagggagtgtcttccacctccctgaacgtgtcattcatgctcatctccagaactttacacaccctgtccctttgcttaggacacccataagttccttccctgcctgaagagctcatccctgtaggtctcaaatttcacttctttcaatgaacaattcctccaaccccgtggagaactggccaggtcccacttttatgcttccaaagcatcctgaacactctctcgtgcctcttagcatacaacattttaattatttgtcaaactgtttttctacttcactagattacaaaccctatgagaacagtggccaagtccaaagtccaagtctatcttttttttttttttttttttttggagacagagtcttgcactgttgcctgggctggagtgcagtggcaacctccacctcccagctttaagcgattttcctgcctcagcctcccaccaagtctatctttaatgttgtatccaaaatgcctagtactatgcgtggtaataaaaggtgctttataaatgtgtactgagcatccttcttcttccttctttccactaattataagaaattcacagttgaaatgaggttcaaaggcacataatgtaggaagtgtaacacaacgttgcagccaaaattccacttatagatgtgtttaagatttaaaaaaatgttaattctcaacatttaaaaataaagatatttaacaaaaacgcatggattttatgctactgacatcacaaaatcacactggaaggcctggtaccattgggctcacatttctgctgggtaaacatggacctgaactggggagctgtgtagcaggtgtctccccaacaccccacaacaagccatgcccactccagtttgccacagaccacccccacccgccccagcatggggctatgtgtcattatgcttgcaggcttttgtgttgatgtgtttttgttgttctgtttgttttaataggaaaagcagaagaaaatgaaatttatctttgcatccttatcaaaatattgacaggtccatgaagcaggcttcaactctgcctcactcatttaagggttgtgttgctgttggcatttgagttggccatccctggtattgtgtttgacaagccaacaacagcccactcatccccctctttcaaaaggcagagtgaccagtaagaacaatggaagcgcatttctgcttcactgggactggagtggtcatcagtgctggctggtgcagctcccaaagacctgggtaaaataatggtctggggcttgtcaactctatgcccctgggtggccactctccctccctctcccttgcctatggacaaaatctatcacaaaaacttgagataagcctcagaataagatggtgtacgtgaaagtgctttgtaatcaagcacgatacaagtgcatatcccaagcaaattattatatttatcccaagcaaatggtgggtttatttttctaatttaggaggcagatggaaggaactgaggtttactgtggaaatctaattttcttttatgattcaaaagattactgagacataatccagccctgaagctactgtctattcttttcctgtacttacccagcttcatggtagggagggaggtgtgtggatgaaggagggatttgtcattcattcaacaaacacttaatgagcacctactctgtgccaggcactgcaggatacaggatgcgacaggcacaaaccctccactaacaaagcccagactttttaggccgggcgcagtggctcatgcctgtaatcccagcacttcgggaggccaaggcgggtggatcacgaggtcaggagattgagaccatcctggctaacacagtgaaaccccgtctctaccaaaaatacaaaaaattagccgggtgcagtagcaggtgcctgtagtttcagctacttggaaggctggggcaggagaatggcgtgaacccgggaggcagagcttgcagtgagccaagatagcgccattgtagtccggcctgggtgaaagagcgagactccatctcaaaaaaaaaaaaaaaaaaaaaatcaaaacaaaaacaaacaaacaaacaaacaaaacaaagcccagactttttgtgaagatacagagaaacgatatttcaagtgacgaatgtatcagaatgtacagttgtctgaaagcttacaggatgtagtggggagggcagatggcttctgggaggaggtaacatgatctgggcctagaatgttgagcaggaggcatggttggtaggcaggcatgggcacattcccctcagacactgtagatctattagagagagcagttgctgatccccaactacttaggtaaagtatagccactgaaattgatctcttctgcggctttagagagcaccactaaaaatctggaagtctcagtctgcactcctgctgaatagggagaggaacatcaactacctagaaccagtttatgtggcttttgcaagagcaagtgtgtagttattagcaagcctccaggggcaatacgcggaaggaactggaacacggggaggagaacaagcagggaaaaacaaggaaagcaaacgggactggactctcgttagtctgtgatggattgatcttctgtcactgctttcccaaactcccagcagtttcaacgtaaagcttgttcaatattttaaaaccaatttaaagccaatttttgagtttgctttaaagaattattgcattaatcaaaaaatacattaagttttaggtccaacagtctaactgataggaaaagctgattgggactcaagagaaatgggctctcctggctggagcatgtaatgtgcaagaacagaaaccaatcaatgctaaagggaagaacagcagaaacgagtcacaaatggctcaaagcaaagaaccctgcaactgaatggaattgaaagaaagtgtgaagagggctgatgagggtatttagttattattagcaaaattcagatgtgagaacacatctaaagccttcggttccaagggaggctgcaattgggctttcattgtgagatgtgtagagtgtcatcctttcaaagatttcaggtcaatgaaactgcagaggtcatcctcctggagaccatgctgcttgagagaaatgtagggaacagaaaataagccagctctatgaaaataaaagcccttcattctgttatcaaatcgaattgggtcatgaaatttgaagaaatagcttgtttggttcgtgccttcccacatccaaaagcagctatggttgaaataaggaaacttgggaagattggtaaattcgctcatagagaaggtgctggtaattctgtattctttcccctctctgctttgcatctggaaggctggctcccatgggctgtgcccctaggatcccttgtgtctggcttcggtggggtatggcccatgggagacattagcaagagatcggatggcaggaggcaggaggcaagatgtccatgctcactcccttcctgtgtggggctacttccaggcaacgctggatgctccgtgatgacacctcctgtcatgaggccccttctccatggctgcagctcatggggttcatgggactcttcctccccctgcctttacaggcctggggtggtcatggctccccagtgatgctcgctctgaggccctcagccctgtgatggttcctgtgtccccagcccgcctctgcaggtcatccctttcattaacatctcctcctgtgcccatctgggttggcttctctctcccgagggaccctgaccgaatcagagacgtaggaaaacatggcagcaaagaccccaattagttgctttccgttgtctggcaactgttcaccagcagacatctttttagtttggctggttggtttgctttgttttcaaataagaggaattggaggctggccctgtgatcaggaaccagaagcaggaagagcctcatctcctgggggggtctaactgcagggctgcttcatcctgagttctttctgggatgaccctgatgtggattaactatacctcctcagaattcctatcatgtcagttgcttgtgcaacctctgtggcatctattgaagccgtagaaactccatgggagcagggacgttgtcttactctttgtcccgagggcctagaaccatgcctaacatattacgggtgtttaatgcatatttgttgaatgaatgaaataatgtctcatggggcgcagtggctcacgcctgtcatctcagtactttgggaggcttgcttgagctcaggagttcaagaccccagcctgggcaacatgctgaaaccctgtctctacaaaaaatacaaaaagtagcctggtgtggtggcatgtgcctgcagttccagttacttgggaggctgaggtggcagggttgcctgagccaaggataaggagtctgcagtgagccaagatcataccactgcaccccagcctgggcaacacagtgagaccctggttcaaaaaaaatgaaataatgtctctttctttatagatgctgccatcactcaacaaaccatctattaaatgtctgtgcagcagatgtcatcttgggcctggagacacaggggaacagaggacacagtctggttgaagaggttctggcttctgcaactttgcccatgtggcaccctctgctggaatgtcctttaccacaccatcctgctgtcctgaccaactctgacccatcttctgtgacttttccagggaaacctggaagtgttttatataaagctatagagttgctaagctttggtttagcatattactgtaattacgatattcattttccagtaaatctccccccatggctcccctatgagcctctaaagggaaatacacttttcttttctttttttgagggggtggggatggagtctcactctgtcaccaggctggagtgcagtggtgcgatctcagctcactgcaacctccacctcccgggttcaagcgattctcctgcctcagcctcctgaatagctgggattacaggtgcacgccaccacacccagctaatttttgtatttttagtagagacggggtttcaccatgttggccaggctgatctcaatctcttgacctcatgatccgcccacctcggcctcccaaagtgctgggattacaggcataagccacctcgcccggccgggaaatatacttttcaatgcatttttctagagagtctagcagctgcttgacccacccaaatgctcaacttaatgtctgctaattgacactatttgcagacacagttcccccgatgctggacatctatggtttaggtcatctctaactttctttttcctatttttctgaatccaatattaaggttttaacaatttaaaaacatttaatttgggctaccttaatctttaacaccaaggctggatggttcctcttgactgaagaatgaatgggattagagggagggtcaggcgcctggatggctttaggttaagcaatgctcttctttcccttacagctactgtttccaaataaatactgtagatgccagagtatcactttgtggaagcctctgccatgtttgcagtctcagagcatatggatgtaaattgctagactaactccgtttcccagagcctcaggtatacccgcctccattacagcggtcctgaggcaggggtctctgggccattattgcttttgctgtcagtacctggtaagctcgcgtttgaatgtccctgagctaaaataaaattaacagaaagagcatttgctgcctgggctatggaaatggcaactcagtcctaaatccactcatatgctcatggctggcaatttaggagcagacgagaagacccaaattcaccagttctatttatttagttatgctaatattggataaactcatctgcagaattccatatagggatacacttattcatgctctgattttagagcattcagatctttaacattctctattgtaaaatcaaaatattctgggatttctatgtctgtttactaggttcctatcagtacaatgactaaaggatttatttgcaaagatttggtgtttaaacccttgttaacatctacattgggagaaaaataatgagcaaattcatctactgtgatgacgtttttactctttttccctgaaggtttggttgatcctaattaataaataaaataaaatgcatttgcactttcctaagactgagatagcaccttagagagtgaggctcggccaacacattctttacttaatgaggactgaaacaccagttagcatagggcatgatgctgctaaaggacaatgatatccttacataatgtcatctttctgtacatgccactcacagaggtattttcaccagagattctaaactagggcattaaaaacattgaagtagacttagtatggatttctctgatttagacactgttaagttgttttatttcccctctaaggactcctttgaaaatgctcacatgccttgtccctgttccatatctgcccagggaaaagctattttggacatgccccaagtggccactgggaagtctacactgtgccccaaggaggggagtcattctgggagaagccacggccccattcccatggctgtcagctaccagtctgcttcttgcttttttagaatggaactctccatgacctccaggaaacggctccagtcccccactgtatccggagccctgcttggaggaatgagtagggcattctgtacctgagtagttgttcctgaggcttcaaatacggcactgcactccccttcatggtacgcttctttacattcccggcagaaggcaaactgcaaaagaacacacatccattaattagggacattaggttgcatttggcaataacacatttttccttttccaaattcattatattcattcctctggcttgtgcaacagtttctgtataaaaatactttttttgcaaagagaaatcaagttatgttttgatgggattgttcactctttactcaagagtgttccaagcaccatagcagggctacagagatgatgggtcacatttccttccctcaagatgtttccagtctagtggaagacacagtgatatggtttggctgtgtccccacccaaatctcatcttgaattgtagttcccataatccccatgtgtcatgggaaagacctggtgggaggtaattgaatcatggggatgatttctcccatgctattcttgtgatagtgagtgagttctcacgagatctgacggttttacaatgggcttcccccttcgctcagctctcattcttctccttcctgccaccatgtgaagaaggatgtgtttgcttccccttccaccatgattgtgaatttcctgaggcctactcagccctgcacaaatgtgaatcaattgaacctctttcctttataaattatccagtctcgggtatgtccttatagcagtgtgagaacagactaatacacacagtaatgcaaataaatacccacagcaaagtttaattggtattagaatgtaaggaaaaaacttcattcaagacattccctttaatatttgtttacattcaatatttgtttgcattcacagaagatttatatgcccatgtcagtggacttactttcgtattaaaagcctattatggaaaaagaaatgggtggctatgggctgaaccgtgcccccacataatggataggtggaagcaggacctcagaaagtaactgtatttggagacagggcctttaaagtggtaaagggaagatgaggttgttaggggaggccttcttcaatctgactggtgtccttacaagatgaggagattaggacagagacacacggactgagagatgatgagcagcattcaccatgggactgaagacgcccaaggaaccaatgccctctacccgccatcgtacaaagaagaaagctggaagagtgaatgccagagaggctcgtttagggctgtctgtctgggatccatggacctctcctgaaagcacgtcccattctcatcgccaccagccatgctctgaagttactgtcacggttgagttgtggatcagcagtggaacacaccagactggagtcatcatcccatcccctgccacctgaaacaccttgggaaagccaccttggtttctgtgccttggtttccaccttggaaatgctaggataacagcgatagctttctcatatgacccctgggagaggtagtgagatagcacatgctgagtggctacaatcacagcatacaatgtgttctaaactttaaggagataagaacaacagggactattttgcccctactccatttcataggaaggagtttcctcaccagaaaactggtttctttcaatggaactttctttaataagttgtaggcaacatctcccacagcagaaactgtattcagagaaggcatttcagcagaggagagagtgccatccacaagtatggtgtgtggatgatggtggtggtcttagagcatagaggcaaactgacagtatcctctttcccttgagaggtgggctttatgtctcttctgctgacagccagatgtgttgagtacttgactcctagaatatggtagaaatgatggtgtaccactttctaggcccaggcctcaagaaaccagaagcttccatttcctgttgggacacttgctcttgaagcccagctgccatatggtaaggaagctcaacagcccatgggagccccacatggagaagagctgcggcctcagccgcaacaatagccctgtctgagcttttagtagacagccagcaccaacttgccagctatgtgactgggtcatattccaagtagactgttgttatttgaaatcattaaagtttagggtggtttttacacagcaataaataactgatacagtaataaataagaatataatatgctgaaagtagtgtctggaagattcaaaaatttacagagacttacaagttctcaaactaatattttatagtataagttaggaatttagcctaattttgcttaagacaggactgatttgaattgaaaaacaaaaataatagaaaccaggatataaaaccaactctatcccaaaatataccataattcctccttgcctcaaaaaagaatggcttttactcaacactatttttccttcatgttgtcttcaccatgtgaacagagttttctcctttcctacgtccaatttcttgttttaaaagttcatctgaaaagtattttaatctcaggacatcagaaacaaaaaggaaaagcattttataaggaaacaatctcttcagagatatgccacaattgatcttcaagccatcacttttagcatattatattcttatttcttctcacagcagagagactgaactcaaatttagtgaaatgtaaactttatttaaaggttggtgggacagcgtgtgtgcatcagaacgtccttacacaaatcaccaacattacctggtttcagcttctgacatcttattttctctgaactaaaagcgaattcactgaatagtgagttgagttctaggattttctcctatttttaaaaacatttatctgttaatacttgggtctgcctcacactcattcctctgctcttacatgctttgttggaaaaatgtggacgggaggcccaatcatggagaactggcaatggggtctcagcccactgctttctagagaagcaaatcttatctgttggtgtgaaagggaaaaccgttcacatcttattagctcgtggatgagatataaaatcagtttcatggtagaggaacaccctggaggctgatcagtttgtcagaataaataggcttttcctgacacaaagacattaaattccctttcacaccagtactacaaagaatggactattgagaaataagagaaagggaagagcatatcaaatgaaagcctccccactttagcatggcaaaaggcaagcaaatgctgcaggaatattccggtgatgacttcacagggaggcactggctaatttgcttctattcaaagtataatttaaatttagatctatcatgcagtggtccttcccaattaagtaacatgaatctgtctcatgtgcaatgtagaaggtctgatttgatcttgaaaatgtttgggttttcaattacattatccaggactcaagactctcaaccttcagttctcacactacgcaccagagtgccctgcggtactgtaacaaactcacaggggtgcctgggatattctagaattttaagtaaaacacagcatggctattgaacactatgtgatttattaactcaaggtagttcccagtgttaatgtagattgtgctattttccttttggtgacattgtatctttgcaaaggtgggcttttggaagttaccagaatagaaaacaaataccatgtaaacatccatttggaacaaagatgtgatttatttatttatttatttattgagacagagtcttgctctgttgcccaggctggagtgcagtggcaccatctcggctcactgcaacctccgcctcccgggttcaagcaattctcccgtctcagcctcctgagtagctgggactacaggcgcctgccaccacgcccggctaatttttgtatttttagtaaagacgggatttcaccatgttggtcaggctggtcttgaactcctgacctcaggtgatccacccgcctcggcctcccaaagtgctgggattacaggcatgagccaccgtgcctggccaagacgtgattatttttaagaataaaataaagctaatttttccttccatttgtgtgaattatcatttcagataactattaagtcgttatgacattaattcttactatgctacgtggtacaaaacctttcataaccacaactgttaggcatttcttttggcctagaaataccgtgaaaaatgtactgaaccgctaagggcatggggaacagaattctggggaactctgggttaggcagatacaaaactccttcttaagacagtgttcgggccagtttgcaaacacttcccatggcatagctgtttctagagaaaaagcttgccggggaagaaagcagacctagctccaacattttcacatccattctgctgagctgcatgtctcatatctggggcgcctggatccttctttaaccaaccatgtagaaggctgaaatttacccagggatttgctattacttaaaaatggtcttacatttgctgaggctcccttaagctgcataatacctctccaaaccttatgagtcaacattaaccgaatggaagttagtataccaggaaacatggagtcctgtttataccgtatacattttcaggattgtcttctcttgtggtggatctaacaaatgtgatccatttccgtagagttgtttttttttttcgagaaattttaaatgtctttaaacaatcataaaataatacatacttatttcattggctctctaaagtctattcccttatagatttggttagaaggcaatcaaacacatggactgtattatagtccctgtgacgagagtttatgtattaacttggctaggctatggtcctcagttactcaagcagacactaatcttggtgtttctgtgaagctttcttgtagatgtgactaggatctataatcagtttattttaagtaagagagattatcctagataacctgaagggggctgattcaatctgtggaaaggcctaagagcataactgagccttccctgaggaagaagagatttcacctgtggacagcagcgtcaggctgtgctcaagagttccagcctgcccttcctgatggccactctgtggatttaggaggtgcctacccagccctgaaaccgtgtaagccacttccttccagtaaatctctccatatatctgtgtatacacagatatatagatacaatgtgtgcctgcatgtatatatatgtagggatatacacatatatatgcatatatgtgtgtatgtgtatgtatatttgatataagcatcctgctggtctggtctctctggtgaagctctggctgataaagctcctatagaaacaaattatttttaatagagacggggtttcaccgtcttggccaagctggtctcgaaccctgacctcgtgatccgcctgcctcggcctcccaaagtgctgggattacaggtgtgaaccaccaatacaaaaattagctggcatggtggcaggcacctgtaatcccagctacttgggaggctgaggcaggagaaccgtttgaaccctggaggcggaggttgcagtgagccaagattgtgccattgcactccagcctgggtgacagggtgagactctgtctccaaaaaaaaagaaaaagaaaaaatttaacaaggtcactttattcccaatcttttgcaaaagaactgatgtaatgaaaactatttaaactttccctgttatttgcaaaattatagttcaaacctctctctctctctctctctctctctcgctatatatatatacatatataaattccaggtagccatatggcaaattcctctcagaattcaacaccaggagaaagttcaccacttccaacagtgtggtggtttcctttcatttgacaataaacatggtcacctaatacattctccttggtatgttttcaagcttgagagcttggtgccacacttttaacttaattctagtcatcagcttatcctaaatgcctaaaaggaggtatagaataaaaaaaaaaagatttaatagaggctaaattcaataagccaatttttttctattgcataatagctaaactattcttaacattgaagtcatatttttgtcttgcaactaatatgtgttgagtatttacttttaggatgagtaaaatcttggccctaggcaacatataaaagaatagcacattttaatctgtgaaatcgtgtactagatctttacatgtttaaataccagatgtagattagtgtttagaagtgaaccctttgaggtagagagacccggagtctgaggcctcttggatcatttattatctgtgtgatcccaacatctctttgcttgagcttttttgcatctacaaagaagaaataataagataaagaatatttaacacagtttctggtacacagtaaacacaacaacacaacaaatagttttctccatggggctatgatgtttaacaagtggtaagagtctgtagaaaaataagagggtagtaagcgccttgttaattaaagcagttcccagtatactgataataatgactgttatgtgaatctcgggtaaaactgacacctccccagaaatgccacacttgtaaactactcataagacataagactgctgtctagaaagggatgaggcctctctttgctggtatacatgctgaggtaagtcactgtcagcccccttagacgctctgtactaccagagagctatgtgaatggcccatcatgcctctcattcaatatcatgtcagtgcagtagtcatttgattgatgtttgagtttgctttcccatatttccataatgaacacattcaaaaggggctgtatgtgtactttctctgtggaagcatgaaaaggaagcaaatgaacagcttctaatgcaatcggaatattccagtggctgctgatcaatcaggttgagagccagtaggtacctacaagcaatgacccttaaaataaggcttgatgatgatctctctatggaagccaagatttctttgtgcctgttttctatcatggctgcatctattataaaagcattctattatgtgcatttatttttcttccacggctctgaaattctgtgttaaaagaataggagagaatcaaataccatcttaggaccccttactagagtcaaggcaaacatcaaaggcatgaagcacacatttgtacttctttgggaatagatgaaatatttttctttttggtgtgtagctttccagaagatggcagcagagatacgtaagtccagcctctgtaaagggaatctatcaagagaggaagtctccctatgagtcaccagccgctgatatatgcaaaactcgttctgacaagacagtgccacagaacggagatggtgttagattataatgcattaaaacacaattttgaaaagaagaaagtaaggttatttcctttcaagtacacaacatcttaaaatcacagactctcatggtgtgaggcaatcttaaactgtgctaagctccaaatgcaaacagacgaagacagtgttctatgtgtggtctccaaagggctaaaaagaaagaattttcaggaggctggatacagctctgtagagtacccacgttcctttgtctttcacaaattctgtactaatccccagggatattaaacaatgccaattagtttcccacaaaatattgtgacctccaacaccctgcagccctaggcttatttttgttttaggtttgctctttgaacaggtccttactttctttggtttaatttccattcttgcaagctctgaaaagatccccgaaaatccccttttcttacaccaacatctatcatcatgcgcgtgcacgtaaccatcccatctttcagttgtgcagtctgcactgacccactcactatgagtaccgtctagtaggaaactttagtaccacctgtctcagaactagggcccctcagagaagatgagttcatgcaatgaggagaaaagacccactgagcttactttcaacaggctgacctcagcacctcacattaaaagatccatgataaggtggtcctcctgacaatggttctgctgggaattaactatccagtctataattacggacaaagacatttacatttacttcctactccaaaatagttttgatttttaccataacttaaagggaaaataaacttaaaaatgtgtattggccatttatttttttcttttctttaagagcgttactgaaatatcatttgcagagtcatggatttttaaaaagtaggtattctttgaatgcaaaatatgtgcaggtagcacagattcaaaaggtacattgtgaaaaatgtctcctttcctccttggtcagctacatagcttcccagagacaatcactgtcacctgtttgtataggtattgttccagaaatatgttctgcactcaatcatcaatttatgctatttttaaacaaaaataccctataaaacattgtataatgtgctgtactctgcttgttggtttttcgtttaatgcatgctacagatggctgtctattagcacacggagagctgctccattcttcctgaacagccacacaatattccagtggatagatgtgccttcgttcatttcaccagcccctccgatcagcatttaggtccttccaatattttgccatgacaaacaaagctgcagggaatgtcccgctcttcaggtcatttcacacatgtgaaaggaaatctgtagcagaaatttctagacatgaaatagctgggtccaagggcatatggactttccattttgattgctttcgcgagccttgtcagtcacaggcttagcagcaaggtgggtggaagctgcttccccaacacgctgtggtctcaaccaccgcctttgtcaagctgctttaaaagaatatcaaatacatcccagcacttttgctaagaccttctttatacatgttttgtcaccacagagttgtgttcctagccaaagcaattactctgaccacgtttaagtcttgtctacacagccaaagctgggtcaggagtggcctgtggtcaggctcactctgactttcctcagctcaacacacatggagctggtcgtctcattctgatgggcctgaatctggcccgcctgccaggaaaggacttgtaatgaatttaagctcagcggctttaaacacagacagccaacaaattagaggtccaggttagagagaaagaaacagtgaatgggggaacggcagcttccctcacttgtggctgtgtcgtgagcctcagctttgcagacttggctctcagtgacgcttgccaggtgacctgactgcagcagtctgccagaggacaggggaagctggggtgggagtgctgtatgctctcggtccctaatcccccgcctcttttcttactttctctttactgtaaccatttctgaaaacaattcctatggggacagtccttatcttccaaggtccccagctctggcatttgtgtcatggcttaccttgttcccaaaggctaaggtaggacctggttgcaagctggaactcttgttcaatgatatgttcacaccatcctgttcatctaaacaaacttcttggcgggcaaatttcaatatctaactgagaattccctttaccatcctgcaaggcctgcccaattttgctttaaaatgagcatttctcagaccttatggagcagttggctccttctagaactggagcactggtcacagagtatcaaattcaatgccactttcaaacatcgccattcattagtgggcccattcaaatattgccattaattagtgaacatgtttgaatatggccattcattagtaaaacgcacagcatatgtcttctataatttttaactggtccctaatcctcgtgaccttatcatttacaatctgcagcaaggcactagactctgtagaaatgattacgctacgccagtaaaaatgtgaaatccaagccatatggcaatttgagcccaatttgtcccatgtgcctgtgggtatccttatgctctctagcacagcaggggaggcgaaatgctttccctgaatacctgggcccgccctgggcaacttggggcaaggccagctttggaaagaggcctgaacatgtttggggacaccctgccagcacatcttacagacttttgtctttggaggttttgcagctcctcaatgatcaatcaatcaatcagtcaaaatgatacattaaccctttattgtatgttgagcagtctcataggtgccctgcaggtatacctgttctggcccctttcccctgcagcctcagccaaaatgatcaaggtgttttcttcccaagccctgtttcttactcatacctctattaaactgtttcaccctctatatgaaactgtctccacctatctcctcttctaaagggataggatttgtatcttattcatctttgtcttcccaagatccaggtgctagaacatagtaggtgatcagtgtctctttgtggcaatccaggtgctggagtcaagtagcttacagctaaggtggatgtttataaagcataaaagagctgaaggacaattgtgtactccatgatacaatgcacaatcatgggttgaattgagtattcttgtgtaagtcttaagggtcccatagaagagatccaggcgggttgaggtcagtgggtaagagcacgtggagatagcatttgtttttctgcccttcacatttgccccttcagggagcattctaacatcaagcttaattgactgcctctcttctaacaacttctcaaaatctattccacccttcccaactcctcttttaagatgcactttgcctattgcatatttccatttggataggttgcagtcacctcaaattcaagtcacttctaattccacgtgattatcatgaagttgcaaggacctaacagaataatggcaatcatcaaacctttgcagaataaacaagcagtagtagctggaaaagcctcaacttctgagaagcagaagaggatagcacagtgctgaggaaacccagtactgagaatggagaggtcaatcctgagtacaagaggaataactaagactttctgccagggaaagtactttagtgacctcggaggccataattttggtccaatggttcaatggtcagctagattcagaggctaagatcacaggcatgatggggtggaaaaggcttcacaacagagagctctgaatcagtttgaaaacagcaaaagatgatgaaaagagagagaatgaagacgctagccagagagggggcaggatgggagtgaagtcccagagaaagtcgaggctagggagacacactcaaaggtttatggctttcaatggaggaggataaggttttgcagcaaaatcctaggagagtcacattgatgagagagttttctcaaggagatgacacccatgcccttggtcttcctaacagagcaccatagcagctctgaatcttctggagtctagggggagaggagagtcacagatagagaggaggctgaaacagttactgtcagttggagcatccatgagacatgaattgaagggacgcccatccatgttgataactaaattcacatcacagcactggctctagttagttccctagaatgtggttcccagactagcaccatcagcatcacccaggagcatgtcagaaaacccgaatttcaggccccacccaagaagtactagaccagaatctttcattttaccaggatccccgagtgacttgtatgcaccatttagagaccctgttctagctcattcattcaaccaaaagttcctactcaggaactccactcagaatgtatgctgtgcattgctggagcctgcaaagatgcagaacgtatgtaatttccagtttcagaggagtcacaattcacctctcccttgctctacccaatgctccctccattccacaagtactcatcaagcatgtactgtgtgtgaatggtaaggcactggccattcttcatggcctcacagagttcacagtcagctgtgtcctgatcatatgatggatgtgaggttccatgggagcacagtgttgaacctgggaggtgcaggttgtagtgaggagatgaggaggttacagacaggagacagggaaatattgggtagaagagggcagttccccagcaaaggcctgaccctcaagcctggaaacccatggccctaaatgggaacaggcattcctgttttcacacccaaatgttgccttttggcctgtcatgcccccctatcctgtccctatataaactccaaaccccaggctccatgagcagaagagcagcagaggagagaagagaaggaatatctgaatgtcgagaggagttctgctgcagacagttagagaggagattggctgctggacggcccaactccaggggaagatcatctttctactccatcccctttccagctccccatccatccatcccactgagagccacatccaccactcaataaaaccctgcagtcaccatccttcaagtccatgggtgacctgatttttctggatgccagacaagaacttggaatatggaaagctgtcacactggccctctgcccttgcaaaaaggcagagggtccactgagctgtttaacacttaagctgtctgcagacagcaaaattaaaagagcgcactgtaacacacagctaactgggctttgggagtcacaggcacccatccctagacactactgtggggccagagcccagaagtgctcgtcctggctcctgcacctgctcatctgcatgctccccctcccataaggagtttgagcagtggtggtggctgaactgatgagccatatgcctgttgcatgtcctgcaaccggggtgggtcagggaactctcccgtttcagcagtaagaagaggaaggtgaactgggaccaatggagtttgctggaaatgatagcccccagaaagtaccaatcccagtgctagggatgatgccagcattctagtgtaattcactctgctagtgtaattctgcaacacttttgtctttttgattttgaaaccaccgtgaaaggatacagcctagaacagtgctgtccaattgaaacagcaataatttttaatggtctagtagctatatgaaaagaggaaaaagaaacaagtaaaattaatttcaatattttacttaactaaatatattcaaaattgtatcatttcaacatgcaatcgatataaaaattggtaatgagttattttatattcatttttactaagcttttggaatcgggtctgcttttactctttcaatgcatctcagttgggactagccctattctatgggctcaggagcctcacgtgggcaccatgttggacaggagcctcacagggctagtggccaccatgctggccaccacgctggactgcgcaggtctacaaggaccctgctgtctgaggactccttgcacgatgcagagttcagttaagggtccacagaacaaaagcgacagaacacctccaatattttagaagaaagtaggatgaggtgagctggggacatggggaagattagaaaattaaacctaatcttttttttttttttgagatggaatttcactcttgtcacccaggctggagtgcaatggcacgatctccgctcactgcaacctgtacctcccaggttcaagcaattctcctgcctcagcctcccaagtagctggaattacaggtgtgtgccaccacgcccagctaatttttgtatttttagtagagacggggtttcgctttcgccatattggccaggctggtctcaaacccctgacctcaggtaatccgttcccctcagcctcccaaagtgctgggattacaggcatgagccaccacgctcggccgaaaattaaacgtattctaagacaaagaaattcagattttttttttttcgaataaaggatgctgtgtttattttcagcctttggacgacccatatgagtttcacttcacactgtgttgaagaaaagagctgcaggggacagaaaatcagtcaaattaaagaaaatatgaggcgtaactgccctgcagtgagagcatatgaatttttctgccacacactctgagtcatttgttaaagaaagccagagaataagaactgtcctgggttatcgctaactttcactgtgtctgatttacttgtttgcacactttgtcaaatcttggaccagggacagatagcgtccaggccattactcaaggggaagactgttgatcagagtacactgcaaacaaacatctgtttctgatggctgcagcaccatccttcattatagaatgagcttaataaacacgaagtcatagaaatccaccattcacgtaagttttggcctggtgttattgcagtctcttaatttagccaacaaagaaggttggctcaaagacacctgtttttgcatgtaaagtatcaggctggaaggcttggtcgggcatggttttagcaacaggactttcatttgtgatagttcagtcacgtcctggggaattgaggagaagatccaccctaccaaaggccagtcttgctttagcaccaaagaattaattttaaaagttagagttggccgggcatggtggctcacatctgtaatcccagcactttgggaagccaaggtgggcagatcacctgaggttaggagtttgagaccagcctggccaacatggtgaaaccgcatctctactaaaaatacaaaaacgttagctgggcgtggtggtggacgcctgtaatcccagctactcaggaggctgaggcaggagaattgcttgaacccaggaggcggaggctgcagtgagccgagattgtgccactgcactccatcttgggcgacaagagcaagattctgtccccactccccaccaaaaaaaaaaaattagagtactgatctggatttcacccttgaagttaagcacacactaatgacagaagctgaaataaatcccccaaatgtcttgaacactttctaggcttgtgtctctccatgagattctcagacagctgcatttggatttccgggggctggactggatctcagatgtttctggcccagaacctctgccctaaatgattattcatgaatgttctggctcaaaggaggagagagaagatgagagatccagaggtctgagatgtttgttcacacaccaatctctggagcggaagccgttaatgcttctacttatattcttaaggcctcttaaagaaggttcccagcttggggctgggtaataatggtgagagcatttcccacattatcctctcgatatgcatctctgccatgactatcagacaatggtgagagccagaaccacttagagagctgattgtcatcaccgccctgacagtctcagtggcaggccaggctctaaaggctcctctggatgcctgttggccaaagataactcatgcctcgggggtcgtgagcaggaggtgaagccaaatgccttcagtgacctgaaaaatgctatctcccagcaacatgcacaccttgcagtgtcttatgaaattataaaataaaacccagacttataagactcttcccctgcctaagttttctttttctctctcaattttattgctttgctaaggacatagaaagcaaactaattaaatgacagctaaagagcaagtgactgtgtcccagggcggctgagataatgcgcggatctcaggtgagtcgaggaaatgccacagacattgctgcctctctactaataaatagctttttggtcccataacatgagagacattctggaagctgtgggggagcaaaagatggcttccctctaccctcccaggttctttggctgggctattgattaaaatggcatataaacagattaacaggagaaagagcatattcaattctgtacacatgagagtcccacagaatatgagactccaagaagggttagatcatggaagcctacagaactatatcctagatacagaaaagaacaggggcttggggattcttgtgagggggaggaggttagaggagggcaaggagaggaattgtatggtgaataaaggttgtcttattatgtagataaacaatctctcaggtaataaaagttgtctccgagcagccctgagcagaacaggcagtagtctctccaggcatggtgtccacgtactcatcttccccggctgacacaattccctgggaggggattcacgacaactgagatccatcaattgtatttgcagagaagctagttcagagaaaggccctccccgaatttgctgttccccaagtgtcctctgttaaggagtcagcacaccaaagcatcatattttgaggtggcatttcctgaactcctgcaaagctgaataacaatggagagtgaagcatcaactgttctcagtgctgggcgcccttcctccctctcgatttagtggcacagactgttagaactgcagggccctcagagagctgatcatctgtagggtagaatactgcccctttttcttctggctctcttaataatattgggacctaatattctatatttttaaaaattgcctaacgacatagatcatggcaaacactaaaaaagcacaaaaaagccagattgttttgataataacaatgatctaactccttattctttgaaatcccatctctgtgatgagaaccaaattttcaaaaggctaatagctcataaagggccctttactgttgtcctgtggagaaacggaaaaacgctcatggggtcggttattgttccaaatcaaatcattcctttatctcacaagcatttgttgagaggatgcttctctctggcagtgcagggcctcagggcaggagcacgtaatgactctgccccatctctgtgagaatcactctctggagagccacgcttttatcctctgctcctcagcctatcttctccctagccctcctttgcctagatgacttggaatagggattgctatggtttgaatgcttggcctctctggaactcatgctgagattttattcacgtgaagtctttcagaggttattaggtcattagggctccaccctcatgaatgcattaatgctgtgaggtgggagtgggttactgtgggaggagctttgttaaaaacctttctctctctttcacacatgcctttgcccttctgcctatctgctgtgggatgatcctggccagatgccagcatcatgctcttggacttcccagcctccagaatcaagagccaaataaacttttctttataaattacccagtctgtggtattccatgtagcaacagagatcattctagggagtactctgattccccattaggaaatccctttgggcaaacctccctgaccccaggcctgggtttgctgtttctcctgtgtgttctcaccactctgtactgacctgatcctaaatccctccaccctgcactgggtatttccttatccatcatccctactagactcaagttcccagctctctcaccccatgtgttctgagagctgctatctaagtacttggccctgagtaggagcttaataaaggtttattctaggaagaaaagaaagaagaacacaggcacctagacagaaaattgtgtggcaacgcatagacgggatgacagaggttagagcagtcacagaggaggagatgattgctctccctggacagtctgtccaaattccacagccccagtgacactttgtgtcttgaagggtaaacaagattcatcaagacgcaaacaagacaactctataaattgagctaatatcatcagtgtccatgagccactgaacgcagtttcttgtctcagtgaccccaatggcatctgcaaaatttagttaagattcaaaattaagagaacaaaaatgtgtcagggtgtctctaagtttacattatctgtaagaattcatttctatggctctgtgttcagaaagacttttctgcaggaaaatttatcatggtgtatatcactccctgcacaatgacgcaagtcaaaatcaagcattttccatgggaaggctctgtttctaaggattgaaatgcttattcagataagtcactgaaatggcacagatggccacacctgcccctttattgctacagagaacctgacatcctctttcaagtcggtagcaacatacttctaaaaacagaatgcgaagccgtaaatactgcaatggaatggagttccagcagaaaagtatatgtttctgtaaagtcataaaaagggggactaattcttctcttactgggatggtctgatatacgtttaatgttttatattttcattgaaggcaggaagatagactaaatgataacattgcttcccaccttctcctccagctctgactctttaaactgaatgctgatttatctctccaaatatctcacaggcctttactttattatgggccaggaacaaatggcagtgggtgaaataggcttggtcacacagtgacaagatttacaatgggatttgggggaaaagtcattagtcgtcatttgccatcctgtgttcatgcccctctttttcaaaattgctgtttaaaagtgggtctgactgggcatggtggctcatgcctgtaatctcagcactttgggaggctgaggcaggtggatcaattgaggtcaggagttcgagaccagcctggccaacatggtgaaaccccgtctctaccgaaaatgcacaaattagccaggcatggtggcacacatctgtaatcccagctacttgggaggctggggcaggagaattgcttgaacccaagatgtgcaggttgtagtgacccaagatcgtgccattgcaccccactccagcctgggtgacaaagcaagaccctgtctaaaaaataaaataaaataaaaattaaaaataaataaataaataaataaataaataaataaataaataaatttgggtccaccataatcagcattttgggccagcttccaggagaaagggaagggaaactgagggtccatgagtgctcacagccaggcaggctcgtgttccaagtctcgtacccgttgggccatttgagaagtggcaacaggggatcagcagaagggttaactgccaagtctatgcctgttcctaccaatttggcagtccaaatagatttttcttttaaagtagacttttgctcccactaatttggaaaatgatgcttttctttgctgaagaggaatgtcaagttaatttcaaggatctaaaataaacatatatctgacactggctcagcatgggagtaaacccacctccttaagagcactgggaaagaacctgataagggaagctggggattggtctgtggatggaaatgaccctcacaatctcctggctttatgttttgttcctttatacatacgtatatatatacacatatatacacacacatatatatacatatatacacacatatatatacacatatatatacatacatatatacacacatatatacatatacacatatatacatatatatatatacacacacttgatttgaggtgttggtttacagtaaaatcttcccacttagcatctacttttctcaatttttttcaaagtcatgaagtttagtttgatgttatctaaaagggtgctgatccactatgggcacattttagctatttttctcaaatccaccaaaaacgtaaggtggttgctttcaagttcttcttttagggcgagatgtctgctcagtatatagaaactttttaaatgcttcaatcactgtaacttgataggaacttcctattttgtttctttgaatggtaccctaagttctgctttataatatcagtaaccacaggattttgagtgcaatgctctatatagcacaacaaagtggcttcttagtattagcccgaaggaaatatgttttgggttaatggcaatacagtgactttcaacaaaaactcctttggccccagtcatttccattctctgcaggcaaaatggatccttctctctttgtgttcagtgatgagcaagcatttcaaatgtacatacaacttgtttctgtcaatcagtgattcacgccgagtcatgttcaatcatgttaccacaatctggaatttgcaaatctgtaagcatttctcaggcaatgaattatgtcaacacaattgcaccatcattgatggacttggaaatgcagacagaactgaagaggagcgtctcggcactgctgctacgggtaaggacagagcttcttgctgacttggaaacatcatgagcttaggccagccaaggtttaggctcgttggatatttttaacaaaatgggacttcagagaaatttaattaagatttatttcaaattaagatcaccaaattatatttacataaaagcctctataatgagtatgctatatttgtcattaaaatgtctttatatttttataaatatggtttcacaattttttacagagtcataatctacatggaaaacaaaaagtcataccaaaattataactgctaagagagatgttaatggtaattaatcatgagtgagtcataaatatagaaacgcactgacttgataaataagaaacaatattgcttctcatttggcaaagctgaaaagggaggggctggggaagggggcagctgcactcggtgggaggctctgcacactggcacaattgtttgctgggaggtaatttaacaggactgaaatgcctccattctaagatgacattaatggtaaaaagcaccttcaatttaatagtggcttgaccaaagaaagaaaagctccatcatactaccattgtaaacatccacatcaatttacaatatcctgatttcagaaatgttaaaatacacaaaaaggtacttcttagagttgaggataagtgttggatgcaaagctgtcaggcctctgagtcgaagctcagccattataacccctgtgacctgcacatatacgtccagatggcctgcaggagccaagaagtctgaagcagccaaagaaaaaccacaaaagaagtgaaacagccagctcctgccataactgattgaccaaccttatgacattccaccattatgacttgttctggccctgccccaactgatcagttgaccttgtgacattcttctttcggacaatgagtcttatgatctccccaccatgcaccttgtaatcccctcctctgctaacaatagataacctcctttaactgtaactttccactgcctacccaagtcctataaagctgcccctctcctatctcccttcgctgactctctttttggactcagcccacttgcacccaagtgaataaacagctttattgctcacacagagcctgtttggtggtctcttcacatggacaggcttgacaaaagctttaaaaacatgcacatgctttgactctctaacttcctcttctaggaatttttctttttagagaaaagtcaggaacacaggaaaaattcggccgtgggaaaattatcatcattccgcaagatacacatttacataagtcatggcacaccctgacaaatggtcatcattaaacatggcgttagagaaatgcaaagatgtttgtgacacacaattaagggtgaaaaactggtaaaaaaaaaaaaaaaaaaagcccatcagcataaactcgtctctgttaaaattgcggacatgtgggtttgcgtatacatgtaaaacgtatctagaaagctctacagcaatgagtcaaaaatcccatgtccagccacgtgggattatgtttgttttctaggttttccttttttttttttttttggtacaatttactgacattgtctaatgagtatgtattacttttgtaataataaaaactctttcatttttccacttaacaatattgagggctgatgagcctgtgccatgggtcagggggtcggcgaggctgataccgggagtggacatgtgtggaatgcaagtaggatctgcaggaagaaaacagttgtgggaatgctgttggtggcaagatctgctgtgtatgttttgtccccatacaatgtcactagaaaccattcatgggcattaaaaaagaatccacaatgacatctcttttcattatttcattaaaataaaacattaggaaatagccaatgaaatcttatctaaaatgaggtggactttgcccatttatatgctatccccccaagtaattcacaagcatgcagcaagacttgcagatgctgtattaaggaggccacattttaattttaatttttattttttgagacagagtctcgctctgttgcccaggctggagtgcagtggtgcaatctcagctcactgcaacctctgcctcctgggttcaagcgattctcctgcctcagcctcccaagtaactaggactacaggctcccatcaccatgcccagctaatttttgtacttttagtagagatggggtttcaccatattggccaggctggtctcgaactcctgaccttgtgatccacccgcactggactcccaaactgctgggattacaggtgtgagccaccacccccggccaggagaacacatttttaaactctgtggtaatggttgagaatactcttcattactacaagcattttggacagaaaatctctgagacgatgacagcattgtgtgttctctaaagcgccaggttataacggccatatgtctccctgagtaggattttccagaagaaattaccaaatggcacacaaaaacgcagtgtgctgacactaatacataaaatgcggaaggacccagtctttccagagtgcccctttctcaggacatagacaagtagctttcctactgacagcacctctcagttcaaaggaaagtggtgtgcttgctggatatttttagattgccagaatgttcagtggaatcacataaggccgtcactataaaaatgaaagcaagcccaaccttggtgtgatgttttgcaataaacagcaatccatggaataagaatttaagacccaatttgaggtcacgtgctgcaaacccagtgttctttcagagtcaggtcgctgttagatgacaaccccttcagcaccggcctgaagaaagcgcaggcccagtggcagtctgccttctgttaattcccaaggttctcagcattcctcagatcaatagaactgtgatgtatctatataaatctgagtagcagatccattctcataaagtttaccctgtcttgcttttcaggtgagaagcagaattggaaaatatttcagggagtatttgaaacaggaagattaaattctgtctcatgtgtatcatgaataaaagtgctaagccaggcacagtgacctttcctgtacctgtgctaggatgcaaaagatcataggtgtaggctctgggcagcccgtgcatctgctgggtcagcggtctggcactttttttgagtgtctgctgcccttgaagaaggggatggggaaggattgcataagttgtggcagggggcctggggcaggtgggtggccaggaatctgaaggagagtgaacatgagtgagagtacgagcatgtctcagctggtagcccttgtcccagagctggtggcctgctgtgtcctcctccagtgtatctgggagtggtggttgatgtgagcgccatgctgagccccgctcatacccactgggcccagctctttttcagtcctttcctggcctgggggaagcacgtacaatccctgagctatgaacagtggcaccagcttttaagtaaggatgagggcttcccaaccaactgtaagggggctgctggtttgagcttttcaggtttcacagcaagctcttggtcccctaaggccctgctcctggcagatactctaaggagcccgggtctgagctggacacacacagcagcgagaggggaagggcgagctatttcctccattctggtgctcatcgtgggccatgcgttggttacaaggaagcagatggagttggggaaacatggaatggaggatggggaggatgcagggaagagaatcggggtcactgtgagggaggggcaacagtgccatgggaaatgcatcattggtgctcatgacaacggcacgccaaggggcttgatggcagcagcctcaggtatgggcagaacgttgaatcctcagaatgatatgggattccttaaaaccaagcaaagcaactcatcacctacccataagaataacagaaagggccactcgatggtttgatcatgtttacaaaatctggctaaacaggaagtttcatcctgaaaccggtttcctcaggtggaaggaaggcagttgactcatcctgcttccctgtagtagattttatttttcagataaaaaacctaatattatcagcggtgatataaaccagtgcagggcctctgggatgctggcaaactctagtttcactgtgaggcaggatttagggcctctgtttttactcatgagaccctggaggctctaggtcagtgacatggcttggctgtgtccccacccaaatctcacattgaattatagtaatccccacacgtcaagagtggggccaagtggagataatcgaatcatgggggtggctttccccatactgtccttgtggtagtgaataagtctcacaagatctgatggttttataaaggggaggtcccctgcatatgctctcttgcctgccgccatgtaagacatgcctttgctccctcattggccttccgccatgattgtgaggcctccccagccatgtggaattgtgagtcagttaaacctctctccttgataagttactcagtctcaggtatgtatttattagcagtgtgagaacagactaatacagtcagagagtctgggggccatggcgacagggatgcctaagagaccaacacagtgtctgtctgcgaactcactcattcccttctcactcactcctccactcattcattccttccttactcattcctccattcactcattgcttccttgctcattcccccacttatgcattcttccactcattccttcctcactcattccttcctcactcattcctccactcagtcattcctccattcactcattccttcactcactcattccttcactcactcattcctccctcactcattcctccactcattcattcctccactcactcattcctccctcattccttcctcacccattccttcttcattcattccttcctcattcattcctccactcactcattcctccactcactcactcctccctcactcattcctccactcattcattccttcctcacccattccttcctcattcattccttcctcactcattcctccactcattcattcactcattcattcctccactcactcattccttcctcattcattcctccattcactcattccttcctcactcattcctccactcactcattcctccactcactcattccttcactcactcattccttcctcactattcttccactcactcattccttcctcactcattcctccactcactctttccttcctcactcattccttccttcctcactcattcctccactcactcattcctcctctcacttattccttcactcactcattcctccactcattcctctgctcactcattcgtccactcactcattccttcactcactcattcctttgtcacttattcctccactcactcattcctccactcactcactcctttctcacgcattcctccactcactcattccttcctcactcattcctccactcactcactcctttctcacgcattcctccactcactcattccttcctcactcattcctccactcactcattccttcctcactcgttcctccactcactcattccttcctcactcattcctccgctcattcattcctccgctcactcagtcctttctaacttattcctccactcactcattcctcggctcactcattcctccactcactcattccttcctcactcattcctccgctcactcattcctttactaactcattccttcctcactcattcctccattctataattccttcactcactcattccttcctcactcattccttcactcactcattccttcctcactcattccttcactcactcattccttcactcactccttcctcactcattcctccactcactcattctttcctcactcattcctccactcactcattccttcactcactcattccttcctcactcattcagtcagcaagagcttattaagcagcagctatgcacgtgtccctgtggcctgtgctggagaaggaacagtaatcagagacaggctctgtctgctcttgcctgccttcctgactgctggactagaatctcgcagggattgagctttattctggcagcaaattcagctcctttggaaattatattaccttttctgaacacctaaataacaccaggaggtcaagtacgtggaagtctgaggggcggaggaatgtgcatttagggtcgtgggaccccttcccatttatttgtggaaacccactgtctcccggacactggcctccagggcacggtctggagggtctgtaagactccccgtgacattcctgttccttgttccactgccagggtcctgtcctccctccgctttcccttcacttcctgagtctctttccattagaagaagaattcatatacacatactgcagcaaagggaatgacagctgcagcaggtcgccagtgcatcaacacagagtaaccgaatacatcagagaggacatagggatctggccagctgggaatggaagccaagtgggcatgctgcagtgagaactgggggagaaggccggaacctggcgggctcatgtgggcacgctggccatggtgggatggcagcgtgggccaggaaagcctgggaactgggggtgttggcatgagatgaagctcacagaggcatgggctgcaccgggtcccagggacacctgagcacgtctcagggcgccttctgttcacagcttcccacaggagtccagctgagaaggaagccacatggccattcctgagaacaaggataatgccacacaaatgagatgttccagctccctagctctgaggaagctcattcaaaaatgcaatttttaattaaaagggaaacttcctgagaggacagggagcatttacagcatgaagtcaggcagggtgagcctcacccagctgctgttcctttctctttcctgccttctgaagaggagactgtggaaagggaagcgaggcagaggtggcagaaagagatgataactccaggaaggaaggggtgcctgagagaagcagccaggcagagcggtgggacgtgaaactcctcgacagcactgtgtcctgggccgaggtggggagggtcagtgagggcagggtactggtgtcattttaattcagacttctctctttctttgctgcaaatggctctctggagcacaaactctcaacaaggtggaaactcgacactatgctctcaatctccatgcacaattttgcagaagaggctctttccagcattttctccccagatgtcagagccgtgcacccttctccggaaggctggagggtgttcagcgttgtttgtcacaggcagcggccagtctctgtgttctcgggcgctctgtgtcaggtcctggtatttattcccagattctgtttagatgcacccgaggccccaggcaaaggtttctgcctgagacagtccttggcctccagccacggcttccgtgccatgtcccaaatgcaaagtgccactctcaaatgttctctgatctcctgttcgaagcaaataacagagtgctaaaatcttatttagaggagtcgtggtagaattatttattcacttctagccttttggctgagactgttttgaaaaatagaaaatggcaggtaattcaggtgtcacccttcaatggcatgtgttcttcttgatgtttcacagctactgcacatctgatgaagaggattttttttaactgagtaaggtcatcttttcctgatgaagccccaaagtgcaaaaggcatgaaaggcacattatgcttctccaccagaggagggtctccgcaggcagggcagccgctgaacagcaccgggagggtctgtagttgccagactctattattgtgggctataaattaagaggcttccgtttcaaatacaaactctctcatcagtcacaggaaattaaatgccttttgaaagggagctaggcataggaggaattcactttcttccacctacacactgttggcagctcctcagagggaaggacggagcctgccattctgcggagcgtcacctggttcttacccacgacttcaccgtgagtgtggagtccacaggactccagagctctgtggcctgactgcagggcagtctgctcccaaagagacttggggagaacatggctaactcaacagaatacagaataacaccggagaggggcaccaagagagtggtgatcacataattgagacctagtcagacccagtaacaacttaccgtgtccgcgaggaaccattcatgcagagaggcctccccattttctgccttaaactcattttatatacgtggggaattgagactccaagattacgaacattttcaagatcctctggctagtaggtgatttagcttagagtcaaatctagatttgaacaactccataatcatcataataaacaataacgacactacctacatgaactgagcaatggctaagtagtaagcatgtgccgaaccctttacgtgagtcaacttagttgatcctcagataatcctgcggcagagtgattgttccagccacagatgaggaaacgcagagccttccaggtgttataactcttttctcacgcctctcttacaatcctcaggaaatgtcgcccccccccccccccgaccccccgccagcccccgaccgcccggaactaagccacagccacctcctgccctggttgctgcaatagtctaatctctcctggagtctgcccggcccctcctgagcttcgtcccagacagcagtcagagcaggacttcagatgttgtcagttctgctctcactccccgccactgcccatttcactgggaatgagagccaggggtcctcaccaggcctccccactgcgtccctctctccccacagtgtctcctggagctgcattgctctctggatgtgccagaacatgccgtgggctttcatcctgcgtcactcgactgggaatgccctgggatcctgcaggtgcccacccagctggctccctccgggtcccgtctttactcaaatcgcaccttctcgatgaagtttactctgaagttcaacctgctcttcccatcctcccaccccaggcgcagcagatccgccttaactggactcccccgctttgcttccacggcgcctatggaaatgctctgacacagaggtcagcgaaccactttacaatcacattttactgggacacagccacaccttttggttcgtgtattgtctgtggccactttcacagaatgaccagtggccctcagagctaacagacgcactgcctggccctttactgaaaagtgcggccacctctgctctaacataactggagagcttgatgacggattgggcttgtttttctcggtctgttttcccccgaggagagcgcacacactggggggcaggaactttgtttcttttgagcactgacgcctcccagtgcctagaacaggacctggctcgtagatgatgccagttcatatttgttgaataaatgtgtgaatgaggcatatatttgctaaacaactcacccaaagtcactccagtgataggcccatcagctctcggcatccaaattcaaacccaggcagaccaacagagagtaatagcaacagagacccgttcttaccagtgacccccgaccagcctcatccgctgctgcctcgcaggagacagtgtcctatatttgctcataaaaaccaggcagggaaaaaggcaagctaccagcttttaatcttattaatatgggccagaaaggatggttcatggttctgaccataagacaaagtgcttcaaggcaaggcttgtatcaaccgtgctacggagttgatacacaccgaactgtcacccgtcctcctgcccaggggccttggcgttttgaagactcccccatctagacgtccagcagatgctgagcacccaggagagaggtcagaatgcaggatttgcattgaaagccacgtctattggggaagcagctaaagctctggaatgaggtaccagaaagaagaaaggaagatggaggaaagaactctggagggagatggggccgaggaaggagtaggaggtgtggctatgctagctcatgctcacccctcattcaagctccagacctgggccaagagcaagaagagagcttgcttgtgggtccagagtttctgatggcagcgggtttttgatggcctgtaaagtcatctaacgggcttggcgcagtggctcacgcctgtaatcccagcactttgggaggccgaggctgccaaatcacgaggtcaagagatcaagaccattctggtcaacatggtgaaaccctgtctctactaaaaatacaaaaattagccgggtgtggtggcgcctgcctgtagtcgcagctactcgggaggctaaggcagcagaatcacttgaacctgggaggcggaggttgcagtgagcagagatggcgtcactgcactccagcctggcaacagagccagacgccgtttcaaaaaaaaaaaaaaaaagtcatctaatgcctccaagaccacacgctattgatttaatctctgaattaaaggtctctgaattaaagtgtataaatgtaccttctcccataactctgagaatggggtttgtgtcttagaaaagaaaaaactcacggggctgggggttacatctattgtttcctgtaattgtcacagcagtactcaatacacacattttcacaggcaaggaaactcaggttaaataactttcacaacacattggaaatttaggctgccaattagtcatccctccggcccccctgggttttaacctctagacctagagaaccaaattagatgaaaataccagcttttgtaaatcaacagtgtctaataatcccccaaggacagggccctaggcaaagctgagctgggggaatgtagacagacctcctactttccactccaaacctagacgcagactcagtggcccacccaggggcatgagtaatgctgggagctgcaggctggcttcccacgctccctcctgggcctggcccccaggcctggctgactccatggggggcctggcagtatcacagcgcagggctctcaggctgccagcagagcagctgttgtgttttcagctgcttattctcactaaaacttctgataaggccatctggaaaagtattactgtatattaataaaaatatttaaataaagttacagaatggagagatttactttggaagtattaatatgtaatgagttagacagataacgtgtttgaagcagcctctgccaatctgtttactccacggagagaagaagaacaggtgtgtcaagccaaacatctttccttggcacttgaactgccttacttggagcagctctgacaagcttatttttgtggtggtggttgggggaacccagcatttttagagaagaaaagagcaatcttcactccagaaagtgaatctgtctatattcatgtatcggccttgacgtggtttgatttttctttttaactccagtgttggttctttgctctttgaaatcaaaacattctgtattatttctgggattatacccagcaaagtgagaacaggagcttcttttagtaaataaacgtgatcatcttccgccagtaggtgtcactgttcatttagcacaaaccatacccgaaaggcaaggcaattacctcggctaaaataacaagcatgttttctggaaataaaataaccagtaagtactgggaaaaagattattttctttcacaggtgtctccaaatcaaagctgaagtgtgaacaacaattcactctttctatggcctcccacatagtatttgcttctagagctttagcaccattgtaagaattccttctaaaccatgtttgtacctcagatctaactgcctgaccctataaacattttgcggttgactttgcttataaaatgcattggcattttcacatacaggcggtggagttttctagcgttccagcctaaatcagaaaacaatgtctggtgttgcctacacagaaacaatcgtatatcatagaaaattagaagtgaggcagtaaagcgagtctctgaaaatacgttggatgtaaacacatcgtttacatgaaggacatggaattataagttcacacagtgacacacaaatatgtaaggtcattagtgttcactaaatgcgtagctatgcaatgaaaatggtgagaatcctttacgagctaacgtgctacacagagtttgatgcttcttgtgcgtgatctcacctgttcccccacttatgtgaccattttacaatgaagaaatggatgtttaaagaggacagtgaggtccctgcgccacagtggtagaaagtgaccaactagcagtcaaccaggagatttttggccctagaacctgaggtcctaaccacaacacagagggcctttccttttttcttttttcttcttctttttttttttaaatggagtctcgctctgttgcccaggctggagtgcagtggtgccatcttggctcactgcaacctccacctcctgggttcaagcaattcccctgcctcagcctcctgagtagctgggattacaggtacacgccactgcgcctggctaatttttgtatttttttaaaaaacggggtttcaccatgttgaccaggctggtctcaaactcctgacctcaagtgatctgcccacctctgcctcccaaagtgctgggattacaggcatgaaccaccacgcccagcctcctctgacttttgtaagggaaataattagattctgcttgtgttgaataattctagccaggccggagttcagttctagtcctcctacttccgactgatagtggctctgagtagttcacttaccatctctgaatttccatttatttcactgtgaaagggggaaattggtacctacttgtgggattgctgtagagattcaaataccgtgtttaagaaagttcctagcactgcgcctggcacgtaaaaggcacttgtttaagaacttgataaggctgggcgtggtggctcacgcctgtaatcccagcactttgggaggctgaggagggcggatcacgaggtcaagagatcaagaccatcctggctaacacggtgaaaccccgtctctactaaaaatacaaaaaattagctgggtgtggtagcacgtgcctgtagtcccagctacttgagaggctgagacaggagaattgcttgaacccaggagacagaggttgcagtgagccgagatcatgcgccgctgcactccagccagagcgacagagcgagactatgtctcaaaaaaaaaaaaaaaaagaacttgataaagtaaaaaaccctgatttttgaaataaattaagagtaatgaatatgcaataaagcattcttttctgaaatgcgttatgagaggtcaggagttagtcttaagcagttttcaaaggtgcaagggctggagtggcctcagtttatctggataaaatgactatatatgaacagagatgccaactgttggtgccaggcatggctcatgggcttttggcatgatgaacagtttcctttattttcttttttttctttctttatttatttttgagacaggattctgctctgtcacccaggcgggagtgcaatggtacaataacatctcactgcagcctccactttctgggctcggtgatcctcccacctcagcgtcctgagctgggaccacaggcacgcgccaccatgcctggctaatttttgtattatttgtagagagagggtctccctatgttgcccagtctggtttcaaacttctgggctccagtgatttcccccccacatcagcctcagttttctttactttttaaaaattaagatcctgattttacaaatgaagaaagctcaaagatgaagttacatgtccaaggtcacatagctgaagagagaatttgccgggctgctggatcttgttttttccatttgccgtactaaatcatgtgctacaatatttgtggttttcctcaactccacagagcttgcttctctgaaattcctattccttgctaacccctaattttgtatgtgaaccattggagacagggagcacaaaaggacagcaagagagaaagcaataaactaagtagagaaaggaaggatcctcctggtccttatgcctttgagtgatgatgtaagaaaatcatgtgaagttcacctgggtgagcctttaccctccaggcactcgagggcccataccccacaccaggagagttgaggcattcctcatcttgattttgaattgatgcttgagtgggggtacttaagtattaattgaaacgtgctgaattcccaacataaatggaaattctcaggtgactttgaatggcaaaaatcagtcctttctagacaattaatgagtagatatagaatttccatccaaaagttgtagaaaagtggttagaagggagttgggtatttggcagttaggcctggagtttactttctgggtcagaaccaatgtcctgagttcatgcagaaatcacatttgatcttcactaaaaattaagcaggaccagcatgagggtggatagagagtatgttgtatcttctgtagttacagcataacttcctttccccatgtagcattaacgggggaatggaggggactccggagatcacaggaagagtttgttcagatagagacgtttaccccttgaactgtttccaaccctggctgttgtatattattctaaagagactacattagatatttagggaaaaattaaggatagtataaagttagcataagaagaacttttgtgcagggtctacacagaagaaatcacatgaagagtttaaaaagtattttttaaaaagttaaaattttgaaatacgttcttgaaattctggattcagtatagtcagagatttactatcagtggtgttgaagaaattcttggtatattcttcagcaacagagtggctatgataatggaaaaaggttagaatttagtgaatttcagaagtaaagaattttgatagaaaagaacaactgaagttctttggatttctatgtagcatttctgtttaacgagttatcattatagaaacataatctagtaaaggaaaatatttttcaagttttactccaagaaatcatttgagataactgtggcaggatccacataaaacttattagccaaggattctacttagttccagttgaaagtaaaacagtaataacccaaaataaccgactaaggaaacacaaataaaatctttttttttttttttttttgagatggagtctcactctgttgcccacgctggagtgcagtggcatgatctcggctcactgcaacctctgccttctgagttcaagtggttctcctgcttcagcctcccaagcagctgggactacaggcacccaccaccacacccagctacttttcgtatttttagcagagatggggtttcaccatgttagtcaggctggtcttgaactcctgacctcaagtgatccacctgcctcggcctcccaaagtgctgggattacaggcatgagccactgtgcctggccagacaacacaaataaaatcttgagaaaattaactttacacctatctcctctctttctttgactaacgcctatattctcatagatgctctgtttatgcttcattttcttgtttcttttttattccccctttctctgctgaaagaattatgaagaaggaagaaaatttgaaaggaatagaggaaaataggaaggaaaaatagaggaaaaaaggaagaaggaaggaagaaaggaaggcaggcaggcagggagcaaggaaggaagagagaaaaaggaaaaaatgccccagaggcaaatgacatattttcaaagctacttcttctaggctggtaatttcccagtgccctgaccttgcattccagacttcaataaataaacggggatgatgccaatgatcgagacgccaacagcagcccttttctagggctgacatcgactgccacatcactcacagcatgtggaccaaaatatgagacaagctgggcatgcattcagacattttatttgtgtcttttagaaagcatttatatttcctataaatccatttacatgtcagtatcgtagtgagaaatgcacgcactatgagaaggccttgaaacatcaggagctgcagcactcttagagcagacttgacagctgcactgggtgtgagatatcagcatctttaatgtatgccagccttgcatgggtttggttgggacgtcctcatctgagaagacgtggcccccaaatgaatagggaggcactcacgttaatttttctcaactagtatctgaagggttgtcatgctctctctgctttctaatgtacatagaggtgtctacatgcaaacggatagcagctgagacacgctgtgtaacttgcagcttacatgtaaataattcggaggtgagtactgcgatgcagttacacgtcgtaaccacctgaattttatgggggaaccttctgcacgtattcatgcatgaagaacacacatttgaacaggggcataggcagtgtttgtcaagctctggaatgtggatgacaaaggacatcttaaaattccttgatttggggccaatgacaagcaagacatttacagatttagatgacttgtcaatcccaagctggaattcataaaattggctggtctgtttaaagctgcctctttctggaagcttcctctgcacactctagctacagcagggccttaccatggctcattgtcccaccagtcccttccactgctcttgttcctggtctcataggctacacacaaccactatcatctttctccaccatttgtctagaagagggaggggactctgcctaggtctcatcattgtgtatgaattgacagaacagtgcccagtttacaggcagtgctgaacacagatcagttaaatgaatgaatatgatctttactattaggtttctggtgattttctaaagtctacagacaagaaaagcactggccaatgaaggtcaatgtcaaagcacaaggctggtattgagactggagtacggcatgtagtgttgaagataaattgaggcatattaatattaaagagttgatttgaggccagccatggtggctcatgtctgtaatcccagcactttcggaggccaaggtgggtggatcatttgagtccaggagttcaaggccagcctggccaacatggcaaaaccgtgtctctactaaaaatacaaaaattagctaggcatgatggtgggtgcctgtaatcccagctacttgggaggccatggcaggagaatcacttgaacccaggagacagtggttgcagtgagccgagatcataccactgcactctggtctgggagacagagggagattctgtctcaaaaaaaaaaaaaaaaaaaagaattgattttgatttgagcaaacagcaatcatgggtgggccagctctggatcacaagtggttcatggctccacagaaggggcaaagaggaaggcttttatggagtgaactcagaagcaaggcaaagaattcatcccagtggaaagtcccaagttagggcttagctggctgtttcagattgtcctagaacatgaccactgagttgggtttcagattgcagacacaggaactcagggcattggggccaccttggtctagcaggcttccatttaattactttaacagcaggaaccacaggacacctctaactgtccttaagagtgtaattatagctctttggccactccctgtactaaaaggaggagtggagaatttggagaggatgtaggcaaaaccactgtgagcaatcaaagtatcaaaggaattaactcatctaggaatgcatgttccttattctgcagtacctggaagggcttttggtgtgtgacagcaatgtgaagcgtctttacatcttaattctaagagacagcagccacgatgtgggaagaacttcctagttaaatgtgctctgaaaagttggactgtactgtcgagggagactatgggagtttctttgttcagaaacacttaagaaagtactcataggcccacattaagtaagtgatgcctacaggtgtcttctgtttctgtgaattggtgtggagaacccaatgtttattgagtgcctatgtgctgagttaggcatgactctctttctctgtctcctctctctcacacacacttactttaacataggaggaaactgcatcctgagaggctcatataactactttgaccccactagtcttggaagagctgaaactccctcctagattgaactgtacagcccaccagctttctactgactcgtgttagagagcagtgggcaaagagtacaaactgcattgaggttctctactcacagcgttgccttacaacacatcaaaaatgcacctcctgaaaggttatcgctgcacccattgcaatcctgatctgaaagttcacagtacttgtttgtcctgtctaccagcaacccttcagaaagagtctccattgacttatttcagaggcaacaaaatgagcttcagggagagatggtgtaggtccgtggtccgattggtgtccaacgctggtctcaaatgtctcagttgtccttgtcttttgagatcagaatccacagattttcatttctgatgcaccagatcaaggactagtcccccttggctactccccagtcagacatgataaaggtgcctcatcacccactggagaggtgtcttcagggggaagtcaagattacaactaagtatcttttgggtcaaaatgtttgtaaagtattatgaggagatgaatttgtccaaatactcaaattttgtgctttgtaaaacacagtaggttgtataatatagacgagacgccttgccacatcagtaattccccccatattcacacggtgcccctgttccttggaagacatggtatttttttaatagctcatgttgggcccacaggattcctgaaaagtgcagtggtctgtcctgtcctccttttagagactaatacccagcctcagttccaacaccgagcaggagtgacagtggagtgttcccacactggatgttcaggggaattaacaaagatgagtgatggcctcccaagtggttaagggggtgcctgtgtacagcgttgtaggagcaaaaaatgtgatggggtgacaaatttaaaggaaaacaaaaagaggaagagagaaaaacggagatttgtaaaaagcaagagagaaaatgagatgtcccactgcccctgaatacccaaaggggcgtgctgaagtacctcagggatatgattctatgctattgtgatggttaatactgagtgtcaacttgattggactgaaggatgcaaagtattgatcatgggtatgtctgtgagggtgttgtcaaaggagattaacatttgagtcagtgggctggggaaggcagacccacccttaatctgagtggacaccatctaatcagctgccagtgtagctaaaatataaagcaggcagaaaaacatgaaaagactagactggcctagcctcccagcctacatctttctcctgtgctggatgcttccggcccttgaacatcgaactccaagttcttcagtcttgggactcagactggctctcctagctcctcagcttgcagatggcctattgtgggaccttgtgatcatgtgagttaatactacttaataaactcccctttacacacacacacacacacacacacacacacacctcctattagttctgtccctctggagaaccctaatatagttatttatttatttatttgttgagacagagtctcgctctgtcacccaggctggagtgcagtggcgcaatctcggctcactgcaagctctgcctcccaggttcatgccattctcctgcctcagccttccgagtagctgggactacaggcacctgccaccacgcctggctaattttttcgtatttttagtagagatggggtttcatcatgttagccaggatggtctcgatctcctgaccttgtgatctgcccacctcagcctcccaaagtgctgggattacaggcgtgagccactactcctggcctacttacttatatttttgagacagggttttactctggtccaccatgtgggagtgcagtggcgtgatcatagctcactgcagcctccacctctccagttcaagcaatcctcccacctcagcctccctggtagctgggactactgatatgcaccacaacactcagctaattgtttgtatttttagacgagacaggattttgccatgttgctcaggctggtcttgaactcttggactcaagccttggcctcccaaaatgctgggatattacatgttactattgggccctaaactagtgctttatgcgaatcatcttttttaattctcacagccaccctaactggtaggtactattatcatccacatttttcagaggaggaaactgaggcacacaaaagttgaataacttactcaagcccaccagctcgtaaaagacacagctgggattagaactcaggtagaactgacccaaggattttctatttccttccagttgctgaaaaatcactaaactcatgaggcaatttcataagtctatatcttgtctgggttgctagtaattagcaatcattacatgaaatctgacatgtgaaagtgaaacacaattggaagacgttttgtgacatggatgtaaagtatatatttcttgagggtagagttgtttcactgccactgtgttctacatttaggcctttgctgaggttggaagtattcaaatagatagataaagtcacatcataatcccatgtatcaagtgtcatggaagagtacgcaatcaggcttttgatgaatcccacgtttcacttgcaatctgcagatttccatatgctgtggctcagcgatttgcactggcttctcaagcaaatcagtcatgactccaggcgtgactccagactgaaatcactcttgtcgatatacctgaaaacagaggtttccagcactggagagaagctttggtgcggggatgggctcagagggtcccgacagagggtgacacttgcatggttgcagaaggaagctcgctgcagtctgagtgtgtctccgtggagctcggcatttggacacagctcacacgcatgagtgatgctcttccacctgcatcttctggcacttgcactgtgggggccttcctcaaagccgtgcgcctccatctcagggcaacatagggcaacttctttcttctactcacattctgaatgaaatacattaataactggcttaaaagaatccaatcctttatcaaaagactccagcatttttccttccattgactgctacctgatattgaggaaggtataaggtgtcagattcctgctgggactggcagagaggggcagagggaggcaggacgggctgctggggtggagagtgcagacagaagcctgccatccgccggagtctgtgagcttcagggtccacacgagcctcatggagagacaggcggctgctccgtccatcttcgaacctggctggcatcgcagatgcccgtgcccagggcagcagccataaaggccgtggcaccttcttgcatctctaagtgtgtggcattgtggctgcctttgattgtttggcggtttgctgtgttctctgagtgtttttccacacatctgaagggcgattctttgtcaactgctactgtcttgctaaagaatcagcaattcacacatataataaagctcacaaccaaaaaaagcacattcacattttttttctttcatttttctgcctgagtacctctaccttggaaaacctccatcttgtcatatatgggcaagcattcatgtatttcaagtcatgtttttgcaggcagatgactgtgtaagtcctacatggccaccctgccagtgtttcaagcaggcctctatcatgtgctgacctatggctaggggtccctggtttctcccaccttcttcctgatggccaggcatacattcctgccctaagactggaaggctggcagaccagctcaggtcagctggttcaagaagggggaaagttttgctcatgtccaagagataacgtaagatgttcctgaagctaaacttctcttagacaggacacctgcagatggcacctttgctaaccttgattgtgccttgagatattcacctttccttcagagtgaatgctcctatcacctatatcacacttcatatgatgtaagatacaatttatatattcttgctcatttactcatttattcatttatagatttacccagcaaatactgatcaagtgctgagacatgctaggtgctgggctaggtgtggaatacaatggtaaacaagattgagaaagttcctgccctcagggagcttatagtcagtcatgggcaagtaaacaggtcattataacacagcagtgccctaagtgctattgctctatgtgtgggaaaacaggcaacctggggagccatggttaagagggacggagaaataacacgaatgtggtgaggcagggtggtatccccagagctgagaccttgcaatggctaggatgttgctagaagaaggaaatggaagcaagttccagagctcagaaaacattctgagatggaactagaagaacctggatgtgaagcgggagggccagggaggccacggagatggctgctggtttcaggtttgggccacaagtagatcaatgaagaaagaggaatccagaagttccagtccgagggtgtgtgggaggagggtgagtttcagagtcattaatgggccttttcttcagtaattcagaatactcctaagtgagtatggccacttggatacctggaaatattcatggctccaggtagctaccaagagaagacttcattttaattcttgtcaggaactgtgaaggatccaagattttgctttctttgcaagctaacaagttagtctgctcagttttacggaggccaggagaagaccagaggttcctgggtcagagacaaaggaccatgcattatttacagcaatatcttttttcctgtgctggtttctcaaatcccagttctcacagggtggtttgaaatggaccagatggcagctgcacatggcatgggttgcattacaggtgtgaggaccctgactttagggaatctgagtcttttataatgggccgtgagcaggactgccattgtcaacagagggagacattgtctttgttataagcaaacttcccctctgctgcggaaagagacagtatctctatcttccaaggctgttcactgtacgattattattgtaactatgttatgaaacacagggcattaatccatccatgagggtagagtccttaggacctaatcactgcctaaaggtcccacctcttaacactattacactgacaattgaagttcaacatgagttttggagagaacagtgaaaccacagcagaatgatagcaattttcaccaacttctgtttaattgcttaacctgttctctcttgggattgtcagtaaatgcactgctcttggggaaaaatgtggtgagagcaaacacagagagaatggataagaaatactgaatgggccgggcgtggtggctcacgcctgtaatccaagcactttggggggccgaggcgggtggatcacgaggtcaggagatcaagaccatcctggctaacacagtgaaaccctgtctctactaaaaatacaaaaaattagcccggcatagtggcgggcgcctgtagtcccagctactcgggaggctgaggcaggagaatggcgtgaacctgggaggcggagcttgcagtgagccaagattgcgccactgcactccagcctgggcaacacagccagactccgtctcaaaaaaaaaaaaaaaaaaaaaaaagaaatactgaatgctggccaggtgcggtggctcatgcctgtaatcccagcactttgggaggtcaaggcaggcggatcacctgaggtcagaagttcgagaccagcctggccaacgtggtgaaaccctgtctctactaaaactacaaaaaaaattagcacggcacagtggtgcatgcctgtaagcccagctactcaggaggttgagacaggagaattgcttgaacctggggggcggaggttgaaacgagtcgagatcactccactgcacttcagcctgggcaacagagcgagactctgtctcaaaaaaaaaaaaaagaaatattgactgctaaaatctacgttttcccatgtatttaatgtgagcaattatgattagctaatctcaatgcttatttgtagagtatatcattaactggaaagaaataaaccttgagccactgaagaaatggctttttctataaattaaatagtctttcaaacataacaaatgtttttaggaactacgaaatttttaaatttaatactagatcaaatcagcagataaacattttatgtggttccttttagatgtggtacacattatttaacaaggtagttaaaacctgttttattaaatcatatcataaaatgtttattcccagtgcaatcaatactcatattttatattataaagtgtttaatattttccacctcttattaacaacaaattaaaattgtttgctagctgctgagtcagaatattttcttttctttctttctttcttttcttttctttttctttttctttttttttgagatggagtcttgctccattgcccaggctggagtgcaatggcgcgatcttggctcactgcaacctccgcctcccgggttcaagagattctcctggctcagcctcccgagtagctgggattacaggcgcctgccaccacaccccgctaatttttgtatttttagtagagacagggtttcaccatattggccaggctggtctcaaactcctgacctcaggcaatccacacccgccttagcctcccaaagtgatgggattacaggcgtgagccactgcatccggcaataatattttctatctatagctatatctacgtttaagcttttcactttcttgacaatgtttgatcatgaataaagttatttctctttattacatgactcttacttaattattcacagatgccaaacactggggtgcattttaatgcatgcacacatgtgtacccaccaaaggactccaggctatccttgcttcataaataactgtaatttcagcaacacataatattcctttattacaaatcaagtacaagaacagatagatttattttagtttgttaaactttgtgaaatggttaaatgaatattctatgtcattctgatcctgactgtttttcataactcatcttgcaagatagatatctactttttagtgacccccaacaatattccttggaacacatgttagcatatttttacattaacaatattcacttcctctgattttttttttttttttttttttttgagacgaagtctcactcttgtcatccaggctggagtttaatggcgccatcttggctcactgcaacctctgcctcccgggttcaagcgattctcctgcctcagcctcccaagtagctgggattacaggcgcccgccatcaccatgcccagctaatttttttttttttttttttttgtatttttagtagagatggggtttcaccatgttggccaggctggtctctaactcctgacctccagcaatctgcccacctcggcctcccaaagtgctgggattacagacatgagccactgcacctagcctctgattttagctattggtgtgaagactgagtttgttaaatattttaccttttctataaattaaatgactcagcaacttccatttgggtaagaatatatttaaagcacatgacaaaaatattttatcaagagatgctttactggcaaaggcgtattgaaaataacaatatttaatattttttcaactctttctgaatgtattaaatgaagggtttctaaatgcacaaaataaaaggtacaattaatagttattcgtaagatcctcataaaacctttatggcatacttctaaaaaactgaaaaggtaaatcagcgtgccaataatttcatggcaaagggcaaaaaatacttttgcttctaattctttgttcctgaagattttgaaaaataaaaatatgttttgatgatagactatcatgtgattttggcatataactgcaaatgacttttaaaaaatagaatgatactgctaaaagacttcttccattgcaatgtacctatttatatgaacaaagttatttagtgcttacattaattaaaatgaaaaatggaagaaattcatattgagggctgtctgattccagctgtaagcagtatgcgtccgcggcatctcagtaagttggatgttcccattaccatttcactttttgtttaacaagtagtcaacaaaacttataatgtatttttgttgtttggattaactgtttactactaataattaattttaataactcaagtaggaaaaaatgttaacctcagaacctcgtttttaattctagaaattaaaaattaaaggctttgtacatattttcattacagaaatatatactggatgaccaataaaatattttcaaatataaacacatgttagagaataagagaagtgaaatggactactaggagtatgaggcccgatataaactccctttgataaagaagagcccattcatgtgtttacaaaatgaatgatgtggaccctctggtgtacagattctatttctgtcatttaaaagattgctgtctctcttcttttataaaatatttgtcagtattaggctgagcactgtggctgtcacctgtaatcccagcactttgggaggccgaggcaagcagatcacctgaggtcaggagttcaagacccgcctggccaacatgatgaaaccccatctctgctaaaaatacaaaaattagccaggcgtggtggcacacgtctgtaatcccagctactcgggaggctgagagaggagaattatctgaacccgggaggcagaggttgcagtgagttgagatcacgccattgcattccagcctgggtgacaagagcgaaactccattaaaaaaaaattgtcagtttttataacactccaggagtttcactttttgctactacttaagcctgggtaaaattttatgatggacttaaacacttgtgaggaggtacattgttttcaaaattttgtatgtggggaatatattattaggaaaacagtttgaagaccaccactccataccattccaatagtaagcattctattcacttgctattttactcaagagattttgccagtatgctcttggaagagttcaacattgccatagatcatagggaaaatgattacttatttctgtgtctgcttaaagttttctgtgtgcttttttcctctgccattatcccaggctaacgtctacggtgcagggtgagggagggtggcatctgcctgccggctgttggggaatttccctaagtttctgctttgcacccagactccgtcttcatgaagccagagccgcccaagcttcaggaactggactccgattcctcagaacaacatcctctccaaggctggggtgtgcgctgacttgtgtagacacaagactataatgcagaccgtttgagaatcaacacacaatggggtctttattttcctacttgtgtaatcgctgagcaagtcatatcatctcctggagccttaattttctcatttgtaaaatgaggatttacaaagcatctttcacctgtctcttcaggattatagctgaagcagggaaagaaagctctttgaaaagtttaacgcaatttgaaacatgaaaatcttcaaggtcctaaaattggggggcatgctgaaggaaattcagtatcatttctttctgtaatatattcatctttaaaaataaaacaaaaaaagaccacaagtttggcgcggaaaaacaccaagggtaacgtagcatgtgtgtttctgggaggaaggagaggggagggttaaagagttcctgggaagaagcccaacttcttggctgaaatttactgaaagcctttgcccggcatgatcttgctctcttgtgctcatgacaaagaaatgtaacctttggccaattgcatttttgttccactggtaactaggttaatgtgaacagacagatctggtgagacagcatgggaagaaataacacatgggcttttgtgcagctggatataatgaaggtaaattgggtggaattcaaagatttgccagaaaaaagagagatgatttcactctaaaatcattttgcaagataatattttacaaggaaccttttggacatgcattataagcggttacattcccattgtcctaaaaaactccctgcatagttgtactctatttttatcaagccatgctctgacgcctcctgcctggttggcgataatccctaatgcaaagggatcgtgtgaaggtaagtgaagtcgttttgttaatgttgtttataaagaagcactgagcttctactttgtgcagagagctttacaaatattcatatgagctttatgaatatttacaaatattggcgcattaaaaaaataaaatgtgttcattttaaatataataatgtaggtgtcattgctatccccgttttaccattgcagaaatggaatttcagaggtgtcaggggccagctcaaggtcactgatgaatcaggacccgcttatccagctctctctgccttcagagctctcttgacttttctgcatcacttcctttaccaggaatgatatttaaattattccaaaatgtaaaatatagttagttttccaggcagttgtatttatttctggatttttttttccctaaataaaacctgtatctacatgaaaactcctccaggatttcctttcctcatgaagtgtgtggtttcctcaaggactgcctgggaggccctgaggccgacccactcctcccagcaatgacttggggaggagggagtgggggaagacagagagcaggggggtgggatgggagggcagagaggagggggagggatgggagggcagagaggagggggagggatgggagggcagagaggagggggagggatgggaggacagagaggagggggtgggatgggagggcagagatgaagaggcagaatgggagagcagagagcaggggaggaggatgggagagacagagagcagaggctgggatgggagggcagagaggagggggcgagatgggagggcagagagcagggggcaggatgggagggcagagagcagagggtgggatgggagggcagagaagagggggcaagatgtgagggcagagagcaggggagtggaatgggagggacagagagcaggggccgggatgggagggcagagaggaggaggcgggatgggagggcctgctgtgtgccctcatcaggtggatttcattcgctgggatggaagaggaggcatggcatagagacatgaagttctagaatgtttttggccactctctgcaaactcaagacttttttgggggggggtgggcggagagtgcaaataatgcctttttggagttgtaattgctccctgggagggttaaatttttaatgatttgtaatgtcctggtaggttcctgcattcatgaactgcttgggtgaatggctgtgatttggaagtgaggatgggagagaaagagagaaaggcatgatgggaacgtgggtcaaattgaaactcctgctctgacctcatcccttccgggggatgactcttattatcctggttggctacttgcaggcatgtctatacacaggccacctggattaagagccattcctcagggtctcctggctattgaaatgtctgtatctgtaagagtagctttcagtgtctgaaattggcctttcctctctctctatgtgttaggttccacctggtattcacttagggagaccggtcaccctctgcagctctgtctcactactgggtacagtgaagaggtttacaagcttggtagcagtgcctatgaaaataacaactaggatgcttctgttaccatcacagtcacccccattatccaagggggatacgttcccagaccctcagtgtatgctgaaatcacgggtagtaccgaccctatatatgctgttttttcctacacatacatgcctattacgaagcttaacttataaattaagcaaagtaagacattcacaacagtgctacagcagagcaggtataatggtgcgaggaccacgacacaagctacgtgaatgtggactcccgctctctctaaatatctcattgtcctgcgctcatccttcttcttgtgatctatagctctgctatcccagatggctactaagtgacttctgggcgcgtggtgtctacagcgtggagatgccagacaaagggaggatccacatccaggtgggagggtgtgagatttcatcgcacaactcagaacagtgagcaatttaaaacttaggaagtgttgagctggtattttccatttaatatcttcgggcctcggttgactgtgagtaccagagactgcaggaatcgaaaccatggataagcggggactcctgtatgcgctttggcagtgactggtggcgtggatgccacaaggcaggggagcctgggctaggctggttgctgtctggaaaaggggccccctttggctttttacacaggtatggccaagggatgtgacctcacctgagctgggacaggctgtgtataaaaaccaagcatcataattctgacatcgtatattaatgtgttcctgaaaggaatattaaataatgcctttctcaaagtagtaacattagtgtatctactaagctcacctaagcagggctagtctgtgacatgcagaaaataagcataacgtagtcaaaggcatattttgaaagtgaccattatgcaactattaaaataaataatacctttccccaaataggaacactagtatatctaccaaaggcaggttgctggtgactacttgattggtaaacatttgtttattcttcccttgtaattgacacagtaattatatgagcccacatctatcctcatccgtttaaatacagagctggtgtgagtcgtactaagtcaggatgatggtatgtgggtccgtgatgctatattccatgggttaatataatctgcacatcatttaactaatccactgagggagctggtctgtcccagaagttttgttattaaatggaatagtcaatgttcttgttttcttacaaattcacttacagggagaattctgttaatttttttttttttttttttttgagacagagtcttgctctgtctccaggctggattgcaatggcgtgatctcgactcactgcaacctccgcctcctgggttcaagtgattctcctgcctcagcctcctgaggagctagaactacaggcacacaccaccacgcccagctattttttgtatttttagtagagatggggtttcaccatgttggccaagatggtctctgtctcttgacctcgtaatccgcccaccttagcctcccaaggtgctgggattacaggcatcagccactgcgcccggctgaattctgttaaattttacatacagcatgtagggcagaagacatactttaaactcataggttttcttactttcactcagaagggaagggaaaacagtacaattcggcgaaataggaaatctaaatctttcaatgcatgggtcatgtggaaaccgagagagagaagaaaatcgaaaaatagatgatggatgttgttaaggaattagtaaaccgttaagtgctctatcattattagatattcgggtgatcatcccgcatgtagctatttgaccaatgctgcttgtaaattggcttaggaaaattaacatacattttattaaactgacgagtatgccttttactgaaagcaaggaatagacatagccattttgtttaagaaatataagcacatgagaggcttaaaaaggtaggggttgtatgttctcagcactgcagctaaattcttaaatggaaactgttcttttagcagtttcagagtaggctatctcaagctgattgctacagactcaaattttaagtcgcatttctttcagaaacagaaggaaagtcaatctcactttcgaaaagagaaagtaaggtgacccttgtcatagtaacataatgcagcaggtcccaggtgtaacccggaggaaaaggcagacaaggtcctgcgatgccgcagctgaaaggaagctgacgccaacgggcttctcagaagaacaatgactcattagtcccgggctcacggcagatgcggtctcccaacaactggcctccctccaaaaacatggaggaaatcaagagggcagagccgggaaggaggctgcatccctcgcctgatggggagcactcctagcaggcacagggtaatcagaaaagtgctttggaatcacaaaatgaaaaaacaagtgtcagctgtgggagatgtagaaatgcaaataagtacgaatgcaaataggccggataaatggcagtgtgcaatcacccaaagctctgtttacaacccgaaggcagctccgtctgtaattatctgggcgccattaactgcgtgggagcagctctcaacgggtacaagagagataccaccagaagtgaaatgtcctctctcccgtgatgaagccagatctccgagcgattccatctacactgaactaaaccggtttgtgccaaagagctagaagtgtacctttggtgaaacaaggaagctagatttttttttattgcttactgcgcatctgaacgtaattcttgccattaattaagaaaacagatgataagagatttggcttcaataaacatgtactgaaagctaccacatcattgagtttaattatgcaagcaatctcgtggggcaggtactatgagctcagatagacttggtcaaggtcgtcccagtagagctgagattcgagcatcagtattttgggcctaggtttttttgttttttgttttgttttgttttttgttttttttttttgacggagtctcactctgccgcccaggctggagtgcagtggcgcgatctcggctcactgcaagctccacctcccgggttcatgctactctcctgcctcagcctcctgagtagctgggactacaggcgcccaccaccacgcccggctaattttttttggtatttttagtagagacggggtttcaccgtgttagccaggatgctctccatctcctgacctcgtgatccgcccgtctcggcctcccaaagtgctgggattacaggtgtgagacactgcgcctggcctggccctaagtttttacccttcccattatgtcagaagttctcagttgacaatgtctggagacatttttcactgtcacactacagagtgccactggtgtctagcagacagaggccagagactctgctaaacatcctacaatgcaaagaacagtccccctgacaaaggattatcccaccccaaatatcaagaatgctgacacggaggttgagaagcctggcatttccccattgctgcctctgggaggctgcctctcgggatagattgaattgttctgcaaagacatggtcggcagacacagagggttccctcaccaggggtctgggagttgctggaaatggataagaaaatcctagttctacctcgcagacagggaggaagtgaagaggtgaggcagtaaaaattcataacatatctatcacaaatgcattctgagattgcttggatctaaattgccctttccaaacccaagagatatttccaatgccacctgaaggtcctgagagctccctgacatcattcaggactgaaggtagaaagtagaatggccctgggttttctgagggttctttatttgtcttcgagaatattaaagaccagcatctctccagaatacaaataagagtctaatgtgataagaggctgaactgaaggtgtccctagaaaatttaagactaaaatgtcagctgaaagacaaagagaaagatgggattgttcttgcaaaatctcattggtaaagagagagaggattttcctaacaaaaatgttctgaactacaagcatctcagagggatttttgaattttggccagctaaacaccatcaggggttctggggggttagtcaaataaagtcagaaagggcctatctgcggcacaaaacacagcacagccaaagctgtggccaccgcaggaggagcaggagagaacctggtgaggagcaagaaagagcagctcagctctgcggagaagcatggtgctcagccatcactgctcgagcgtgaagagaagcgcagtccatggcagtttgggatgtggttggaagctctgcatcacagttcacatacttactaattttgttgatttgtgagctacagaaagagtctggggtcctgtccaggtgcggtggttcatgcctacaatcccagcactttgggaggccaaggcgggcggatcacttgaggtcaggagtttgaaaccagcctggccaacgtggtgaaaccccgtatctactaaaaatacaaaaatttgctgggcgtggtggcacgtgcctgtgatcccagctactcgggaggccaaggcaggagaatcacttgaacctgggaggtggaggttgcagtgagctgagatcatgccactgcactccagcctgggcaacagagcaagactctgtctcttaaaaaaaaaaaaaaaaaaaaaaaaaggatctgaggatctggggtcctgagagctccagttcttccccgcagttcccagagctgctcctgctgatacaggttctgctgccaaggcatcccaggggcctcagggtcccaggaagggccaaggctgcagctgccacctgcctgggggctcctcggccatccggcatcttccctccctccatccctggcctgctgttctgagtctctgagaagagcgtctggcggctggcaaaggggctaccatggaggaatggtcttcaggaagtggataaagctggccctgcctcatgccaatcagcccagcaagcagggaggacatcgccaatgagtttctggttttcacttcagaagttatagagacgatgtaagatgaaatactgttcagtgggctaatgcagccacacgagtgagttttattttcatccctactttaataaacatacatgtgccaagctggctctgaattatttaaaattacagcagtcagaagagagaccttctcaaagtctgtcagaaagatttttaatcatctttaagtaaacttcaatttctctgaaattgaaggagaattatttctccacttcaaaagtcagtacagagccattgaaggggctttccacctcctacgataagtaaaaacataaaatgattagcacaaaaaatacaccatgaaatgagtttaaagtccttaatcttgaaggctagatttaagacactattcttactgtccacaaacaggtttactttagtgatcataacaaatggcttttattcagaaccattactcagtatgattttaaaatctcgggcttcatcttttggataattcacatgaccttctccttagtgggcgagtacaagaaggcactgaatagcgtgccgttccgcaccaccaagcggaagggcagcactgcttgtatctaaggtggcgacctggaccaagggtggccttcgctgtcttggactggacgggctggactcccagctgaaggtggcttggaatttagctgttccttcggggccccgcttacacaccaacacccatgaatgcttttcaacgaagttgctagaatgcagccgtggagacgaacagcttaccgagagcctctgccaggaagcaaaagagaggttctcttccctttcattttggacatcgtaacaactaaacataacatttatatcactatctgtcagcagtttaacataaaccctctcacttactgccaatgtgtccacgctgctcctcaggcaagccattctccccagtgcacagatgaggaaatcggggctctgagaggttaactgacctgctcgaggtgaagaaaatgagtagggattagaatcagggagcgaggccgggcgcggtggctcatgcttgtaataccagcactttgggaggccaaggcgggtggatcacctgaggtcgggagttcgaggccagcctgaccaacatggaaaaaccccatctctactaaaaatacaaaattagctgggtgtggtggtggtgcatgcctgtaatcccagctacttgggaggctgaggcaggagaattgcttgaacctgggaggcagaggttgcagtgagccaagattataccactgcactccagcctgggtgacagagcaagactccgtctcaaaaaaaaaaaaaaaaaatcagggagtgaagttcctccaacacgcgtggtcttatactatgtcactgtgacttaccacatgccctgcatggggcgggggaactggcgtgcattgcctaaatcaagcgcaggagtttgatggtaccacgaagcgccacagggtgtgggagcctgagaggtactcacgcaatgcccgctggaagataagttcattgtcgcacagactttgtaacattgtaaggaaagaagcctgacagtagttttacaaatcacaccatataaattattaatggtaaatagataacccagagtggacagtacatactgcaatttataagaacaatcagtttttttaaatggtcataaccatttaaaaaaaaagaaaaaaagagaaagaaatcctccgcagtcattagttcagtcagttttacctttggtagaaacaagtgtgcttcagctgctaatattactcctgcctaaactgatgccccggtaggcagagccaaggggttaatggaaagagtggagcacgctgagcattttgccatcacagatgcctctctaaacgtctctagctcaagtaataacggagctgcctaattgcagtcattaaggagcctgtgactttaaatgacaaaggtagagatgctggcatcagcagcctgttagcatttaatttacatgaaattcgattcagtgtgcacgaactaactaggaggcgccaggcttaggccttaggcagacaaagagcaaaagtgtgggaggctgggtggggccggtgagctctggagcttctggctcctggactgggggactgggaatcggccaggccaggcccagcgggtgggagctgcagataccacttctccaggacccatcccagggcagcttcatgggatgggcctggctgagtgagcttcctaaggaaatcctcttgcctggaagaggctcccaatcatctgtcaacttgtctttcctatttagcaaacgattgagattctcttccttaaagacacattctctgatgaacagaatgtgctctgtaatgggtttagccaaagcatccccaccaccttcctccaggaatgtgtatgtctgtgtgaagtcctcaaggtcattagatctcatgaatttactccggcatttccatttccatgcatgctttttccatttagactaaactagcgcttggggtgcttgccatgctccaagaagtccctgcagcccctggttagtgggagacgcagagcaggcattcagtcagcaaatattaattgacgtggtgaggttgtgctctgaaaagctgagttcctcctgagaggctaattcactgtgctcagcctgtctgcgggtagcgagggctcctgagtaacagcgagctttgcacgagcgctaccgcgtggcggtggaaacatttgttccccttgatgaatgaaacggcactcttgacatgctgtacggacagaatctttacatgtcgtttattttgcatttcaaatgctttgaaaaaagccttcccgtggttttggccagaggtatttgttatcagtttaatagatttattcctgttttgctaaggtatgtaatagttatttatttttaaaaaaagccagtacctctccagtcttcattttcatttatccttagcatggtcttttctaaaaagggcatttggcacaatatctttttttgtttttttaatctctaggtaaccaacccctgcctacattttactctggattccaagagtagactgggcttcagggaccagatgccagggctggcacatctgcctaaaacccataattcttgaacttgacgtgctcagcctctccaaagccgcggcgctgacacagctccccctgcacgagtgtacagcagtcagacaggaacggggagagggggctcaactttctgacggccacttagaggctgcctgaccacaaagacaggactgtaaaacatagaccgcatgtgacctgctggtgctcggcactgacccaggggaggagggccacttgggctggaatgcagttgctgggggctcatgaggggctcagtggtgcccctggccaccgagtcaagcagcgtagattgatcagaggagctgagagctgaggcccaccctcccctttctcctacacatggacacctctgagtggaataagggaagactgtcctttctccaagcttgaaggaagatgactgtgactcttttcctggacttcaaggcatcgaagtgtcagctggctgccatcccagcgtctgacagggcagcaggagaaagaggccacctgtatcatccacccgtgctgcagctgaatgggatcggtgcagcatgatagaggccagctgccccgcaccaggtctgcgtgtcacagggcagagtgcatggtctcccttcacgtgcggggccaggtgactgcacagagtgatgagctgggcccactttcctgctattggccgccagcaaagaatacaaggggtttcccttcccttcccttcccttcccttcccttcccttccctatcgacagccttgcagggtggtggtttcctttgcccggagagttcagaggccttagttctggaaagcctcctgtggggagatggagtggcggggatagggaccagagcagagagggcagcagcataaacaaagaggagaggcaaactgtttgagcccaggagtttgagaccagcctgggcaacatggtgaaaccctgtctctataaaaaatataaaacttagctgggtgtggtggcacatgcctatggtcccaggtatctggagcatggggtggtggtggggtggtgggaggatcatctgagcctggggaggtcgaggccacagtaagctaggattgtatcactgcactccagccttggcaacagagagagatcttatctcagaacaaaacaaaaaaattggagaagggatttctctgatttctccctttgggaagggaggcttggaggctgcctggggctgagcagggagcaccatgcttgtaggcctttggggaggtttcgaggtccaagtgtgacttagaggaactgggagatgccagcagacactgagacccaaaggggcctggcttgggacctatgcagctgtgggaggggaaaggccctccccgctaccagatgcagactctggtgccctgaagcctggcgtctgagccagatctgactttgtgtagaagcataaaaggagtaggatgtttgtgatggctgagcgtcatggaggaattcatacctgttcctggagcaatctatttttaaccttgttaacctgaactgtactttaagattgaaactaaatgcagcctcttttctacccatgatttattagacctcccctttctatcaaattaaagctctgcacaaacgaaacaattcatcctcatctaatttataaccatcctcccacactaggaatatggagccaggaatgagggaggttcacgtgggaggtggcaactgcagaacagacagctctttggatttctttaaattgccatttaattccatccatcaacccatttttctgctgtatacatagaaaaggacaacagccactccctcaaccaaatatccctacattcagttaaaagctactctgtaccccaggacatgggagcagctcctatccttcccaggtgaaaaagtgggctttttttcccccttaaggctaaataggatttcttttctgttagctatgggtaggtgacttcttaatgatctttaaggaaagaagtcaatacaaggaaaatatccttttttaatcccattttccttctcaccccacactgagcgttactatagcaacatctttcctgctactaggacagttaagtccccctgtgaagttaaccgaaagctgctttttcactcagagaatgggctgctgttcattgaccagcttttcctgcgtgtctaaattcttcggttctctctgacatgctcaatctagggtttcccgcggctaaaccctaaaattcacttcgaaactcctaacagcagaattccccaaaccttttcagaactgaactcattagaaatgaatttacattttgatttagttataaataacttttcttctgtgtattggtttaagtttagaaaaggccccctgtaaagaagacaagttggagaataatctcccatattcctctgccatcctttctttccttcctttccttgagatggagtctctctctgtcgcccaggctggagtgcagtggagtgatctcagctcactgcaacctccgcctcccgggttcaagcgatgctcctgcctcagcctcccgagtagctgggactacaggcatgcaccaccatgcctggctaattttttgtatttttagtagacacagcgtttcaccgtgtaagctaggatggtctcgatctcctgacctcatgatcagcccgcctcggcctcccaatgtgctgggattacaggtatgagccaccgtggctggcctcctttttcttttaaacacatacatacatatatgtaaaaacaaaagaaaatttcaggaccttccaaatttcacaggcctagaggaaagttaagccctggaaatggagttgtgagagcaggctgttttttctctctggtgcgtgaccactgcttcctgatttttgtgttgagatcttagaccttaaccagacttatagccttcattcaaaccagactgaatgatgtgggaggtagggaccttggtcattgttatctctttataataaaatgctaagcaacccccttagagtgaagtcaacagtagccaatcaaatcttacatctgtgtgttagccgttgtatggaaaacaccgtgattctgttcagcgcctcccttttgcctccataaaagatcttcacttttccccacaccgtaatatttcactggattcttggaatatcagaaattcatcattctttggtgtctgcgtatctctgaatggccactcccatgcagcccttgaatgaattacttaactggatcctaagcattttgattattttagatggacatatacacatgcatatacacgtatgtgtacatacacatatgtaatgaaattgttccaaaacacagaaaatacaaagactaatgtaatcaggactcacatatccacatcttagatttaatgctgatttcggggggcatttttgcttcaaatttgtaaaaagcaaaggttacagacataaagatcttgcgattctcttatcccagtttcttccgtctttcttctcttctttctctttctctgtcccccgaggtagcatctatgctgacgttcccgtatatcttttccatccaaatatttgcatttttgctacacattacgtgcaaggcttttatctgcttcctcctaatttgtgggggcaagaggctagacatctctggctggaaaggcactccctgcagatctgggaagccatgagccacaggagcattagctgttcctctaccctttcgtttctttgctggacaatccttataagctggagtccaagttaaccttcccaaatgagtggcactattattttaaaataaaagcgttcaaggtagaggatgactttgggactctggcaacacaggaagcccagtgtgttctccccaaggtcacattaaaaaggtggtgcatctgagatggtgactgctcagaataaagtgataaggggacaaaaggtggatggcttacttacaggtgttatgaatgagaccatcagggctcgggtaagaacattgtctgggataaatggtttgtggttattgatctggaccaacctgatagaaaagaagctgtgtgtattattattacaatttcttggtttatgcttgcaatttataatttgtatgctcagtcaattctgccaatataaaatagtaatgccccggtttcaaaatctgatattggattttgtcccacgatttagcatgtcctctaagcaaaataactgtccaaccagatcacttgccttcaacaacttaaaacacaagtaactagggagaaaaacaaacaaagaaacataaactcaaagaaggtttcaagattgacatagagaaaaatcttttctcatctatccgtatgtactctcccactgctcatcgtgggccccagggaaaggcgattttattcaaagaaggtaactctgaacgtactcagggccgtaatatgtgaaatgtctcccagtgtttgacaaaaagactctcttttcatgttcatattccatggaaatcttaagtcaaagcaacaataaaataagctgacccataagtgcacgtgttgaagaggctcagccaagaaaaactgtttggtagttgctgaaaactggcatctagacctcaaagaggaaatcagaaccaaagtgcagacttgtcccaccagagatggtgggtgttggactgagtcagcgacagtgaggcactgactagacttccgtaaccagccatactttctagtttataatgacattcatggttattgttctacacagacaggtgtagggaagcaatgggaaagtgcaggaaaacagaagcattgggaatggaacatctttggtttctccatttcaatgcactgccatgacccccacacccacccacgagactttagctgttccagagccaacggtgcctgcctctttgctgatccattactcattctccctacagctgcctcatagctttggctcccaagaggtaaggtacaggtagtctggctgcctgcattatcctccagcctcaaaatacatggggaactgaaaataaacaaactgttgattccttgagcttaagaaggcctcttggtgttcctttataccttttcgagtctctcctaagatcagagagaggagtgaagagggggaaggtgtatggccaaaggaggacttgccctgattgccactggcaaagacgctgagccttagggaccatccagaggcatgcaggacccctgctgcagcattcttgaaaaatgatgtcttcctacgcctccctgactcaaccagaagctcacaggtaagaacacatcccatgttgcgaagctccatctattgtgagaacttctgccctgccggctgcctctgacatgccacatgcaagtgataccatttaccctactttgcaatacataacaatctgcactggtgtttccaatgcccaattgttttcttgacttctccataagtttcagcatatctataaaccactcataccatgatttacttaatgttttctttttcttccttttttttttgagacggagtctcgctctgtcacccaggctggagtgcagtggtgtgatctcagctcactgcaacctctgcctcccaggttcaagtgattctcctgcctcagcctcccgagcagctgggactacaggtgcccgccaccacacccagctaatttttgtatttttagtagagacagggtttcactgtgttagccaggatggtctcgacctcctgacctcgtgatctgcccaccctggcctcccaaagtgctgggattacaggcgtgagccaccatgcccggcttgttttcttaatttaattaaaattattccaaaataaatatcataccattaatgtaaatagaaaacactgaattgtgttacttgccacacatagaagacaactgcaaaaaatcaacaatatgaatgatatgaaagtcaaacacttttgcctgtggaagagcccagggcctgcattcttgtttttaaagaggcaggtaagcaggtaatagagaagccttgaggactagaacagaaccgatggaaagagaactggcaaggggctaacttctgcatgacgtgtttccatgttatttctcttaggtcccagcaccgcagaaaatcatcttgaacacctcccaaggccaatctcccattgcaacaaatgaactattaaaaacaggggtctcttttatcctaccgtcatctcatttccagataaaacacctccagtttcttcaatgacttccacgagaagacctctctggagaggtctgaacattgtcttctgtcagctccctcttgattttgggaccaagcattgaatataaagttaggatgtggcctgattagcataggcagagtactgagaagccttccttgtgcctgtcactacacttccatcaacagactccatcaacaggaggcaacgcagcctcaggataccacctgcccacggcccacctgagggaacctgctgcccacagcctctgctcccagagggacctacccagtcccaaagctgaggcaccacccatccttgaatggccagagtaacctgtctcaagaatatgagcaagatgattccaagagaaagtggcagtcaacagtggttttgtacaatgcggataaatattagaaaggccatccaggatgcgtcatttgcaagcttgggtggacaggcagctgccaacagtgacagcaggtggcccatgagtgaaacttagagaattaggggactgctttggtcttggcagatttcctggccagtccatggaaccctcaaaataggtcccttaattttgtagaaaaatggtgtcacctttaaacgttgtaaactacatttataaatttaagacattcttttttttcttttttcttttcttttcttttacttttttcttttcttttcttttctttttttgggatggagtctcactctgttgcccagactggagtgcagtggcatgatcttggctcactgcaccctccccctcccgggttcaagcgattctccttcctcagcctcctgagtagctgggattacaggcgcaccaccacacccagctaatttttgtatttttagtagagatggtctttcaccgtattggctaggctggtgtcgaagtcctgatctcaagtgatcccacctcggcctcccaaaatgctgagattacaggcatgagccactgcgcccggccttaacacactcttaagtacttccaaagtctgatttaaaaaatagttttgtttttcctgaggacttaaataacttataaataaatcaaagcaatagatatagtgcgccttaagttctctgaaaggctttgatactgtttacaaactttgtcagagttcaatttaatatccctagcctcagtcaattactcaattgtgtttcaagctaagtcacaaggctgagctgtttcactaattaaccacattcctttagaagttcaagtatgtataaattccttaatacaaaatattggttctgtgttttttaattctttaaaacatttctctacttaattctaaatcttttagggtgaaagatgattagctactaaggaaactattgcaccatcccacacaactattttaggtgatgttcctgtattatttttgggattgtcctctcaatttgcttgtagttgcgttataatcaaaacgtttagctggggtgctgactagattcttcatggtgaccaagtgggttccatggagccctatttatagttgccatagtgatgattccataacccacaggcgaggggcagggagcccttgactttaaatccaaattctctctctctctctctctaatatcatatatattttatatatatataaaatacctccattcaagtcacttggcagaattttgcactattgtgctcttaagatataaatatatttccatctcaaggtcacgtcaggcttaataaaattctgtattgtcaaagtctatacaggaccacacacattcttcgtgtattcaatcgcatttttgatatctctcatagccatttttgatagttgcaaattctaaggccattcattcccacaatctatttgatgaaagtttttaaaaaatggaatattcaatcctttatagccaatgagggcctgagccttgaaccagtgaacagtactgagtagcagttaggagggcggggagtcagactgcctgggcttaacgtcgtggctctgtcactcatttcgtactcttaatcatcatgctatagaaactcccacaatgtgtgtgtgtgcatgtgttattaaatccttcagatacttctcagactcttgcctgtgtagataaacaacgtgtgttttctatcaccttggcttgtctctagtacctggttttttaaccaaacattactctgggtgttgtggtgaaggtatgttgtagatggggttaaaatctacaatcagtgggattgcccttgataatcttaacgggcctcatccatttagttgaaaggccttaacaggtttctcagaggaagaaattctgtttcaagattacaacatcagctcctgctccgttcccaaccttctggcccgccctgtaggattcagacttgggggcctccatggctatgtaagtcaattctttgaaataaagagaactccaactaatgcacaacggtcggtccatccctccctccctccctccctcccttccttcctcccttccttcctttcctcctcccctcccctcccctccccttcccctctccccaaattcaaaaaaagttaactttatgattaccctttctgggaatactagttgttactatacacattattcacatagaaaaatcagtaatgtaccagttggtagttgaattcttcagagggaaagattagtatcttattttttatttaatgagatgaggaactaaaagagcattactattctttactacaatatataacagaagtgttttcttggtgtctgcaatgcaaattctgatgtcagtaaatacattgagagactaatttgtcaagcaagcacagaccacacatggtttctttttatttctttctttctgagatggaaggaaacctaaaagtaacaatgtacacaactcgctagggttgccagcagcattttggcgatgtccccttgggtcacagaacggcagcatgggttctataggtcggggtggcattagcactgacggcacatagcctgtgtcttttgagctcactttccatgttatcctaggtcctgtgaaagaaagacctcaggctcacgttattagatccttgggtaattctccatactctgaagttcttgaagaaggcactggctggggttagggtggctttgggaaacccttgactgcttgaggaatcctttccaattccttccttaaccaggcaggaggaacagcagttcattcgtggtcttgagtccaggttccaggttctaagcttggtctatgcttttggtgtgctctctaactcaatgataatgatagtcatggaagtttcttaatatctggggttttgaaactgttagttcttggagcaagcccaagtttattttgggggaactttgcgccagcattgtagttatactgaaatttagaatatgtgggttgaaaagcaccaaagccagtgtgagaaatccagcccaccattagggctactgaagtcccattaggttgactactttctggaggccaattgcacttaacttggattcctgagtgactttctctggtccataacttcatctaggtcactgctgagacatcacctctccagtaaaaccatctagcctgtctaaagtcatccttccactcccccagttgtctcagtttctctgtcttttcttccccagctatatttttcttcataacactggtttctctagacattatattacatctagatttgtcatatcctgtctctcctattagaacatagacttcttgagacgatggactgtcagtttggtttaatttgacacgtgttttttttttttttgagatggagtctcactctgtcgcccaggctggagtgcagtggtatgatctcggctcactgcaacctctgccccccgggttcaagcaatgctcctgcctcagcctcctgagtagctggaattacaggcgcctgccaccatgcccgactaatttttgtatttttagtagagacggagtttcacaatcttggccaggctggtcttgaactcctgaccttgtgatccacctgcctcggcctcctaaagtgctgggattacagatgtgagccaccacgcccggcctgacacgctgtgttctaaacacccagcacaatggccagcatgcagaaaacactgcagaaatatttgctgcatgaatgacttgctatttacatcagcctactaaatgctacccagtgagtagaaaaatttcaaatgaaagcatcctaatcattcctttttttatagaggcctatcagtgtaggctattctagtggaggaaatcacatccggtccctggtgccatgaagttacagaaatattaggtgcaggccaggtgcaggggctcacgcctgtaatcccagcactttgggaggctgacgcgggcagatcacaaggtcaggagaccgagaccatcttggccaacatggtgaaaccccatctctactaaatacaaaaaattagccaggtatggtggcacatgtctgtaatcccagctacttgggaggctgaggcaagggaatctctcgaacccgggaggcggaggttgtggtgagctgagatcgcgccactgcactccagcctggcgacacagcaagactccgtctcaaaaaaaaaaaaaaaaaaattaggtgcatacaaataaatacatatacacatactttaactcatatcaacatattatagagaaacaaatattgaaaagaatttcaaggctggccatgtgtgtttatagtttcttccagttcaaaatcactatgaaaaaatgttttcctaaggagaacgttggcctctaggggaagcaaagggctcctgtgttgtgatggttaatattgagtgtcaacttgattggattgaaggacgcaaagtattgttcctgggtgtgtctgtgagggtgttgccaaaggagattaacatttgagtcagtgggactgggagaggcagacccaccctcagtcaggatgggcgaaattgaatcggctgccagtgcagctaagataaaagcaggcagaagggtgtggaaggcctagactggctgagtcttccggctttcaaatttctctcgcattgaaagcttcctgccctggaacatcagactccaagttcttcagcttttggactcttggacctacaccagtggtttgccaggggctctcaggcctttggccacagactgaaggctgcactgtcggcttccctacttttgaggttttgggagtcagaccggcttccttgctcctcagcttgcagacagtctattgtgggacttctccttgtgatcgtgtgagtcaattctccttaataaatgccccttcatatattcatctatccaattagttctgtccctctagagaaccctgactaataatctcccacatcaccagcttgaatcctgcccaagaataaagaggatcaaggacagggcactgaactgtaccaaaagaaagctgctctttgggtttgcgaatgctgacctgggtctgctttgtatgggtggtcagagggtgaaagggtctggggtacatgcacatgacccttcctcttcctcttccacccacatgcccagagagctcagggcttcctcaggagaagagatggtctcattgctcagggaaccttttctcctaggcaaacagaggtagtgtggcagctggaagaggcctggagtggtacttggactttgaagccaaacacttgccctctcagagcctttgcctccactgtggtcctaccagagagctgagttcaggacctgggtttgggcgtggaagggcggtgtgagagcaaggctgaatagtccaacttcctcctttaacaaatatccactgagcgtcttcgctacgcaaggctctcttccagaccgcttggttctttggagtccaggagttctccactcggtacacccagttttaccaaagttaaacccatgagattttgtaataaagccaaggctaataataatgcattccattacttttcctacacatgtgtctctgttaagcactttgcaaggaggatgggcagctgggccaatgcaggatccaactattcaagattcctccacttacacaatatattgacactaactctgaatgcatccctactgaatagagaactctagtaatttctactgaaaacatcaaataaaaaagctactactttaatagaaattacctcttctaattgccctacaatgatacaactgtattctgaaaggatacatggatgtcatataaataactcaaaattcatgtttatatttatgtacagtgcctagaacaatgataagacatgactgctgaatgtgtggatagatggatgggaggatgaatggatgcatgaatgaattaatgaatgctctgtgatctgagggctgaagatacattactgaaaactccaagaaggtcagaaagcaaaatcaaggaatatgaaaatctactgttaggtacaaacgtgtctctagagaagagactggttctgaaaatagggagaatgggaaccaccaacttcctgtgtgtgtgttaccacactcttaatatgaaaacatgtgtgataagaagtccaacattttgtagatgaccgcacatgtaagttaaagaaatagtggccttcttttgtctttcctttgtagttttttgggaaaaggacgccaataatcaaaagacctgcagaaaaggtgatttggtgtttcaagggttgtgggcttttatgggacacaagctgaactgtcatgcagacaatgaccgccttctgatttacttgggctgctcaaaactctggaaagaaaaatagaatatcctagctgttatgggaatacttataagaagaaaaagagaaatacagctctttgtacattcagattcctttagcttgaaagaaaaagggtagcctcctttaagaaaacctttgggtttgacagaacataaataaatcttagtgcagctgcttatcgagctaaagaaggcctggtgtctctgctgccacttacagatttcagaaacgtgttgtcattctttaatcatgatcattattggagaatatgattgaaattttaattattaagtagggggaattgtgaagcactttcatccagcatctcgggtgcctggtgtgatcgaccataagtgcagctgatgcaaacctggaagccgttatcacagctccctggccctcgccgcggtggaggcagccgtctgtctacctcctgccggctgcctgtctcctaaaatgtctgcatgctgtttactgcagagccagtgtttgaaccaaatgctcagtaatgtgaaaacatcaattatttccttcctacatttaaatgaactatgattacccttgatttaatagcaaaggagcatttccaaggtacaaaaacatttcagccattaagctcaaagtttgtgtttaaaatatatgtttgttttcttctacagagcaatgggcactaaatttattagcttcgtgctcaccatgacagtaactccatgtctgtggaattctgtagtctgcatgtgttaggctgtgggtaggcaagcttgtcaatggagaaatactgactttgccagaaattcgtaaatttttaggaaagtgaagagcatatggtcactatgacttgctagtatccttggtctaaaccttataattaccagaagccattttcatgtttttttttttctttttaaagtgcatatctttatttggacagcctcaaatcccttcatcttatctggagggaagacaggaatgaaaaccatgatagtatccaggagggattttaaggcaaggctgagctttctaaagctacaagcacttccttcctcagagagtgtctgctgacagccagggccttgttagtggcccagtagccaaaagaagctactttcagaagtggtacttagcacctgccctcagtgatcaccatttttcaggtaagacttgttctccaggttaattacagtggaaacctgatcgaacttgacagtcagtgtgtttgtgggcttctcttcctgccagtctgcaacctaaaggaaatgctgtggtctctctcttaagaatgagaacattctcagaaatgcccttgaagtgactattaattccagaatatggtgtgaattaagtaattcatttggttttagtttacttttgagaaagtccaagctgtgcacatgttgaaataaatcagaggcctgtttacaaatggagccaccatttcttagtgtggagtgcagggacctggttctgagcaaagtagtgggaaggatggaattccctgaatccctggatctgttcacaggaatgcctagagcttctggcacacagggtagcaggccttcctgatgccccagcttctctgagatccatcctgctgtcagccctagaactccctcacaagcaagctattttcccgtttttctcatcgctgtttagaggtttccacttatatgtagatttgtccagggtcctaggaaactagctaactggtgccaccataacatttgctataattataacagttcagttatttggttttctctttgtctccttcttcataatttagaggctttcaatgacttacccctaatgggagatttctggcccagaaatgggtcagcagaaactattatattgaaagttggtttcttggtgctgcttacattattttatttagataagaaaatggctgttgatattttgtaaaaaaaaaaatctatttatccatcaaatcacatatgcttctttcctttaattcaactatccatccatcagtccatccatccatccattcatccaaccattcaacttttaatgtgtccccacagggtgaagcaggcatggtgcaggaatagtacgaacaaatataaacagcaattgatcctaccctcaataagtcatctgcttagaggacagattttggtggtaatacaaccaaagtttataataggaatataatccgtgttattttaggatgtcacagaggttgcaacaaaagattattttatttaattcttgttgatgggcaccgtgtgtttacagaggagagtgcctttgaccaagatcttgaaaagtgggttagatattgcttgggaataatgggcaaaggaggtgccatactccctctggatagtctcaggcccaaatatccatttaggatctctggaatataatgggctatacttggcattggagtcatttagaaggacacaggacaagaagcagcatatcagcaggaagggccaggggacacttctctgaacccccgtgatcacttgggtttggggaaggagacatgctggtaggtaaggagcaatgctggggtagaagccccaggtgccacatgtgctggcaggagttccgggggcacaaggccaagctgaagaagacacaacttcatcgccgtgagcatgacttccagggatgtccacagctgtggcttctcccaggtatttatagttcatttacagtcctgcctgtcaagatcccacacaccaaccaagagttatcttttttttttttttcttcagatggagtctcgttctgtcgccaggctggagtgcagtgtcacaatctcggcccactgcaatctcagactccctggttcaagcaattctcctgcctcggcctcccaagtagctgggactacaggtacgcaccaccacgcccagctaatttttctttcttttttttttttagcagagacggggtttcaccatgttggccaggatggtcttgatcacctgacctcatgatctgcctgccttggcttcccaaagtactgggactacaggtgtgagccaccatgcccggtccaagagtcatctttatcataagtacttactgtctattaaccccataaacattccacctgcatcagtttttcagaaaacagaactgaacgtcaagtttgtcctcagggacagagaaagagttttgctagccagtggctcagaggaagcagcggcctgtgcaaaggtctggaggtctgaaaagtactcagtgagttccggacccggaaatggttcaacatgagttaagtataaggtgtcgctggagatgagggggatggtggagagggagggtaggtggaagatgaggccagagggtccagaaaacaaagtagatggtcttaaggagctgaggtttttaagctctagggaatcactttatggggggtgttatgagcatattttatggtatggggataaaggatggattactagggggaatacactcaaggcaggaagagtgtaggttgttccagtagttgaggtaaagagtggggaccctgagttaataggaaagaggaggtggatgcaggaatcactggccttctggaatcaatcagttatcagtcagccactggagataaaagggtctggaatacatgcacggaggattctaagtgccactcattgcaaggaccgaggtaagaagagacaggacagggttgcatgtgggtgagggaagaggtggaaaaatgagctcaaatattgacattttacatttgaaatgcttatgaaaattccaaatggaggtatccagtaggcaatgtgaagtataatccaggagctctagagaatggtctagttagagacacagacttggggcctatcaactataggcagtcagaactgcagaaatacacgagaaggtctgagggagggcttggcttgaagagaggaccaaggatggtcaccttgaaaataacagcggttaaagggcaggtggaagactagcttgcaatgtgggctgtgaaggatggcaatggtgggggaagatggctggaaaggtgggtgagaagggcacccacaagctagcaggggagggaacagtcaacagtgccaaatgccgccacctgcaatgagcggggactcactacggtagggacctacacatgctttgtctcatccttttcatctttgcacaatattagcctctactgtcttccaatatgaccaaagtctagtccatctagagagatcagatcaaaagtgagcctgaatcatttacatctaacaatgttatctagacagcatgcttttattctgaatcacctgaacttccagctatctgtggtttataagctggcataagctggcatttttcagtcgaaataccacagggagaggtattttaggagctgatttggtattcagttaatactgtagaacgtgctcttccattaccttgaagctaatgactagctaaattagttatatggcccaaagcaaagataagatggttagtatgtttgaccagtcattaaaatgtgtgtctttctggaaaaatattctctgaagtgaaatgacaccatgatgtctgatcagcaatatagctcacccttattttaaaaggtctactttgaatgtctccccagggtgatcatattaaaaaaatcaaaatttaatatgtcattaacagaggttaacttgctgaaaaataagctgaattcgttgggaattgctgctaaaacattctgtagctggaaaatatcaccctgtttctctggagaacggtagcaataaaaacacacagaatacactttcatcccaaaattggcatactttaaataatccatgatttttttgttctaaactggcttaataggtctgaggccaataatattttctatttcctcaggatttcttcactcagtttttttgtttggtagagcacttagtattaacaaggcactacagtaggctataggggcatgaagatgtcagaagttctatgtatagtagactgcaatgtactggaagcaacaggaaagtcagagagataaatacttacataaatactaaatagagaaaaaactacctaatgagaattatgggtgactgagcaccaaggggttccaaggtcagtgtgagcccttctggctggagtggtcagtgatatattattgaagaaggtggcatggggcaccagtagaattcctgaggcatccagattcagcacggcctctggaaggtgactgccaggtcagcttcactgtcagctggtgcctctcctgacccctcctcccttgttaccaaggatgccaaaactttcccagctttcagaatgacgactgtttggttctacctggcttatccttactgatcctgcctaactggctcttgaatcatgttttccagaggtcaactgagtctaagaagacattaaaaatcctgaaattggccatatcatcctgcccctccttgattttggacaggatgcatttgggatctggcagcacttttctgagggcatcaactaccaaggttggagggatctttacatcaacctacactatacctaccagatgctttctttgaccatcttgatatccagatatggagtattcccatttcttggttcccatggactgaaactttacaggtaaaggccaaagttttgattcagcatgaatgagaaattcaatgtactataagctggaaagacttggctgaaactcagccccagctaaagcaacatcagaactgcatacacagtggtaaagatcaagtgtccactttggaagtataatctttatctagtgatcacttttccaacatttccatccaaattttggaagcacctaaatccaagccctgcaactatcccacaatattatagtattattcacttatatttaagatactgtactccatagagctaggatggtagacatcaacatacagagacctttagggttttttttgtttttgtttttgtttttgtttttttgagaaggagtttcgctcttgttgcccaggctgaagtgcaatggtgtgatcttggctcagagttttgctcttgttgcccaggctggagtgcaatggtgcaatcttggcttaccacaacatccgcctcctgggttcaagagattctcctgtctcagcctccttagtagctgggattacaggcatgtaccaccacgtccagctaattttgtatttttagtagagacagggtttctccatgttggtcaggctggtcttatactcccgacctcaggtaatctgcctacctcagcctcccaaagtgctggaattacaggcgtgggccaccatgcccagctggtactttctcaagccagggattggattgggaaaactgatggagttggccaattcctatggaagtcacatttcattcctggaaactttgaatctcagattttcttttttaaagaaacttcatctatatatcatttatataatatgaaatatgtcagttttaattgtatactttgatgagttttggcaatatatgcaccactacaatcaggatgtattttataacctttccatgttctgaaaaaggttttctcacgcccatctgcagtcaacaccatcctatgcccacctagcctaaggaaatcattgaacttctttgtgtaactacagtcttggtattggtaatttctcagaaagtgtaaactcatgttcattagcagacaaatagaaaaatgaattaccaaataattaaataatgccttgaagggctccaaagtaagtcacacctcaaattctgacatacaggcccctaaggtctcttatgaatccccagtgaaacgaattagtcaaatgtcaggtaaaaccatcaggcaatacacaagttcctccaccttggcttccccacctgttgcttgctgggtcacttgctcccctttgcttagccagttcgacccacaaaatatctccttggaagccttagctcttcaaggaggtgacaactgcttctgcagagctcaggtccttgtggtcaacaaaagcgataggctgcgatcctctccaggtgagctgcagaggttagaaagcccttcaatcactgactcttgcagcttggagtatgcaaaaagtcgcagcgacagagacagcagtctagacggtgagtcttctttcataccgtcgagactggcccatgcaggacctgctttaggcctttctgcctcagtgtttgcttactgctctagttctttttgaaaggcgacatgctttctggcttgcttcttttggtaataatgatgacttcttaacattgggattttaaaaaatcatcttggagctgacctacatttttatacgttctgatgttcctcattccttcgtacagatctgggcttcacttcatatcctttcaacctgcagacgtgattttagtatttcatgcagtacaagtctgatggattctgtcagcttttgtcatctgaaaatgttatttttgggggcctttcttttggggatttttttttttttactagacatggaattttagtatacttttttctttccatatcattccattgttttctggcttccattgtttttgatggagaagtcagccctcactcttatcaccgtgctctccatacaatgaggttccctctggcagctcttaacattatctccttatcttgtgttttcagcattttgactgcaatttgttttaacacattgttttctttgtaccgctactgcttaagattcactgtgctttttgggtatttaatttgatgttttccatcagttttggaaaagttttcaccattatcttttcaaatatttcttctggcccattctctttctttttcttcttggattccaattacacagtgtttgatattcaccagatcttggatactctggtctatgtttattactttttttcactttgtgtttcctttctctccagctttattaggtataattgataaataataatcatatattcaacacatacaaaataatgacttgatatctgtatacactatgtaataattacaatcaaattaatcaacacttctatcaccacacatagttatctttgtgtgtgtgtgtgtgtgtgtctgtgtggggaggacacttaagacctagtcttagcacatttcaagtacacaatacaacattattaactctagtcaccatgctgtacattagatccccctgtgtttctatttgaacagtttatattgaccgctcttcaagatcattgatacttacctcttctgctcagtcttctgttaacctgttgaatgatttagtcaattctgataacattctcttccaggaaagtcttattacttttagtaattttcttcacttaggttttttttgatctcagctctctgatgggttaaaaaatctctgaaactatgtaagctgtttggcttgttctttttgttacggtagaaatctagaaaatagttttatcatttctcctccagtcaactagtttctatttttgcactcatctgctctgatctgtttaggcagaagcttaaacaattctgcttgctcaactaactcagacactgtggatgttaggatgaaggtacagtttgcatattaaaagataagccagtacatctctgagatttgccatcctctctggtaaggactgcactcaaagtaacaggagggcctaaccttaaataaatatgcagccatactgctagggcaaacatccacacacagacacacagacatacaaacaacccaaggacaggctttctgacaagtgattgatagatttatttcaaagctgtcaagtagagcccaaaaagagtggaatctcagggttctcttggcaagactatggttctcagatgggcatacaagctttttcctttctgggacagtcacacgaagttagttaatgagggatttttattcttttgtttctggtggcagaaataaaatattcttttcagggcaaaggaatgaaatctcatcaagaggttcctgtctagattcgcgtccttatatacaagccaacttctctctgcagaatgttctacatcccagaaaccaggattgtttgccactgatttcattttcttctcactgttgcctctggattaaaaagcctctctcattactgctcatcagtgtcctgctgctgggggagccatttgtgctgacgaatagttgtttttttcaatgtactgggaaagtggcattttgagagagacttcttccatctacacccttctgtcttaagtataattcactcattcattcattcattcacccattcatcagtaaatattattgagagtggactgtgtgcctggcactgtgcggtgaatttgatatagacacatataatacgaacacgattctagccctatggagtatatacgttattaactgataagttcagtccagcacacacttaccaagttcttgtatgtgctgggcatttaagagtgtaatgacgagtaagatgggcatttctctgtaagcatatggtccaatggggaagacctagatacaattttaatacaatgctttactgttgtataacagagaaacatgcagattgctatgggaatgcaggttgagaggtgctgagcctaaaaggaggatacagggaaggcttcctggagatgatgacgcttgagaggagtctcaaaggatgtgcaggagcgacagaggctgcaaatgcctgcccaatattcatgttcctcttcttcctcagtaacagaacaccaactatgtgcccagcaaaattctacttttccagccttgcttgcattagggctgatcagtgagctgtgagtagagggtttcctggggattccagggagctacattctcaggaggaatggccatggctcccttgtgaccatggaggtcccacactgtccgtcagttgcatacttccagcttttttttttcatgtgagaaagagtaaaattctattccttctcactcccttagcctacactttatttttatttttagttttattgagacagagtttcactctttcaaccaggctggagtgaagtggtgtgatctcagctcactgcaacctctgccttccgggttcaagcaattttcctgcctcagcctcctgagtagctgggattataggcacgcaccaccacacctagctaatttttgtatttttagtagagacggggtttcgccatgttggccaggctggtcttgaactcctgacctcaggtgatccgcccgcctcaacctcccaacgtgctaggattacaggcatgagccgccatgcccagcctcttaccctatactttaaaacaaaaacaaaaaaaaaacagccaaacctaatcttcaatctgaaatagtgtactacgccaggtgtagacaggaagagagaagaggcagtgggtctgggaaaatactcagccttgaaaagtcaaccataataaatgtcaaatcctacagagtatcctttaaatggcaagggggtacttcagcctgactccatttttgcctcactccccatttattgacatgtgcttattaacatgtttagaaacttaaaaatgcattcatcctttactgaaatctgcccaatgtcgtctgctattatttcaaatactcatatttcaggaaggctcagatttaagtgaaggtgtcaccacagtctaagttaccatctcctgtccttgcatccatggccggggaattactctgctatttaccactaatgcagctgccgggaggatccagcctcagaggacttgggtatgttcttctcaaggacaggaaagtcatgcacagtgtatgttcattcatttgtgaagttgtccttgtggccacagttgaaggccctcatgctcactgtcagcctatacacctgtcagtccttcccataagacatactcaacaccaacctggttaactgataatgctgactacaaccaaggcaacttcctcctactttaaaacccagcagtacacaaatgggcgctccctacaggccaagtaaaattccttcatgcatctcctaatgactccccaccaaaatgctgccaaagagtcaatactgccacctcccccatgtctgtgtactcatccctggaacttatgaatatggtagcattcatggtttggttctgtgtccccatccaaatgtcaccttgaattgtaataatccaccatgtcaaggatgggaccaggtggagataaatgaatcatgggggtggtatcccccaggctgttcttgtgatagtgagtgagttctcagaagatctgactttttttataagaggcttcccccttcactgggcacccattctctctcctgccaccctgtgaagaggtgccttccgccatgatgtaagtttcctgaggcctccctagccatacagaactgtgagtcaattaaacctcttttctttataaattactcagtttcaggtatttcttcatagcagtgtgagaacagactaatacatcgcaacgggagtttgcagaaatgagtaggttaagggtcttgaggtggggagataattctggactatccaggtgggtccagtgaacaagagaaagagagagagagagagagagagagaaagagagagagaaagagaaagagagagagattgaaacctgaaggttactttgctggttttgaagatggaggaagggacctcaagccaaggaatccaggcagcctcaagaagccagaaaagggagaaaagaggattctcccccacagcctccagaaggaatgcagccctgcgacaccttaactttaggacttccgacctacagagctgtaagaaaataaatctgtgttgttttcagccatgacatttgtgataattttttacagcaaccactggaaactaatacacatattactgaactgtgagaggtagaggaccactagcctgcattttctcatagaagctatagcatagcattaataatagtggtaataataattgttccgcttaaaaattagctaatgcttgcaaagtgcttactatgaaccgggcattgctaggctgaacatccaacatacatagtttccttcaattcaccaaggtaggcactcttaaaaaacacccatttaatagaagaggaaagtgagccacagagaagttaatttgctcaaaattgcatagctaggaagtgaactctggctagggtctaaacctagacagtctgagccttgtaacctacactaaaataatggtgtacagtctatgccacataatttttgtgtttgattatatgctttagttatattactacctttgctgtcataggcccattagggtattatttaatgtagtcactcatctaaatcttcattcccctcttcaacggctctacccagtgctcatcactcttctgctggagctgggagtggtggaagacctgaggttttcctctaggtagaaggaactcccattatgaacactcaagagtaattctcaacggatcagaacttcctgagagcaggacactctggattacctgagaagcactcccagtctaaccctttgacccactcaagagatgtcctatgtcttagagggttctgccctggccctcctctggccacacccctcttcctggagcaaagagtctgtggagctaaaaagctgcacccacaacagcacatgcttgcccttcagactatgccccaggcacctgagccccagaattccctgcccaaatggcctgggcttgattcagggcttgtgtaggcagcttcctcccatctgtccttctgagagtggactgttccagtgatgtgcctaccctgagcccgaaggctgcctgaagggctgccacatgtaggggatgtggatgaatctgagatttgtgggctgggtgtctgcctatgtgtgtgcagagaaccttctaggcagggcagagctagacaagagaaggggtctgggctgactctcccagttccactaagttctggtaaagaattctgaggggtcagagaattctaagttagaatctggcctctaaggtccttatgaaggtgtactccttaaggtaagaggatagcatgtattttatttaacagcttgctagtgtgatttagaatttttaaacattgagatgagggccatgtgaacccacacttgtcttcttatcccaggtcctgcaaatgttaggactggactaaccactccctctcaatagagggagagacagagaaaggccaggtaatgaatagagtgaaaaatgtacattagaaaaatgctctttcaaaaagcctagaaagaaatatagccaaacattagcagagtctgcaatgtctgagttttggggttatggggatgttgttttatttcacttacagatatacacctacgtaagcagctttataataagaaaatatttgtttatgaattcaaacttatgaatattcaataagttcccagtataatgtcagcattagactaggatgaaaaaccaaactaaaccaaaccaaatcaaaacaacaaatcttcaagacatgaaaaagaaagaaatggagaaatatggattgggtaatgaagaatgtatcctcttaggcactttcattaacaacttgaaaatagaccttgacagaatgatgacctaatttctatatgctcttgaattggatggtctatcggaaacagaatcaggattcaaaaacatccccccaccgtctgacatcactgggtaatctaacaagattacagaaccgacttttagagaagagtttaaatcccagtactagaatatatgtaacagctatattggctgtgggagttatagcttaacagaacatgtgtcataaagataattaacatacaataaatgcatctatgaaagattaaattaatctaaggtaacactaatagaaaaatacagcataaactgaaggtgtggatagttttcttttgctatgtggtggcaagacctcacctggaatctgtttaatttcaataccaactttgggagacattaaaaaaaaatactgaagcctatgaagaagaagttctctctcatttgaaaaatttttgaaaaacctaatctagtattttgaccatgttaagaaggaaggacacatgcatgtttggaccagggtgttttgtagagttggtaatcttcttcatggcctgctttaatgactgaaggataagcccttcacagaaggactaaggcttccaagtaccccaggacaacagagggaggttgattttagctagatataaagaaaaacgttgtaaaaatcagaactgtttgaaaatagaatggatgcctttagaagagagcaagtcttacttgcagaacgtgttgggagtttaaggaaacccaatccatgacacctactatccctgtctcagcttgaaaagaaaaatgggtcaactaatttttgacaaaggcaccaagaagacacaatggtatctggataggataatatcttcaataaatggtattgggaaaactggatatccacatgtaaaataatgaattgaacccttagcttgtatcatacacaaaaatcaactcaacatagatgaaagaacttaacataggacctgaaatcataacattcctagtagaaaacacagggaaaccccatcgccttggcaataactttttggataccacaccaaagctcaggcaacaaaagtgaaaataaacaactggactacaccaaactaaaaagcttctgcacagcaaaggaagcaacgaacagaatcaaaaggcagcttacagattggaagaaaatatttgaaaaccatgtatttgataagtggttaatatccaaaatgtaaaataaatgcctacaactcaatagcaaaaaaccccaaataacctgattaaaaaacggacaaagagcctgaatagacatttctccaaaaaagatataaaaatggccaacaggcatacgaaaaggtaatcaacatctctgaccatcagggacaggcaaatgaaaaccatgagatagcaacttatacctgttaggatggccattatcaaaaagacataacaagcggtagcacgggttggagaaaagggaaccctgacatgctgttggtgggaatgtaaattgttgcagcctttatggaaaacagtacgaaggttccttaaaaaataaaaaaatagaactatagcaccatatgatccagcaatctctctgctgagtatatactcaaaagaagtaaaattagcacctcacagagctgccttcttatgttcactgtggcattatttacaatagcaagatatgcaaacaacctaagtaagcatcaaaggatgaatggataaagaaattgtggaatatattatatacatatatattagggagaggggagcattatatatatagatacctatatatccataaatttatttatatacatatatatatataaaatggaatattatcaagccttaaaaaggagattctactatttttggcaacatgtattaacctggaggacattatgctaagtgaactgagccagacacaggaaaaagtactgcatgatcttacttacatgtggaatcttaaaaaaaaaatgtcaaatatatagagacagaataaaatggtggttaccggaagtggtggggggaattgtggcagaaaatggggagatatgggtcaaagcatacaaagttacaggtaggacaaatattctagaaatgtactagaggactataattataatattgtataatgaaaatttgcaaaaaagtagattttaggtgctattactgtatacgtatgaaaaaagtaaccatgaagatgataagtatgttaatttgcttgagtatagtaaccacttcactatgtataaatatatcaaaatatgttgtacaccttaactatatataatagaaaaataagtaaataagaaaggagagcaggtggagtggcatttttatatacaagatcgctaggatggagggcatgacttgtgtatgtagactagcgggttttctaatatcaaattttatgcttgtggaaatctatccacccaagcttaggcagagccagacttcctcgaaaaacagagcagaatataagttctctgcagagcatctgctaccaagaaaaaaatgggcgtggagcatgatcagtttactctttccaaacttaccagtaagtcactccacctctcctgtggtggcatggatttgtattatggcgccactgtttactagtaccatgtacaagtaaatggtgcagtcatgtgaggaatgaattggctactccacggaagtgcccagcacagggcctggtgtgtaatggctcttcataactcttaccttgttggctaccccatagttattctccttcatcttgtctttcctgctccaaccatagaccaagcctcttgtttcctataagattgagactggtaacaggagtccgtggagcttgtgaacttggatgggaattaattatatatttaatatcactaatccctacctgaagtttggtgtttccttcagttataaacataggtatgaatatcagtagtgttagtggtatctgtgacttagtcatagatgagaatcacagatatcttcgtatgattttagagcagctgtagacaccttgaaataccaactatgttcaccattactttttttttttttcggcaatggagtctcgctctgttgcccaggctggagtgcagtggtgtgatctcggctcactgcaagctccgcctcgtgggttcacgccattctcctgcctcagcctcccgagtagctgggactacaggcactcgccatcatgcctggctaacttttttttggttttaatttttagtagatactgggtttcaccatgttggccaggatggtctcgatctcctgacctcgtaatccacctgcctcagactcccaaagtgctgagattacaggtgtgagccaccacgcccggcccactattacttatttttattttttgagatgaagtctctctgtcaccagactggagtgcagtggcgcaatctcggctcactgcaacctccgcctcctgggttcaagtgattctcctgcctcagcctcccaagtagctgggactacaggcatgcaccaccatgcccagctaatttttagtagagacagggtttcaccatgttggccaggatggtctcgatctcttgacctcatgatctgcctgcctctcaaagcgctgggattgcaggcataagccaccatgcctgacccactattacctatacttatagtagattgcatgtgatcgctgctgtcctatcaactggtgtgatggagctgccaacttgggggaatgcagtcacctcttcccacactggtgacccagacattcacgttgctttccagtattcccatttgcgatttgtttttggtcatcacgaggaaggagggtactcattctcatgcatggtttattgttcccaggtaaactcagcaaaaatgttctttgcactggtatttctttaaacaataaagttttactttaacttgctatattttaaatgcacggtattgacttgttatttttatttacatatatttttgagacgaggtctcgctctgtggcccaggctggagtgccgcggtgcaatacaacttgccgcagtcttgacctcctgggctcaagtgatcctcccacctcagccttttgggtagctgaggcatttttgtattttttgtagagacagggttttgccatgttgccgaggctggtcttgaactcctgagctcaaggaatctgctcgcctcggtctcccaaagtgctgggattacaggcaagggccactgttcctggcctgacttgttatttaattcattcataaagaaacacatattaaaaaccatgaatttctttttattactctgataactgcattttcctttcaatcttatatattttatatatttaaaaatattattcaagataggctggtcgcggtggctcacgcctgtaatcccagcattttgggaggccaaggtgggcggatcacgaggtcaggagatggagaccatcctggttaacacggtgaaagcctgtctctactaaaaatacaaaaaaattagccgggcgtggtggcgggcgcctgtagtcccagctactcaggaggctgaggccggagaatggtgtggacccgggaggcggagcttgcagtgagccgagatcgcgccactgtactccaacctgggcgacagagtgagactctgtctcaggaaaaaaaaaaaaattattcaagatagtgtccaaactgttcatcaaactgccaaatggatctctagtacaaaatggctaaaactctttcccaggagtgtgagaatgtatatcaggaaaataattacatcctaaaaaaagctgctgcttctgatgtgtggggaaatcaacatttagggaattcaactgtttttagtaacttccccccgaagcttttgtttgtgggattactatttacaactgtaattgggatacattttcaaagaaaacttggctcaaatttagaactcagacacttaagacacttttccttgagaaaatctaaatatttatgcgtctccaactcactttcaaaaacattttaaagcttaagatgttattgagagttccccactgttgatgatggtgattaaaaaggccattaaaaatggctcccaggaaaagaacagttgtcaggaagtcagggcagccgggaggcagaagacccaccgatttgtttctttgacactggcggtttagtcacacagtgatcgatttctgagaacactggagatgtgctggaattagtgtggaatttctacactctttggctctgactgggacattccgtcattacaacgaaatgagactgtgctttgctgtctcgcatcctctgtgaagacgttatccagcatgaaaaggaaggcaatggaaaccgagagccagcatacaggagctgctaacagaaaaactggtgggcgagctgaggtgaaatggcttggacacaaaccagtgcatgcagttctaatgaggcagtaaggcaggcacggaagtgcgcatgatgtcagctaattaacttggatgatgttggagagtgaggtatcctgaggaaaagccaacagcacttaactcaccagtgtggttaattatcagagaatgctgttcctgtgtagtttcctacccagcattttgaaaagatatttggctttaaaagtattaaaaacatgaagtgactcttcttgcaggcgatcagcagcttgtattggtgatggaaaaaaataatgggacttggccaggcgcggtggctcacgcctgtaatcccagcactttgggaggcccaggcgggcggatcacctgaggtcgggagttcgagaccagcctgaccaacacggagaaaccccgtctctactaaaaatacaaaattatccaggcgtggtggcacatgcctataatcccagctactcggaggctgaggcaggagaatcgcttgaactcaggaggcagaggttgtggtgagccgagatcacaccattgcactccagcaacaagaatgaaactccatctcaaaaaaaaaaaaaaaaaatactggtacttttccttaggataaggttaatgaatcaaggtgatgaagatggcctttcttaattcagttgcagcatagaagaaaattaactttgtttggtggataatcattggaagtgtgaaaggataagttgttttcagaatactttttagaaataatttttagttttctgtatcacaaatgggaaattaggaaaattaaatagatacatcatgttattagaatgcataagcattacaaatgtaactatcctgataatggtagcaaatatattgaagacggctcatgcaggccttccttgcttcccagtattatctggaggggaagataatcagcctggcaggatggaatagagagggacaagatggcgaccagtctccgaagcaggaaagagcggcatgaaaagtggctttaaatcaacagatttgtgtaaagtgcaaatgaacggttgtacctgagctgtatcacagtgaactaatttaacaaggagcagttgcaatgtgttccattttagctattctgaggacaataaaatgacaatatacacaggcagattaaggatgtctctttcaagatttggggcctggttgatttactcataaatcaaatgacaatatgatttattgttcatctgaacaaatttgagagtgaaagggaacatagtagcagctactcctgaacaacgggcataaagcagcttgcctcgggcaaactgagtagtgtggctcccaccacttctcatgctatagttccacaattatgtgtctctttttcacatgtattatgcctctctttacagtatgatttccacgggaatgtgagatttacacattgtagatgcagaattatattattgcacttattaataaaataacacaagtagataggacatacagtaaaataattactgtttaccatcagtatagttacacatgtgataattgatctacaaaatactttccaaaggattatttcatttaactctcaaaatagctgttatgtggcttcttcaaaaaattctgaatgatgtggccagccaggtgcagtggctcacacctgtaatcccaccactttgggaggctgaggtgggtggatcatgtgagtccaggggtttgaggccagcctgggcaacatggcaaagccttgtctttagaaaaaaatacaataaattagcctagcctgctggcgggtgctgtagtcccagctactcaggaggctgaggtgggacgatcacgtgagcctcggaggttgaggcttcagtgagctctgattgtgccactgtactcccagcctgagtgacagagtgagactttgtggcaaaaacaaaacaaaaatgatgtatcaaataaacaagtaaataagttttatgtggatatactaatgcaatgatgcagctatagtcatcatataaatatgtaattcattaaacaaataatgatatttcataaaatgaaatactatagaacaatgaaaacaatttatacatagagtgtaacaatttggatgaaagaaaaaagatatatttgcttatagatgtgcagaaaatttctggaataacaacgctaagtggctgcctctagaacctgtaactgaggcctgaggacagggaactaaatcgttctgtatgccgtatgattgttgtgtggtaggtgattacttcgcacaatgatgacatttgaaaaatagcatcattatcactatatttagtacgtacatgcccataatagagcagttcataaaacactatctacgcattcacatgtataataatactaatagtttaaaaagtttcaagtgtgggtatgtatcctaaaatgcctagaaagataagtaataataagtagtgagattcctgatcttactggtttttgctttttatgttaactttctactttttcattttgcttgaatgtgttataataatacatttatattttataatcagaacgcaagcagcaatgccacttccatcttgaggaagtgtaatgagggaaccagcaatgctggtttcagtgtctcagtttggctggaaaggatttaatcctgacgctgcaacattaactttctgagcatatgctctgtccccggggaagacgacagtcaagggaatcttgaacttcttggaaaataagaaaattaagggcttcttttaaaaggtaagtgattttacttttgagcaatttggcttggctttgttttaggagaaaactggaatcttacaatgtagccctctgaagggtggcttgcacaaagccggggtcactggggcaccccctccctgtattgtgacagtgtggggctggtctccaacttccctagcctctgctttccaggtgcaaggtggaaatgcacttcccatctcctttgaagttagaccaggccacacgatttgctctagacaaagagttgtgagcaccagtgacaagtgtcatccaggtgagagctttaagggccagcacacaattccttgctcccttccctctggtgcgggatcatggaagcccaggtgaaggtgagcctctgtcagcctcggccttgatgaggagggcagccttcagccgtgtgcaggccatagcatgagcgagaaatgaacttttgttgggtgaagccactgagattttggagtatttattatcactgcagcgtttcctatctgatcatgactatataatttgtgaagcccagtgcaaaacaaagacacagagccccttcttcaaaaatgatttagcatttcaagatattagcagtagagcctcaaactctggggggccctgtgagtatggggccctgtgagtatggggccctgtgagtatggggccctgtgtgactgtacaggtcgcacactccaagctggccctattttcctattccaccatcacaacaatcctggaaaagaatcttaattctcttatttcacatatgagaaaattgagagcttaaacagcttgcttaaaatagcagactcacaaaatgccagaagcgagagtttgattccattggtattaataacactgcgatgatgggtcttttgtgcattcctggttctgggctttggggcacaaggagccaagtacactattacaggaagcagacaagactcaggaaatatcgtctcctttgtaggaaatcacctaactggaaccttcaatggaaggtaagaaagagttaacgtctaacccattacatgctaagtgaatgttttctcttgccagaaagtataattagtaatttcaggccttatctgaaatacctgcctcagcacatgctgaaagtatcaataaagaaaagcaggcaccgcttttaatttcattgctataactaattagcattagagaaaccattttcataagcagtgtgctaacaacccattggtaactggaaaggaaagctgatggtgcagctttctccatggtaaccgggcaaggagaaaagcgcttcacagccacgaagagggggttcctgagggaagcacgagacgcgggctccaggcagcagcacgtggaagtgggcaggcactgcccctgacttcagatgccacaaagaacattggcatattccagtcaagggcagtgttttgaactgaaaatattacatgccaccatagaactgttttctacatattccttaaaagctattcaaaccgtatcaagatttttttagaaagggctctaccaattaaaatcacattggtttttcctaaagaattcctatcaactctcccacccaacatatcctacctctgtacccagtacagggggcagaaggcatcaggaaaagtaataaaaagaacctttggctgggcgcgttggctcactcctgtaatcccagaactttgggaggcagaggcaggcggatgatgaggtcaagagattgagaccatcctggccaacatggtgaaaccccatctctactaaaaatacaaaaaattagctgggcatggtggcgtgtgcctgtagtcccagctactccggaggctgaggcaggaggattgtttgaacctgggaggtggaggttgcagtgagctgaggtcgcaccactgcactagaacctggcgacagagcaagactccatctcaaaaaacaaaaaaacaaaacaaacaaacaaaaaaacaaaaacaaacaaggaaaaaaagaacctttgccgcacaaagagggtaggtagtgaatctggtaattttaaaaggcagctgtcattaaatcctgagtttcaagatgaaatcctatcactctgtttgagcactttattattgttcttactgattgtgccctagaacacattagtgaattggcacaattcctctgtcattttcttctcttcatataaacttagtttgggcaatttttcaaagaaggaaggaagaaaggaagtaaagaaggaaggaagggagggaggggggaagccaaaagaaacaaggattgagtttgttggagtcactttagaacattagtgccacactggtccataaatatgttcattttgcggggggtgggggagactgcaacaacatcatactgtatcaatgatgaattcagcagtcacttaaaatgaaaaatgtaggtggctttcaaagaaacaatctcaagtaaaattgttaacaaaatttatcaatttttgaaaactgtatattcaaatagataacataaaaacaagaataatttaaagcatgttactcaagtagatttcacaacaaatgatacatttaaagttttatggctccaatattaatgctttaggaactgtgtggcaaacatttactaaccaggttctcatgacctattgactgtgtgaagaatatttgtcagcatgccagcgtgcagtgttaggttctgttaggatcaaaacaatctccctcaggaagcttatataaaaagttgtccttgtccctactcttaggtcaagaaaacattgtcatcaatatgaatatgaagagatgcatgaaataatatgactaagttctttaagggagaaagccgccatagattagctagttagtttgagaactggcttttaaatacatactttctctacataatttggaatgttttagaaaacaaaatgggaacaaagtacaatgcacattagctgggcagggaagcatgaagaatgctttctatgttacggctaattccctgcaagctagcctgactttcagagcattcaactgagtacgtggctgttctccaccatgaggccagcacgtggttaatgaccccaattctggcattgtttctgggtcttgtttttttctgcacaaaggttaattgaatttttacaagggtttcctagaggacttgcacaactttttggtattaaaacaaaaggccatcttataatagacttacaatatgactttcataagcactttaagtattttagcttagactttagtaactgtggcatatttaatgtttcatagctttttgagaatttccacagacattctcagcatcttcactaaatttaatcacgaagtctggcagtacagaattcttccttctccctcggcttctttttaagtttgagagtgaatttggttttgtaaaagtatgctagggagaagatgcaagggacttctcagcaatttctctctatgtgttctgcagataaatgttctttccggctcgtgacaactaacaattgtgtttcaaaaaaaaaaaaaaaaacatgcattgttaatgagacttcgccagagatgcttagagttaggtgaaatagagataactattttcatagctatgcattaattgactgaattggctttgtatttcaggccaactccaaagcactggttaatagttataaaaatgtttcacagtgctccatgtcggcttccccctgaaaatccatgataaagattgagcgtggttgaaaggcttgtcatgcgtaagtgctaattagccccaggatgcttgccttcatgaactttcaggcctcatctataaggtcaggaaaggggtcatagctcatagaatatggacttgcattaattcccagcgtataaactcatggatcctccacagaattcactaaacttcaataagctacaattctatccttacctcacatgtcacatccctaaaggtgacatctacattaatgcccctcatccccaatagagagcacattggtagctcaaataggctattactcactgtgacctcttctacttatttcttaaggcatgggagtggcatagtgagatcctggcaggagcactgttcacaatagcaaagacttggaatcaacccagatgcccatcattgatagactggataaagaaaatgtggtccatatatatcatggaatactatgcaaccataaaaaggaacaagaccatatcctttgcagggacatggatgaagctggaaaccgttatcctcagcaaactaatgcaggaacagaaaaccaaacactgcctgttctcacttataagtgggagctgaatgatgagcacacatggacacatgggggaacaacacacactggggcctgctggggggttgtggggagggagagcatcaggaagaatacctaatggatgctgggcttaatacctaggtgatgggttgatctgtgcagcaaaacaccatggcacacgtttacctatataacaaacctgcacatcctgcacatgtacccctgaacttaaaatgaaaagttgaagaaaattttaaaaaaagaccctgcctggcagggtttcagcttaaagaaaatttctgggttttgcacatggccattttctgaactcctataactggcttttgaaccaaagtcctcttggaatgctgagacgcactggaaacctctagatgggccatccagcctgaagaaagcctttcttgttgctgctatttgtatcattatttcctttactaacaataactaagatgcactgggtacgttacgtgttagggagcgtcccaagtgcttagtaagcatcgattagtttcatttttacaaccatctttgccctgtgaaataggacatgggattcactctttttaaagatgagacagttgacacttgggaagcttaggaaggtttcccaaagcaagctgtgggtacggacggcatcagaactaaacgcagggagtctgactcagggtgttcaatctcagcactactgaagtttgagaccaggccattctcacgggcccgttgtgggcactgcatggtgtttggcaccatccctgcctctacccgctagatgctagaagcatccccctgttgtgatgaccaaaactatctccagacatgaccaaatatcccctggggacaaaatcgctggcaactgagcaccactgctctgactcaaaggtgtctgctcctaaccacctgcctctcaaaggtgtctgctcctaaccacctgcccctcaaaggtgtctgctcctaaccacctgcctttgctgccgccggcttccccctgcttctttgaggcaaaaatcaggtcggactagcatcagtggcaaaggaaccagtcagatcagctcatgtgacagctttgacagaccaagcattttggtcacatattagcttttgagaatcaatatgcataggctggaatgacactttcagtaaatcaacattcaggctataacaaacctattaatattctggggaattcattgtgtaccgagccagtcattcagatgactatatgccttaggtctttttatgaaataaattagatttaatttggtaggctaggcagagtaggcagagagtgccttgcatttcctggttatactagtgtgtggtgtgataaaaaactgaataggcatctccatcaaatgattcctgtaatgtccccattggctcttttgaaataaaacctgtgtcctgtttccctcttcctaattcaccttgctcttgcctgtgttctataatggacaatgtgaacactcagacagggctgattttctaatcaatggtaacaactggagttagaaatgaaaatattatcatagtaaactatatttattttaaagtccataggctagttttcatcccctcccaaaccactctaatttatataggagggggtcaaagtttagaggaatacgaagatgtttctaaaatttagatgcaatatgtataagagagaagcttctacttgtgatgaattagttagaaatcaaaatttttttggacagattcacttgagagaatgaagaaaattcaagtagagagaggtatcctgagaaaaacagaatattttagactgaactgggataatctggagacttagaacaataatatataaggctttatatattatatatatattgctttatattgaaatttcatggaattattttagctcttaaagtataggaaaatcagttaaagatggaaacactgatgaatctaatgagaattttaaacatataagtttatttatcttaaactgtaagattctattaggctttaagactataattttatggactgtgaaagttctaaggtcccttaagattatgtagaagagatgtttactttttagcaaagaaaatattgtccagaaacccattttttagaaacagataaactatttatttttaataaattaagcttatttttggtgaacacaaacttttgaaatttagttttgtgaaagacacatgtaatcatgtattatttcgttctttctatatttcattacgttgcctagatcaagcaaacactgatatacccagataagtgtggcaaacagttatgtgttttttttaaacacctcattttacaattttgtaatgcactttattaaacagaaactttagctcaaggctgcacaaaataatgaattttcagtttctgctaagagtatgtatatgttgtttttgtttctaaatagtctatgatatatttaaaaatgaaatttgaagtcagatttcatgcatagaaccataaggattttaggaacgtgttctgacaagcagtggtgtgaatacagcttctcacataagaggtgagttaacagaggctcggagcagataagtcactggtgctgagtcacaggctggcagagcaaggatcagaatgcaggtcctctgccttttaagcctgcgttctttttggttcacactgcctctattattaaattacttaatttatcagagcaaaaagcaaaaccttagggatgctattagcaatttactatttccagttcttttgggaatctgttaattgccctttcataaatgctgctcattatgattaagactttgattaaatgtgaaagtctaggatttatatgttacagacatatttaatattaatttaaagcaccagagcagaatgaattgtgcattccaattttttagctctatcatacactctttaatcaaggatttttcaagaacttgctttgtgctagcaggacctgatttttcccctcaggaagctcacagtttaattaaggagagctcatattagtaacaatgcacatcagtgtctgagtaagagtttaggggaggtgtagctcgtcttcatggaggttaggggcaagtgagtttagtgaataggtgccacggagtgagacggggaaagatgggtgtcctggttgaggggcgatgaggtaagaatgactaatgcttatgaaccattgcctgataaacactgtgcccaggactgtatatggatcatgtttaatccaaaagcaattctgagtgaagtcctatccctcaaccctttttacaggagaagacattgaggcatagacccatgaagtgggcttgctcagtaacaactgctcagtgaaggggctgggactcccagcacttgcctggttcagatcacactactgtctccttcctatactgccccttcgcccatctgtgtgagccaaggcaaggaagacagtctggggcctgtgggatggcaaaggaattttctagaactaagagtgtgtgttgggaaggtaatgagatgggtttggaaaggttagtttgggtaaagcttgaaaagccagaaaaaggattttagcccatgttctaagccttcaccattttgtagaccatcttattcacattttgatggtcgcttaggtaaactaagatctattttagacttgcaaacaactacaaggagaaattagttgaataatattaaatattgactactgatatgataatatgtgtattcatgtaggaggtaggggttgtgccttcttttccattcattcagaaaaagcgcctatggaggctcgcgaatagagaggcaccatgctcattgctttgggcataccctgcctccagcatgaagtctggcactaggaatttcccattaatgttcagtgaatgaatgaatggaatttcctgccctgctccttgcctccctcccttcccacctccccctaccttccttcctctttttcttccctcccgtcattaaacacatatttactgaatacctacaaaacttctatgactaaaaccaatgagattctcccatgaaatggggtggagagaggggaaaggcagaaaataagcaaggcaattgaataatgtaattccagttagtggtaagtgatgaagaaagcagggctggcttacagggtgagatcgtgcagtggttggggaaggcatggtctaagcaggcctctcctgggaggggacacctgtttagagggctaaatgaatggaggcagccatgcaaaaagctgaaggaaggtcctccaggaagggagagtcatggccctaggaagaggacaagtctgcttcatttagagaacaccatgaagggccagggtactggagcattgtcaacaaggggaaagtgatcgggccgaggacagaaggccaggtcacataggtctttgtagtgtgagaagaactccaaattttattctccggagtggagctgcttaaactgttagtataaattataatggaatttaagtaatgttcacagaggagcagagaagataacagagaccgagaaggacatctgaatttattatattttaattaatttttttagagatagggtcttcctctgccacgtaggctgaagtgtggtggtgccatcatagctcactgcatgaattcctgggctcaagtgatcttcctgcctcagcctcctgagtaggtgggactaaaggcatgcaccaccacacctggctaatttttaaaattttttgtagaggtggggtctcactatgttgcccaggctggtcttgaactcggcctcaagtgatcctcccaccttggcctcctgaagtgttgggattacaggcgtaagccaccacacctggcataacaaggaatttttgacagtgaatcttgactactaagagactaggggaccatgaaagaaaacagtacattaaccaggaaaaggatggctgatacattgaatgatgaagaggaattaaggcaatggaaaatagaacacagacccttggagatgaagaggtcacgatttaccattggctgataacctactgtgatgacatttctcaggaacgaggcgactagaagaaaaacatgaaagaaaagggggctaagagttttcagaattctcacaatactttttaaaaagagtctcaaaaatcaaaaccagttttggcatactgatttctaagacataattcactctccttcttcctatccctcccttccttccttttcttaatagaaattgttttatttatacattttgtattttagttgccttgtcagttaagtgattacattcatactggaaaaaaaaaaacatgggcaatataatcataaaaatacaaatttctggccgggcacagtggctcatgcctgcaaccccagcactttgggaggccgaggtaggtggatcacctgagttcaggagttcaagaccagtctggccaacatggtgaaaccctgtctctactaaaaatacaaaaattagccaggcatggtagcacacacctgcagtcccagctactcaggaggcgaggcaggagaatcacttgaactccggagggcagaggttgcagtgagccaagatggcgccacttcactccagcctgggcgaaagagcaaaactccatctcaaaaacaacaacaacaaacccaaaacaaaaacaaatttctatatttaaaaatgatgtatgtaataatttttttttgctatacttggaacttttttttttaacctactagggatctaatacatgaattatttatgcaggaattcctagattgtcattactacaacacttatggtatatttcttccttgaattgttgagacctgatttattaggtgaaggatgacattgttttcaagggaaaggaatgctgttaaaaaccaagctgttatacaaaggctttcctccaggctctgcaggaactccccagttcttggcttgttgctgattatgctaacaccaacttctggattcatttgagttccgatggctcctgccatactgctcccaattactttaagctgggcatccaatttccacagtaactcctgggttctccttgcccatctgttcctgcagtggcatcaagccccataaagaaggtagctgttaggatattccaacttaatgtcttaccaggaggacctagaccagcaattacaatacaatgacgtaagcattttcctcctctagtcaagttgaagaagaaaagaggagctgacaaacataaggccaaggagtatccctggtcacaaaggctttgaactcttacccaggtgtggagagccatctttggcatgctcgctcccagcacaaaagtgccatggcggtggtctgtccctctaatctacgtaaatctctctacttttctttcttgcttgcttgcttgcttgcttgcttgctttctctctctctctctctctccctctctctctctctttctttctttccttttttttttttttttgagacagagtctcactctgttgcccaggctggagtgcagtggcatgatctcaatctcagctcactgcaacatctgcctcctgggttcaagcgattctcctgtctcagcctcccaagtagctgagcttacaggcaggcaccaccacgctcagctaatttttgtatttttagtagagatggggtttcttcatgttggccaggctggtctcaaactcctgacctcaggtgatcctcccaccttggcatcccaaagtgctgggattacaggtgtgagccactgtgcacggccagatctctctacttttcatagatacagagagggtttggctgtgtgtccccaccaaatctcatgtcaaattgtaatccccagtgttgactggattgtgggggtggggttctcatgcttgtgtgagcaccatcccatcggtgctgttctcgtgatcatgagtgagttatcgtgagatctggttgtttaaaagtgtggtatctctcctccctctctctcttccccctgctcccgccatatgagatgcctgctccccttttgccttctgctgtgattgaaagtttcctgtggcctctccagaagccaagcaggtgccagcatcatgcttcctatccagcctgtgaaaccatgagccaattaaacatcttttctttataaatcacccagtctccggtatttctttatagcagtgcgaggatgaactattacagataccattgcctgtgttcagatttctttagagtcgagcactttcagttatatatcagatgacttcaagatcttttgaaatgatttggttctcttagaaaacttcgtatggacagttgggtaggtggctgggctgatgggcagggtgatgcctgaaggaagaaggatcgtactcattcatttccccaaggctttctcgattgctctgtgaaccacacagggagcgtgagagggcgttgatggggtttgtttcaggatgctctactgcacctggctgaacatcgtttgttgggttgttcttgttagtccaaagggagagggagtctaagagtataatgtgagttggaatcttggagaaacaacttacaaagcttgtgatttgggcaaatccactctctgcacctttcagtgctggcatattaggtaaagacacacatttcagagtggcatgtagagaagttcaaatcccagccatttcatttgctcctggaactttgtacgggaaagtgacttaacttccttttttttttttgagatgaagtctttctctgtcacccgggctggagtgcaatggcgcgatcttggctcactggaacctctgcctcccaggttcaagcaattctcctgcctgagcctcctgagtagctgggattacaggtgcctgccaccatgcccgactaatttttgtattttttagtagagatggggtttcaccatgttggccaggctggtctcgaactcctgacctcaggtgatccacccatctcggcctcccaaaatgctgggattacaggcgtgagccaccgtgcccggcctatgacttaacttctttaaccttgttttttatcctttctaaacaagggtcaaaacattaccttcctcataggattgttgggagaattaagtaaggtaaaactcataagacatataagaactgccatcaagtaaatgctcagtacatgttagctgtcatccatctcgttgttgagaaccaaattaaatatcactctataagtgaaagcactttgttaagacctaaatcaatgttaattattataatgatgaggttgagtattgcttcatccttgatgctactctcctcagtaactttgccaatgatttaaagatgtagaagctattcttgtcagatggatggcacaggcccggggtgggtctcctggtaggacaagaccaagattatggcctatggtcttggacaagaccaagattatggtgacagttgaaattgataaggggtaaaagtaaaagtttcttttatgttcaaaaatgaggtgcattaagaactcctgggaggagacccagcttggaagcagtcaacgtgaaaagttcctgggggttttagttgatggtcagctaatgctgttttgggctgaagaccagaactgctaaattccatctctaatcataagatagttgaaattttgtactttgttctagacaccacatattaggagggccttattatattaggtagaaagaaccttggcaagtcagtgttttgaaaatacggtgggtgaaggacctttaaatgtttgaagttgccatctaaaacaaggattatacatgcttcttgctagcatggaaagtgaaactgtgacagagaagtgggtactggtgagagaaagaatataatttcacaaaagaaaaaactcagtagtaatctctgcagccaaaatggcatgcattgatgaacgtggtgttcccagtggatctgagtagaggctggtgattgtgggaagattctcacactgggtgtcatgttagaccagctgacctctaagggccctatcatgttttatgattttataatatagcaggctgtacagaccatttttaatatagtcttaatttttataaaaatgtattcatgcatatatacatagttataaaacataaccgttaaattctagttaaatgccaccaaagataaaaataataaagtagcttcaaattgtacttattgcaaggtgacctatctgaaatgtcttcttggtcatattataagaggacttaagatgccaaaggggaggatcatagcctattcatatttccatctcccacaaagtgtctggcacacatgtaataattaaagtagacaatctttattgaatgttctcttgtttaaagaagtattttaagcccattatatttaataattcacttaaccatcaaaactgctcaataattttgacactatcattattccatttgacccatgaggacactggcactcactggggtttaaatgacttggccaacatcacacatctaataagtgccagggctgagatttgaactcagaaagtctggttccagagcttgtgttctttaccatcacactctactgcctctgctaatggaaggtactcggtcagtgtttatccagttgatgaactgatggatagatggacgaacggaaggactaacgggggttgcagcacagagtcgcctgaatatgtggcaatgaacaaagaagggcacagattacacgaagagcagatgcagaaagggccgatgagggagggacgctggcaacacctcagtcactgctcttctttgagttgattccgcatagagcatcttagggtgaaacagaacgacgtgcattagcacagagaagcaaaagcttcttctcttgggttcctcctcttcctttgcagaggagatgttttctgtcagaatgattagttagaagtgaacagtgaagtccttcaattagcattccttcaaaatgccatctgtaagtgactaaagaagtgacagccagaaggcagaacacagggctatctccgcacagacaagacaagagccgggaaggcagggacgctcgatcagccgtttccagcaatgttaacgggtccacccactaaactaaacaaatgctttcttcctaccatggagacagaaactgaaaaataatttttgacagcactgtatgatttagtgggtgcttgcagacacagcctatacttagttttataccatatttaatagaacatttcaaactttcataattatttggcagcttttaaaaaataaaaaataaataaataaatagcaaatgcccactgggttactcagtgcaatgaaaataccgtatcatcaggactttgtgatgtcttggcaactcttaccccaactctatccaacacctgctctccaggtaggtcaaggtcaatatacttgactacttcaaagcctcaacaaaaatgttctccatcaccatgttatcaggtgtccacgtcagctgagaagcctgactggtccttttcatgcctgtggaacaagggactgaatcttaaggagagtggagaccttgtgttacttacattctgcattcaagaaactatttctatgaagtttaatgatcaatgatgctttttccttcaaaactatccaaagatttcaaatctgtttgtgcaaggaggcactggattgaactgaatttctagtttcttcatcgactggttccttcattcagtaacaaaactgaacattttaatgtgctgatactgtgtgagagctttacacacattaactgatttaatcagtatgaaaacggtctgcaataagcacatgtattcccatcttacgggcaaagaaatgggctggagaggtttcaggaacatgctccagctggctgaggtgcatctgatgaactctgtgcttccagtgaacttgtaagatccaagtctccaggcgaacatcaagttcttctaggattcatccccagcctttccccagtcttctaggactcctctcccttgctccgccttgaactctgttgttgacatctttcttgccctctacaccgttaaacgattctagagtggtgctatacattggaaataaaatgcgagccacacatataaattgtattttaatatccactttaggaaagcaaaaagaagcaggtgaaagtgattttgataatatattttatttaccacaatatatcaaaaaatttatttcatcctgtaatcagcataaaaattactaataagatatcttatattcttctatggtattaagtctttgaaatctggtttgtattttacatttgcaacacacctcccttcggactacccacattttgagtgctccaaggacgctggctagtggccactgcattgcccggcatatcctaggggagggaaggaatccttagttgttaacgtgtcagacaacatgctatggctcatagttgtcctcctgatgtgtatcttctcctcccgatgtgtatcttctcctcccgtctgcagtataagaagccttcactgggcacgtgtctgccaggtacagactacattccctggcctctcctgcactcagggtcccatgtgactggatctggcacctgagatgtaaacgaaagtgaagcgtgccatttctgggttacgcccttaaagaaggcatgttcccagcccttctccttctctctttgtgcaagctggaaggcaggtatggtgccagtcaccttcaaccacctgagcacgctcaagggacagcagagccacagacgggagcttctgtttccttaccacagagccagccatggggaccatgtcctgagagaaagaggttcctgttttgttcacacaactattgttcatctatgacaagcacggtcatcttcatttactttcatcatttctagaatctaattccgtgctctcttggtggggttagacccaactcttccttcaggtctcagtgaagctttatttcagcagggaggcctttctaatgttctgaagactaggttacagccctcactccatactaccatggcaccctgagcttcccctttctcagcatccgtgcacagggttatttaatgttggtgttcgttctagacctctgtgtcatgggggcatgctgtgaccatcttctgggcacttggcacagtgcttagcacatagaagtgccaaacatttgttcaaagaataaatgtaattaagaggcttaacatgtaagtgatgtgctcttgcccttcccggtttgatgggaatacagaatctctttagattttcctggttcctgttagagagcatcagaatgacagtgcacacaggcaaggctagctgggaggatcgagtggcctgagtgtcatgggttgagttgtatcccttacaaagatatgctgatgtcctaacacccagtaccttggaatgagatcttctttggaaatagtgtcattgtggatgtaattagtcaaggtaaggtgtattagtctggtctcatgctgctaataaagacatactcgacactgggtaatttataaaggaaagagatttaactgactcacagttccacatggctggggaggcctcacaatcatggcggaaggccaatgaggagcaaaggcacgtcttacgtggtggcaggcaagagagcatgtgcaggggacctcccctttataaaaccatcagatcttgtgagacttattcactaccacaaggacagtatggggaaagccacccccatgattcaattatctccacctggcccagcccttgatctgtggggattattacaatttaagggatatttgggtggggacacagccaaaccatatcataaggtcataccaaagtaggttggctctaactgaaacatggctggcatcctcagaagaagaggagggagacacagcaagaaggtggccatgagatgatgggagcagagactggagtgacacagccacaagccaaggattgctggcaaacaccagaagccagaagatgcaaggagggattcttccccatgggtttcagaggaacatgaccttggaggcaccttgatttcagacttctggcctccagaaccgtgagacaacacatttctgctgttctacgccacccggcttgtggcactttataatggcagccctaggagcaaatacatcaaggcagaaaacccgtcacaaacctgctggcatgcccgttcctcctggctacgactccacagcctgttcccaggggtcagcccacaggccagggccaggcggcattgctggctagtggcctgcaggaggggcacttatcagtacttcctcactcccaacatgaaaagtcaggtaaagaagtacaggaagctctgccaaggagtggaagggatttgtacctccttaggacaacttcccaggtaagggcgagtggaggacagggtgtccccactacaggaagaaagagagacatcatcattcagctctcacagacattcctccttcaaaacagaccctctggcaaaggttatcctttaaagaaaaaaaagttcttgctcctctgtcttgaactgggaataaattaggagagataagagacagatattactcctttttaaaactctgtattcccattgaaaagagtcaagggtacaattctcaagtctgtgtgtgtgcacagtgcttacatgtctctctctctctctctctctctcacacacacacacacacacaccatatcccacttacagactgaatactttgcaccacaaagtattttcagctgctcttctcgctcctttccctttcaattcagaaggctaactctagctcaattatctcttccttttgacagaattcacatcaaatgcaaacaagatgagaccaggattctgcctggttctgttgccaaggtgggtgggaagtcggcagcagggatcagtagctgtagctgcttcagcctttgttgaggctaactctcctcccaaggtgtctcaaatagaaaggcttgttcctgatgctttccaattattttcacttcaaagaaatactttaatatatttagttcaaattgcatgatggtaattatgcttctaaatctgatcaaatgacgggagagaggaaacctttgcttccatgaggggatatttgttcttcaatagatgggtctaattttccacagtgggaggactcacaagcactgagactggcttttttcattagttatttataaagctcttattagattggttaaattcacatgtgggaaaaaagacaaattattgttaatcaatttctaacctatactattcataatttagctgatagaaacctctgctcaccaaggggatttttattcaggctgcaaatcagtatcatgttatagagtgtattaattaataaatggaatatttagctttttataattagtgtttgtatttattacatttgttatgttactcctctcctcaacgatcccattataattcctattcctcagtaaataaaagctcactctctggtttggaattcaagcctcctcccaacacaccacatgaccccgccgtgccagccattcacactgctcacagggtcttcagctcccttctccctgagagcttgtgggaagggtgtgctgtcctaacccagttagatgtcgtcaaatgccttgtttggccaatgaaatgtgggtggcaatgacatgtgtaacttgaggccagagcctttaatttctggcactcaactctccatccctcccaccatcctgcttcctgaaggaagggctccacctgccgaccctgatggagaacgaggtcacatcagtctccctgccaaccctattggacaggccttacgcgtgagaaacaaacctttgttgtttcaaaccactgaaatgttgaagttgtttgttactgcaacagactttagtctgtgctgactaatacatccaggatattctttgggaattctagcggctacattctatttttcaagtgaaatatgctttggaacacctatacataataaaagcagagatggtcatgttgaagagtgagatggggtgagtgtgtgtgtatggggatgggggaggattgagattcttctttatcttctactgaagcccccgatgctttgcaacctccgcacatttctcagaactcaggctgaaaccctgtgatctagtccaaaccaaccttcccagctagggtttcgttcaaaggtcacaactggtggcttgtgagcagggtctggacacacacacacacacattttttttttttttttggctcacagagtgcttgaaaagaatctaagacaacatttacagattgggagatcaacgtaaaagatgcatcctaaacttcccttgctaaagtgaagaatgaggacaccctgggcctccactccttcccttcagttgctatttgtcattacacataaatgtctgttgcatatagggaaatatttctgtcccatgtctctatcaaaagtgggaaagggctgtgtttttctaaaagtaagagaaagagtgtatttctttgtggagtgcataattctcctaagtatgaaagtgaaaagctaagatcagtgtttcccacccctcatttctctcgttcatgtcacctgttgcttcttattggctttggaatgtgggacctctcttctagcctcttgcatctacctctatggtttgacttctgaaaatgtggtccctggtccacctggatccaagttagctgagttgctcgtgaaaaatgcagattgcaggtttcatttcagacctactggattcgaggtggtggtggtttctgcattttccataagtaaccctttcccttgacaattcttaggcacaattaatcttgagaattactgctctgtggctgaggtcatcatatattcagaaccaagttctacgaatgggtaaagaatttttattctcttctagctttgaaagacccttcagaaggtagaatttggatgccaaaatgctatgatttctgaaatggtgtccaggaataatacaatgaattatttgaaaccgcagctgttcccaagattacagataaactgaacaccaagttgtcttctgaatgctgccctcactctcctccttccccacttttgttcatgcagtgtctttgccaaaagtccttcggccatgtttccttacaaaatctcacgcatctttaaggtgcagttgaaatgttaatgaaaatcaatgcatccttactattatctaaagtcagttgtgtcaaaacttttagaatttttcatttttcaatagagattatttttaaagacagtttaatttcacggcaaaattgagcagagtacagagagctcccctctcccctctcccctatacatgcacagcctcccccactatcagtgttccccacaagagtggtacatttgttataaatgcaaaatgtacattgacacatcatcacccaaagtcctcagtttacatgaggttcactcctggtgctgtacttcctatgggtttggacaaatgtataacatttatccacctctgcagtattatacaaaagagtttcatggtcctgaaaaccctcagtgctccacatactcatcctttcctccccaaacccctgacaatcatggatctttttactgtgtccagagttttgccttttctagaatatcatatagctgaaaccacacagtatgtagtcttttcagattggcatctttcactggtaatatgcacttaaggttcctctatgtcttcccatggcttgacagtacgtttctttttagcatggaataatatctcactgtctggaagtaccagtttatttatccattcatcgactgaaggacaccttggttgcttcccagatttgtcaattatgaataaatctgctgtcaatatctgtatgaaggtttagttgtatacataagttttcaactaattcaagtaaataccaagaagcatgtttgctagatcatatggtaagcgtatgtttagtttagtttttttttttctttttttttttttttttgagaccaagtctccctctgtcgcccgggctggagtgcaatggcgcaatcttggctcactgcaacctccgcctcctgggttcaagcgattctcctgcctcagactcccaagtagctgggactactggtactcgccaccatgcctggctaatttttgtatttttagtagagacggggtttcaccatattgccaggctagtctcgaactcctgacctcgtgatctgcctgcctcaacctcccaagcgctgggattacaggcaagagccattgtgcccggctgtgtttagttttctaagaaactgccagactgtcttccaaagagactgtaccattttgcattcccaccaacagtgaatgagagttcctggagctccacatcctccccagcatctggtggcatccatgttttgggttttggccattttagtaggtgtgtagaggtatctcattgttttaatttgcaaatgccaaatgacatatgatgttgaacatcttttcatatgcttttttgcatctgtatatcttttttcggtgaggtttctgttcagctcttttgcccatttttaatcttgttgatagttttcttactgtcaattttgaaaagttctttgtatattttggtaatagtccctttatccgataggtcttttgcaatattttctcccagactgttgaatgctttttttttaatggttggtctgtttccaggaatcagaaatcaggcttcacacccagcccagatgttcaagtggttgtttgacttgtctgccatctgcaactgtctctcttctgctttgtactccacgcctctcagatgctggagaaactggtcatttgttctctatagcatctcacattgtgaatttgtacaaggctcagtggcttcttgagccatgggttgtgtgggtctataaaccaaacagacaggccttggacagacaggggtttccttcaggcagcacagcctcagccacagcagcatcctgaggctgaggatgtaacaccaagatatgaagatataaccctacgtttctaagatgcggctgttctgggggaagatataacactacgtttctaagatgcgctgtcagtgagtgacatgagagagaaagtctgcatgtcttagttatcagccatgtgagaaggaatacctggatcactgaatcatctgggcataaaagcttttttatgagttgtgttaaaaactgctttttgtggatcacatgaagcaactctgaaatgcattatcctgatcatcattgttgctaatcatgtccattttgggccatgcactgcacatgcttatcattagtcaattgattaagtttgcactctttgggagaggcactactcctatccctatgttatagctgaggacgctgagacataaagagattaagacgctgtcaaccaagccaataacaatattttctctaagctcatgaacaatgtttggctgtgcagaaaaccaatgacatcaaaaggagagcttctagaagtaaacatgactgatggtaaaggaccccttctaaccaaccctgggaaattagcaaggtttcccagcaccccaagctacttgccttcccaccccttctcttctgaagcaacatcccgactctggaatccattcccacatttaaaaaatgggataatgtgagctgtcatttatgtgcattgactggtagggatgaggatagtaagagtatcctgaaggaggggaccagtaacaagcagggaagagagaaatgggggatttgggagtagcaacctctggagtaccagtgcatttatggaaagataatagttagaacacagtgttatcggctaggactaatgatggtggagcagtgtcggtgagggtatgaggtggctctgatccatgctctacggtgaatgtgtgggaaggacaggtgtggaatggttataagtacatgctctggagtagaaggctctggattaaaaacctgactccacagcttagtaggtgcgtaaccctggggatgtcgcttaattgctttaaccttcactttcttcattttaattgtaggaggagaacagcacttacttcatgcatttgtggcaaggattgagttagatgatacatatccaatgttaagcaccatgtctgatagaaacttcttaatatgttggaaatcttactattttatggttgatgaacgaatggttctagtgactttcagggtatgtcttctggcccaaggctaacagcaggtgtgtattataaaggcaaactgatctcccatgtagagggaggagatgggatctggaaggcctgggtgctacttgtaatactagattgactaaaaggagggtagaacgggagggggctgctgctgtaccgtagagtcttgatgaatttatggctgtcattctgaagattttaatcttgtctgaacaagtcataaaaaagtcttttatacaatagccaagactcatgaacttctgtttgctgcacactgtgctctttctgtgggttattcaggtcattctcaccacaaatatatgggataagtaccattttcatcctaaataacctctgccactaaataacctttgcccccactgcactaagacttttacatgttttaactcacttaatggctgcaacggccccaggaggtagatacttattaattaccctcatttaacagaggtttatggaggtgagggactggactgagggggctatgggggcgacctagtctagctgggttctaaggcagttgctctgcccccagagccctgcttcgagagcctctatgcttctatgaaggtcacaaccagaagcagtccggcctgcagttgctgttttaaaaaagaggttgtaaacatcactcactgcaccacagggtggccgtgacacaaagtcagatgtgagcattcttttagaatccactgtgaggaaaagcctgcttcccccaggaatccacaggcttctattctgataatgatgattatatcaccaccagagtccccttcagccttgatcattgagacaccctagacagggggaaagcattgaagaacctctgtggtcaacctaattctttgctatatccatgatctggattttcagccttgacttctagtttattatgatagtgttaggtctgtccttgttacatgaggaaaggtattaatatatttaaaaagctataccgatgacatgggtatagagacagaagatgtgacttcttatagttagaggtcaaaaagccataagatattcaataacttagaggcttgaagaaagatcccaaagggtctccaaggctggaaggatgggctgaaccgaaccacaagaaatctaatgagggtgacttaaaggcatgaacacagcgttatctgcacctcagagctgggcaaggtctgactccctgaggaagagccggcagggattgccatggggaccactccctgccaggcatagccttttcccaaccctgagcgtccgagcagggtttcaggcagggcgggtcggaaacctcaggtgtgcggggatgggaaaagggggtgaaccctgtgttccccagacctgtactgactgagtcatgttacaagtcaggagttgttgcagggataaatgggaacagaccaaacactgtgaaactttcttttttattattatactttaagttttagggtacatgtgcacaatgtgcaggttagttacatatgtatacatgtgacatgctggtgcgctgcacccaccaacttgtcatctagcattaggtatatctcccaatgctatccctcccccctccccccaccccacaacagtccccagagtgtgatgttccccctcctgtgtccatgtgttcccattgttcaattcccacctatgagtgagaatatgcggtgtttggttttttgttcttgcgatagtttactgagaatgatgatttccaatttcatccatgtccctacaaaggaaatgaactcatcattttttatggctgcatagtattccatggtgtatatgtgccacattttcttaatccagtctatcattgttggacatttgggttggttccaagtctttgctattgtgaatagtgctgcaataaacatacgtgtgcatgtgtctttatagcagcatgatttatagtcctttgggtgtatatccagtaatgggatggctgggtcaaatggtatttctagttctagatccctgaggaatcgccacactgacttccacaatggtcgaactagtttacagtcccaccaacagtgtaaaagtgttcctatttctccacatcctctcaagcatctgttgtttcctgactttttaatgatcgccattctaactggtgtgagatgatatctcattgtggttttgatttgcatttctctgatggccagtgatggtgagcattttttcatgtgttttttggctgcataaatgtcttcttttgagaagtgtctgttcatgtcctttgcccactctttgatggggttgtttgtttttttcttgtaaatttgtttgagttcattgtagattctggatattagccctttgtcagatgagtaggttgcaaaaatattctcccattttgtgggctgcctgttcactctgatggtagtttcttttgctgtgcagaagctgtttagtttaatgagatcccatttgtcaattttggcttttgttgccattgctattggtgttttagacatgaagtccttgcccgtgcctatgtcctgaatggtaatgcttaggttttcttctagggtttttatggttttaggtctaacgtttaagtctttaatccatcttgaattgatttttgtataaggtgtaaggaagggatccagtttcagctttctacatatggctagactgttttcccagcaccatttattaaatagggaatcctttccccattgcttgtttttctcaggtttgtcaaagatcagatagttgtagatatgtggcattatttctgagggctctgttctgttccattgatctatatctctgttttggtaccagtaccatgctgttttggttactgtagccttgtagtatagtttgaagtcaggcagcgtgatgcctccagctttgttcttttggcttaggattgacttggcgatgcgggttcttttttggttccatatgaactttaaagtagttttttccaattctgtgaagaaagtcattggtagcttgatggggatggcattgaatctataaattaccttgggcagtatggccattttcacgatattgattcttcctacccacgagcatggaatgttcttccatttgtttgtatcctctttaatttcattgagcagtggtttgtagttctccttgaagaggtccttcacatcccttgtaaggtggattcctaggtattttattctctttgaagcaattgtgaatgggagttcactcatgatttggctctctgtttgtctgctattggtgtataagaatgcttgtgatttttgtacattgattttgtatcctgagactttgctgaagttgcttatcagcttaaggagattttgggctgagacaatggggttttctagatatacaatcatgtcatctgcaaacagtgacaatttgacttcccaactttcatttacgttacctgcaaactcaatagaggctgaaaaatttgttgcctatttaatgaattcatcaacaaatgctgattgaatgactgctctgggctggtcaaaaagggtcacaggcgagtgagacaagtgcagaaaggaggatgatgcaggtgggtggggcccaggagtggcaggtggctgtggggacctaactgggcttattgagaggcacacagccagtgctcaataatgctaacggtaaaagagtaatattgatttattatacatttaattctttacagataagtgtgatatggctgtcccaaaaagcttgctcagttgtaaactaggccattggtctgcagtaccaaaaagtcaatttggggaaccaccttctgtgagacattaacaaactgtaacccatttgggcaaggctgccacggagccaggagcagcctcacaggaggctgaggaggggcattaagcctccagagaagagacccacaagaggatgtcacaggccgcctgttcagctacactaagcagctcccaggagtgggtctcaagccatgagtgcatgtttcagggaggcagttttaagcctcacgtaaggaagaactttttaaaaattcctctcttcctaaacaaccttcctgaaagatctgaactttttgccacttaagttggacacctgccaaggaaggaaggtgtgcggaacccattccagtagtgggaaagaggtttggtgactaggctttaagttccttttcagcctaagattctgtggggctaagaagacgagtgactttttgtctaagtatcttttcagtgtggcatttgtaacattgctcatctctatgaaatggaatgatccatttcctatcaagtgaatttggggcatcagttctcagttttgacacaatgacttgggcagattattaaatcacattatgtactggtctgcctgtacatggcccaatttaaccctcgaaggtggctatggggtggggaaccgccaattataatctacaatctcttttgctaactagcattccactggtcagggaagttccagacagctgctggggacagccaagctttcctctcggcccagcacgcagctgttcaggaagggatgctctcttcctttgagcccttccccctaccctccattctctgcctcctctatatcttgactcttctctctgctcctgatggtaccatgcacagttgatattttctgtcaatttaatcccattttaggtggtatttcatattttcctaccctcactaaaacctccttaaacattcagtaaactatattttcataacgggttttcacgtccagcctgaatcactccctgaccacccaagtaagctcgttgacttacttttccatctttgtatgctcagtgcaaaacataggtccaggtttataataggtgctcaatacataatagtagatgaaataaatgacctaccttttctgacacatgggaatgcctttctatattcttatttttggtagtgaagtttctgataaaacgtatccagggaaacacgttgctaatagaagtatcgcacacgttaggcataaaagctgtacccttttttaagtgccacagaggactaataactgttagtttgcaatcacagactacaaaagaaatgattgcatgaatagctgagattccaggtgttaattcaatagcaaaaaaatgtgtgtgtccttgtactttagtttctgatggttaggagctgatgtgtacttgcttttgaattcactaaaatcagattcaagaccttctataaatctgtagactcaaaggaatggaaaatgcccccaaaggtcacctggcacaaaccctgcctttaggcagaacaagatataaaactccttgtcgactgtctatcctttaaaaacctgtctcaaggagaatatttttaagtattttctttttctttaacctcggaaacgcttttcctgagggtcagtccttatggctccattacacatgatgaaaaattctcccctgccatattgtaagatcatttccatttgctctgtcctcagcagagcaggaaaacattggtcagcttcctccgtatcatgtcccttaatacacttaataaatccgccctgagctcccttttcctcagacttcataaatccaattcctcaagccgatcctcacagatcagttttgcaaccctttaatcattttaataatttttgtcactctcagttgaatcatttccaatttatctgtagcctactttttttccccctcaattaaacaccatggtaatgcaaaacggaccagagctaagaataggaaagtttcacagttcttgagtgttataattcctttttttttttttggagatggagtttcactcttgttgccgagactggagtgcaatggtgcgctcttggctcaccacaacctctgcctcccaggttcaagtgattctcccgcctcagcctcccaagtagctgggattacaggcatgcgccaccatgcccagctaattttgtatttttagtagagacagggtttctccatgttggtcaggctagtctcgaactcctgacctcaggtgatccgccagtcttggcctcccaaagtgctgggattacaggcgtgagccaccatgtctggccgggtgttatgattctatgacaacatcacagaaacattttggtatctaaagacttttcttttttttttttttaaattagaagagcaccagaaaactttttcacctcctgttcttgggcaacactaccttccagatctttctcagcagtgcttgagaaaaagcacttagtcctagtgttagctgtttattcatcctcgcagagagaaaatgatccattctgagatcaaaaagaatggcaaagcctcgaaaaagagaggtaagaaactcaaggcttttagagccagggaggagcctggagaatagggggcagccaggtgggcatggtggcagattggaagcacctgtgctgtttaaaggaggggatggcctttcatgttaagctgatttttttcttcacatgagaatgcccatctagtgcaccaggagcttcctttggggggaaaaaaagaaaaaaaggctgggcacggtggcttacacctgtaatctcaacacttggtgagaggccgaggagggtggatcacaagtttaggagttcgagaccagcctgaccaacatggtgaaaccccgtctttactaaaaatacaaaaattagctgtgtgtggtggtgcgcgcctgtaatcccagctactcaggaggctgaagcaggagaattgcttgaacccaggaggcagaggttgcagtgagccgagattgtgccactgtactccagcctgggtgacagagtgagactccatctcaaaaaaaaaaaaaaaaaaaaaaaagttaagccacaaatcgatattttaaatttaaatataaaatggcttaattaatccattgtgcagctcaaccctgtgtgggctcaaaaaggtgcaagcaaggttttgcccatgggctcctgcattcatgcccttgccaggaggctaatcctctaccgtccttatgatttctataagaaatttctgaagacatatgcatcgttgagaggcatgttctttacacatgaacacttttataaaattgtgttttaagaggagattttaaagggcaggaacctaggctctttactctctaatgatgaaattccagatgcagtggctactaaaaatgacacaaatttgtggagatgaaccttcttgatgctttgtaataactcaaccatcacaggatgtgcggtatcatgaagcgtgattgtccctgagatcgccagtgaggcatcgtgaagtgtgactgtccctgaggtcgccagtgaggcatcgtgaagtgtgactgtccctgaggtcgccagtgaggcatcgtgaagtgtgactgtccctgagatccccacatcaagttgttgtttccagttaatctgagaccaacgcgaagcccattgaagaaatgcacccacttgtgcttagtattctaattttcaaacccagcaggttcaattcccttacaaaggttggtctaggatagagttctgggtatagaaaggcaatttaaccaaaatgctttaccctaattacacagcaaagctatttgcataagtaaccagtctgggtattaagagacccaagagagtcaatgttactccagcagaagttatgtttttgctaaccttcaagaaaataatagcaagtcaagacttccaatgttctatttgtaaaagcaaatgatagaggatataatcctttatcatttgaatgaaatatgttggaaagagattggtctccattggaagtgggctgaaaatggccctcctttcccctgtggccatttttgcaggagagggtgttgaccgtattgagcgtggataagggaaatagtttttgttatatcaaaagaagccagtccagacatgattttcttcttccaatatggaagatgctatttttaaagaggccactgatcttttgtttgctatagaaaatgaagtaatctcttagggtaatggactcaaactataacaaaggacaggttatcttaaaatttgataagacatttctaacaggtaaacaatgacatcgtttactaggaagaaaaataaatgttctttgtggagatttttaaaaatagacaaaacaatcacctgaagagattggcctatgaggcttaaatcacggcactgcaggagcagttcaatttgtcagattggaaatatgatgtaagtttaaaaaatagaggaaaataaacacaatctagattgctgctacatatatagttcagatgatttaaacttttgcaacaaaatgatgcttggtatttatcagttttcccttccaatagaatataaaccgcacgaggcctaagactgtgatgtcaactggaaacaaatcccttcatttctagactcctggggaattggcaataaggataaagaaaataagtattatgaaggatgagcaaaataataatgcatctttcatggactccacagccatatctgacaccgttatttctgtgaaaggttttagcccatgacaattgactggacacgttaggaattatggtcatactgtcaccatctattcaagaacacccagccctcatgacatgagcaaataacagcactgacctgcctaagtgaccagacaatcctttaaaggagtatcactaaattgcagcattccaaggccaggggtcaagatgaaaaagaacgatccagactgcaagttgccaggttactgcagaatgaaagtggcagatgggttgatcttaggaaaaaaaaaaaaatctgctaactggtgcagaaaacattagtctgggagaagaatatctcactttagcggagacagctcccgcagttccattcattacgatccgcgggaaggctagacttgctgtgagggttcagccaaggctcaggcccacgtttccccctaacacagacacacatgtgcacacacacctacattgttgtcactgtatgcagaatctcctgccaagagccaaagtgacaaaaattatacagtagcttgatgggaataagaacacaagtgtacctaatctattcaatgtaagtctgaaaatggaaagaggtctacaaagaacagtattactaaaacagtaacagaggtggtttcatttttattagtaaaaaatgctctaaagcctctgactgctgcaaatatgataaaacagcacatcccaagctcagaaaaatggtttaaaacaactctaaggaaatgacccccccctgaaaatcaaatggaagtggaaacacacttggccaaaaagggaggctctggtgcataagacaatataataaaattatagggaaacaatatgatagaaatgaatctgatgaagtgtattgctattgtaagtaaattcatgcggagaagtattgaacaaaccacaagaagggacacctcgttggtagggatgacacctttgacgtgctaacaactgctcatttctcacggtcaacagagcgggcttcctttcaggtcaccatattgaacacacctggcttggactgaaattcctggtgaattggtatacaaggtttgtcattaactctgcacccaaaataaccacacaaccaagaggaagctctttctaccttttaatgttgtgagatgattgttctacacgaggagaaaacaatcacgtgtgactatgtagagcaaacgcggagaggcaagtgcccctgactcttacttgccgtcctcctggcctccctggtgcacacagctatgggggctggaagttagcataattacttccaattaaattaaggtggcacagctttttcccctttctctttgaatagctgtaggcttaagaaacaatatccgtgctgatgatattccataacaatatggtttcatcaatactgctaggtgtaagaactttgggagtcatacattaacctgccttcctcttgcctctcagagaaatgcccatctggcctccacagaaccactcttgccacggtttcgatttctcaggtcaggaccaggacaagttccactcacttaggaaagcagatgtttaggagtttcctatttggcgactcatgaaaatgatagactggtttctagaaataaaaatttggctgcctcttaagctattacattctcaaactgtgacgggatattcccatttgagcttaaagatacatgttttgtttgtttgcttgctttgttttttgagatggggtctcgctctgtcacccaggctggagtgcagtggtgcgatctcagcacactgcaacctccgccccccgggttcaagtgattctcctgcctcagcctcccgggtagctgggactacaggtgcatgccaccacgcttggctaattttttttatttttagtagagacgggatttcaccatgttagccaggatggtctcgatctcctgacctcgttcgtgatctgcccgcctcagtctcccagagtgctgggattacagcacatttttttttttttttgaaagagccctttctgctttttttcatttgtttacaagataaatttttgaaggtaaatgtgggcaaggaggtaaacaaactgagccactacatgaaggaacccgaagttggactccttctaggaggtgattttctacctgagcatgctgtacgggccttgctgctgctgttgtttttaacttaagaatgactttcccctgtaagacatctcatgagaaggcggggaaagcactactttacaacgagcatgggaggtgggcttatctcccagatccatcactgaaagctgggctatcttggggaaattatttaactttcctgaccttttgttccctcctctataaaatggtgacaaatagaataccttcctgacagggttgtagagaggactaattgagacaaccaacgtgccagcattttgggaatcattaaggtctatgaaaagttggtggttgtgtaactgtaacagctgtattttaggaccccaggaattacgatcttctcaaagcagaaatgtatttctttgtaaccttattatctagtatatttcctggtgcaactaggatctcaggaactgtaaataaacaatagatttaaagaacaaatgactgaatgaatgagagaaccaaagaaaaaggagtagagagagtggaaaaaaacaaaacaaaaccccagagtccttgctttctcaagatttctgcaaatgaaagatatttatttatccaactgggcaaggactctttaggcaggttgcacagacaggagttggatggtgaatgtggtcatgatcttgagaaacaaaccgggtctgagctgcaggacagggtcagaccatataaggctgggactgggactctgaacagttttttgggggtaaagttttattttgaggagtgataggggttatggggaaaaagggtgaagaaggcaaggttttaaaacagaataaaaccaaggccagctattttgaggatgagcttgaacagatctgaacgcgagggacaaggtgacaaaaagcaagagagggttaaggatctgcgtctgtgactcacgctggcttaggagggaggtgatgggtggggaggaaactggagttgggggatagccgtttgtcctgatgattagaggctggtatctgggacctcattgtaaagagactaggtccagggaaaggggacccagtgactaggggctgaaagaaaactttgttgctgtgggaaccaggagaccagaagggctctggttccaggaggactgcggggaggccaggaacccaccccttgaaaactgcactaggaagtccagagcggcaagctccttagtgctgccgtcatggtgcctactacggagtcctctgggttcctctcccctgaagccaagggtgtcccctggtctcaagcagcactgaactttgaggtggcagttgagaggcccaattgttagttaaagatgggccagggggaatatcttcatcacaagatgcataaaagcgactctatacatgtcttatttcctttaaaaagcatgaggccaacgtgcagtgtcttccaggctgttttctaaattgtgccatgaaagggcacattcacactactgacatgtcctgcttttattgttacaccttcctccaactgcatctactgaacatctattatatgcatagtaccaacgagaaatcagcatccaactgttttcccccttcctgttatctgaaaacacagaacagcgttagataatttaaaatgaaaacagcaaaagtgaccaataataacaccgtattaacctggttaagttttctggattctggatttcttgtgagtttttatccatgtacatatatttttgtaatattgtactcatagtaaatgtaattttgtggagcttattcttatatgactacactgcctttagagatgaatcttaattttcaggcatttggttgtgggatgcttaggctatgagaagctggatctcaacatttaaagcaggatcatttaaaatgaggagtcaattgtgttacttcacatgtgtttcatttgaaacagtatatcgttatgctactatgataactacagcaaatcctccttaggactgatttaagcattgaataaataaagttaaaattgagtacactgccattttcagtgcttcttgacttctacacacttatcaactactacaaatctgatggcatccactttccagtgggttagctttcacctcgacaggtctcaaggttcttcttatgggattttagtccatggcaatcaccaccatttgagcacagtcacctagtatagctggatatttaaagaaaagaaaaaaaagagaagctaatggcttttcacacatgcactgaaaaaaattaataacctgataatttctggcaaaggagaaaattttttttccttataagactgcaaagttcaacattatgtgatttatctcagtgacctgtaagtagtgcctataattattaaaaataaccatcaagctggcttttaagaagcttcattatggtactgctaatacaatgcccaactccattacttttttctatataaccttaaaacagagccagttcattcctagtgtttccaaagtgttactttaagaagaaaagtgggccaggcgcagtggctcacgcctgtaatcccagcactttgggaggctgaggtgggtgggtcacctgaggccaggagtttgagaccagcctgtccgacatggtgaaaccccatctctacttaaaaaacaaaaacaaaaacaatccgcaaaaattagctgggtgtgatggcgggtgcctgtaattccagctactcgggaggctaaggtaggagaattgattgaacccaggagacagaggttgcagtgagccaagattgcaccactgtgcactccagcctgggtggcagagtgaggctccttctaaaaaaaaaaaaaaaaaaaaaaaaaagaagaagaagaaagaagaaagaagaagaagaagaagaaaaagaagaaaagtgggctaggtatggtggctcacgcctgcaatctcaacactttgggaggccgagactggtggatcacctgagattaggagttcgagaccagcctggccaacgtggtaaaactccatctccactaaaaaacaaaaactagccaggcatggtgtcgcatgcttataatcctagctattcaggaggctgaggcaggagaattgctgaaacctgggcagtgcgggttgcagtgagccaagatcgcaccactgcactccagcctgggtgacagagcaagactcaatctcaaaaaaaaaaaaaaaaaaaaagaaagaaaaaagaaaagtacaggaacatgactcttaaataagccaccatttcagtggatgcatttattgaattgatgctttcagtaagttgtttctcattgtatgcatcatgttaaaagttgtatttaatccacaggtttaatgattaatttcttccagttagggtaaaaatatagtattatagagtttatagtaatagtgttgatttcaacttacgatggagtaaacaggttttgtaattgccttgggaaagccagaacagaaaaagtaattctatcagcaacatggaagcaaaatgagtagatgacttcttttatctgggaagcacattttcaatcacgagttcatgattgacaagtgtgagtttgtttggctggggcagggttccgtgtgactgacctatctttttaggttcattcgtgttgaccaatctttatggatctgggagcagtaagtcaacctagaatcaccaaatttggctacttatatggtgacatcacagcgcaccaaaacgtacatcaaaaccactgaatctgttggtttcatggggttctgcttgggtaaggacccagccacacagttataagatgaaatcaagagttgaggtgctaggccgggcgtggtggctcacacctgtaatcccagcactttgggaggccaaagcaggcagatcacaaggtcaggagatcaagaccatcctggctaacacggtgaaaccctgtctctactaaaaatacaaaaaattagccgggcatggtggcggtcgcctgtagtcccagctactcaggaggctgaggcaggagaatggtgtgaacctggaaggcggagcttgcagtgagccgagatcgcgtcactgcactccagcctgggtgacagagtgagactctatctcaaaaaaaaaaaaaaaaaaaaaaaaaagagttgaggtggtagttgcacaaacctacctgtgataagtagagctatacgcatacactgtagcaaagtcaatttcctggttttggtactgtactctagctatgcaagaggtagccatttggaaaaagctggtgaagggtacctgggacctttctgtgctatgtttacaacttcctgtgtatccataactatttcaaaataaaaagtaaagcacacatgaaatcaagaggactattatttcctcggggagactggcagaagttggctgcacagtggcttcaagctggagggagatttggcttctatgagggcatgtgcgagtctagctctccagataccttagatgaaggccactggcctggggatggggccgggggcactcactgcctccctcactggcagctggacagtgactccacaccatggggccggggaggtggcaacataggtgcatgagagggggactgcccccaccctgcatatctgctggcgctgaaattctctcaggacagctcagccctgctttccagaagatgagaggacttcacaaagctgcccactgccactgagcaaacagaatgtcctgtgcagggaaagcagcagaagggcccagaaacagccagtagccaggcgtggtggtgggcgcctgtagtcccagctacttgggaggctgggcagcagcctgggcagcaaggtcaagtgcaggctgctgtggcactgggcgctgcccctggctgtgcaatcccagggctctgggtgagagctgaaccgaggctcacatctgcccttgctgggttccaccaccttctggcaaagagcattattggttcaatgttaatgccacggcctccccctagcagcacaagcccagcctccgctcacccagccccctagtgaggtgaaccacggctcctgtccaggggcccattgcaagtttccacacatcctcctgcctgctgcagagggccggcggtgtgccttgatacttggctatgcatcccatccacctctagcagcccctggcagctgccttgcacagaagagtcacctggtgaacactgactgaattgagtcaaatagaaagcagctctcactcagagagcagccctccacaccaatgtcagggagaggaaggctgagcacaagagaatctccctctgtccacagaaatgcctgagcatggaactctgggaaaactgcactcgtgtccagatgcaagtaaatgataaactcctcgagacttcagacagagagcatagacatttatagcgcaatgtacttgtaacacccagagacaataagccctcttgccaagtctttgctttgggagtataggctaattgagggagattgcactgttagtgaaaaaagtggaatgtttaataccaagtagggagggggtctgcctttccaagctggggaagtagggaggagagaggaggtttgtgtggatggtgctgttcaaggttcccctctgaatcctgctcacctttaaatacctctggcaggcctgcataaagggcccatttcccttcctcatctagtcgaaaataccagcaggattgctctgaatgaggagacaggagcctccattaaaatgcagacgccaattactctgcaggatgggcactaagcttatcctccagacttttactggtctagcaatttgattagtatcagggtagtaacatatctccctccaaagcgtggagagctcagaggggagggatatagtgaaagacaggtggattcagcatgatcagatctggatgggctgagcccaaggagaatgtgggctggagatcaggaataggcaggtgtgatggagaacttacaagggtaccatgaaagggaagagatataaacaagcaaaaagatatgagcttatctgttacgtatttctttacaattttacataaggttagtccttatggtgtactagaataatttccatttatgtgcaaggtaagatcatttttacatttagccatcatcttcattgacgatgcaattcttagagtaccttagagaatctagaggaaatagagtggtggccttcagcgcattcctccatcttattctcctgcccacacccaggaccagaagaagaacacattgtcattcagtctgaaaccacctcaaagaagcagggtttggtaacaattagaaggtgaaagagaaaaatcacctaagctgatctaatttctttctaaagggaggaagtgtattaattgagggtggggaggaggaatagcttgaggaaacttgtgtttccaagaaacagcctcaccagtagagattgtctgtggtttgcctgttcttgctgtaggcaggtgcacagttgatggaaggccatgcttatgagtcttcgatgacaaatgatgggtacatgatgggttgaaactctcctgagctttcttcactttcttggcttctctctatgctcaaatctctctatgcattttttttttttttttgagaaagagtcttgctctgtcgtccaggctggagtacaatggcgtgatctcagctcactgcaacctctgcctcctgagttcaagtaattctcctgcctcagtctcctaagtagctgggattacaggtggccatcaccaggcccggctaattttttttgtatttttagtagagatggggtttcaccatgttggccaggctcatctcaaactcttgacctcaggtgatccacccacctcggcctttcaaagtgctgggattacaggagtgaacccctgtgctcagccaatagttaattctttattttgaaatattctaggaggaggaaaaaaaaatctgaccatatccaaaggttagtagttaatagctaaatatcaacaaagaggatacagctaaagattccctaaagtttgagtcctgggtcttatttaattggtgacttgaataacatatttgaaagtaggctcatgaatctacagatgaatcttcaaaatacctttattatgataaaagagaaatccaatgctgatgagtaggcttgacttatgatgagaaagctgttcttccaaatcaaaatgtagtgaagacattttacataaagacacaagaaactccgcatagtcatctttgtatcacagatgcttacctagtatctgacatagggtcaatacccataaatgcttcttgaaatcagggttcagttagacacaaagctacagagcttaattaaacatataacaagatcattggtcattattacgaataaactcatgtttactggcctcttctcccgtatgtgaagagggatttcttattaatcccgggtcttaaatgagtttgtcctcagcaggatctcaaagtcataagagagctacaaagattgacaattattagacagtgtcagagttggaggtgagtcttaggttgggttgatgaagcaggagacttctagttctcaagaaaatgaagaataagagagtgacaaacagtgaccatatatgagcaacgtattacccatttgcctacatatattcattttgcactatatggaattacatatttttcatttccaagaatttgttgctcatccattgttgcaggtctgacaaattaccgaaagcaaagcataaaattaggatagaaatcccattgtgttaaagttccatggaaattatgcagaaactcaactgcacagaagagtgcattaaagatacagtggttgccctggggaagcttgctttcttcttaagtattaaacatgtcattttcatatttgagcaaaaacctgaataaactctgccctcaaagaaatgaaagataaccactgactgtgcacttcatataagcttcactgctacattttaaagtatcctgaatagtcccatgatgttaagatagcaacactttattatacacattactaacgtggcaagctctgaaggtcagggagtggctggctggtcttcagcttgacccatttgggaggtccattttcatctttggattatctggcctctcagtttgattactggggccataaacagctttcccgtgagagctgaggtgaacatttcttgctcattaggcctcttccagacaagcctcccttgcatgcaatgaatatgcacttgatgcccagtgaacatgcacttgatactcaatcattgttcttgacttgacattctggttgattatcagacatgtaatccatcagaacagagatgcaaactgaggatcttgaattttgttagtttcattccagagaaagctctgttggggctgggaggggtggcagaacggatgtggacggcgaatattgatgcggtgtgtgtgtatataatgttctcctgggagaggtgtttcttaaaaagccgagttggttttcaacgtgatatttaaccgaatgctgccaaattgtgctacctccccagcacgttaaaaaaatccattaataaagtgtttgttgttgtcagaatgcctattccaaagcttgggctgtgtgaagggctgactccccacaagagaccgatgacaggcgagggaggtagaggagagggctgaagatggatatgtgctgccttgctgacaagtggtgaggacaagcgaggcgatggatcagtagaattttccattaaatcaagaaaaacacaacttgccccccaacatcacctctgatggtttcttagaccagctgcttctctgactccctactgaggaacaaattgctttcctggcgggacatttggacactcctgcattaatagatatggatcccagcatgccaagccaagcaagaaggcaatttaatatgagcaacactgtcatctcaatttaggacaacagctagaatgccctacagggcactgcaacagcttcgagaagtacatgacagaagacattctcactgtcttgaggctagagaaagctggtgtttctagtaaacagtcagaccaaggataatagaaaatgtaatgcaaagatgacagcagcattgtcctatctgtgaacatcagtttcaattcatgtgtctttcccttccgtagtgaacggaggtcctgtgtagggtacttcccttctatctcaatcccatcacaaagacacaaacaaaaagcccagtgacatcgtatcaataaagaaataggtaacattagatgacagatgttgtatacctatgtttgaggaaggtcaaagtaagaggtaacttcacgtttgcatgttcaaacttacttatctatctttgatgctatgcaagacaaaataaatggaagccctttaaatttccacctcctaacactagcctgtatgcaagaaaaatatattcttgctttttaaaaaaaaactctaaatgcattatgttttggtacatactttaatattagtttctattttatttttccataataaagacatggttgaatccagtgtatctattatgctaagataatttatgctaggataatatttttgataggaattctcataacaaatcagcttcatgtaccaattacaaaattgggagataactaaatttttataaaacgttttggcaatatctactgatacatcagtttattttaagtcagtgtggtttcttatcaatcatattgccagggattcatacataaattgagaataaaatatgttcacatgtaacaaaaatacaaatgtatctcctgttagagtctctctagatagagacagaaaaagtgacacagtagattcacacttgagtttgctcacagacaatggcgattcatatcaattgcaatgcttttcatggtgtcattttgcattagacacaaaatcgcaaaataactcaattggtcattaccatgaacacttcaccatggaactagctatgtgacagctcataaggctatcattattatgttgtcaaaagtccctattgctaacatttactgtatgatgaaaaaggtctttcccctatctcatgtgtgtttgatgaggtgacattgttttataaatcaatttcatggaaagtaagtatttatcttaaaatggtatccttttatctttctctgttcctcctcttctccctcctgttactgtttttcttcttcttttgcaaaacatttgaacacagaagcaaaccatttttcaaaataccatctgagaaacccatcaagcatggatagcacctgtgaccagaggagagcctctcagcaagagagagactgggaataacatttcccgtatcacttgggaagtaagaggaaaaaaatgaacacaattcaatccatgaattaaaaaaattttttttcctatccagatagttctcattattttttcattaaatattttttaacataaaaatcccttgtttccactattttctatttgtgaaaaggcaagaaaataataccagctttctgtgcatagatctatcacagcacttccaaaaggatgttggaattattttagatcgtggactccctgagcagcaagggtggtccagtcttgtatttccagcacccatgaaaaatgactccatataatattgggcagaagtgctctgaatgaaatgctcccaaatagaaaaaaattgttttgtgtatctataggaagatatttcagaattatattttatttttttatttttccagagacagggtctcactctgttgcccaggctggagtgcaatggcatgaacatagctcactgtagtctcgaactcctgggctcaagtgatcctcttgcctcagtctcccaagtagctagaactacggctgcatgcccctgtgctcagctaattttttttagtatatttggtagaaacggggcctcactatgctgcccaggctcaaaactatctttagactcaacaatagttaaaaccaaaaatagtttaaattgaaggttttgaattccagagggattatgcttttcggagctgaatttcctcaaacaaccgtaacctcatctgcttgcatagcatataatatttatcaaatactaaacaaaaaatggtgaatctggaggtgaagagatatttctgcaaaggagtcttgatgattaaaagttttcaaaattataccttcacctcttatcagtgcacaacatcgtaagagtttggagggagacactcatctgctttccttcccaatgagtaggtgtacgcaggacggagcctgtcagaagagcagggctggctgctgtccttgcatccgtttgatgtaggagatcacaggaaacaatgtgaaattctgcagcctggttttaaaatttcttacatcttttacacatttcaaaacatcaaatatgtttgttgtagcttgttcttacctctattctgcctaagcaaatgatatttcatctcttaatgtgaaaataagatttttgagttgacacattcattcattttctaaaaggtgtgtgtgtgtgtgtgtgtgtatgtgtgtgtgagtagggttctgtgtgagatggacgggtgaagccataaggatatatagtataaagccatcctttataaaacaggacaacaaatcttacactaaaaatttgctctgtagagttgcaagcctcagaaagtttaggagtgtcacctgtcctgttcctgggcctggagatgagggtccacctctcccaggtcctgaggactttcctcctggagcctagcctgccagtgagtaggctgctctgatctcttctccctgcactccaacatcttgctttcagctttgccctctaaatactggaataaaagggccaacaggtcagggatattgggagcaggagaactgtggtgctgcatgaatttaagggatgtttttattataagatcagagaaggaaaaatgatcagaaagcaaagagaggaaaagtttagtttatgagaaggctgtaggaggcagttcccggagcctaagtattaaaatatgaacagagacaagagaacctacctgcacttagtatccctgtacttgggatctttgaaggctatactattttaaaaaattattctattcagcgcattgcatcagaaatgcttctatgttaatctggaaataggtgttctaattatagatgctaaaaatgttctgtatactacttggctatagaatagcctacagatataataaaaaataattatttaaagtaatttttggaaaacaacccaataacttagataatgttattaatatgggtatcaaatattttaaatctaattataccaatgtctcaaatatataacaaatataacagaaaagattaactgaaagataggtttaagttgcctgtaacccaaatctgtgtatataagcaatttagtattgtgtatcttctaaagaccactgcttgaatacaattaaatgatcactcacatataatagtgggctgataaaccagctcttttccaaccttcctaaaaaaaaaggtcagtcccataaatactctcatcacagtcagtttcaagctgccaacatgaagttgctgaacatggagctggaaaaagatgtgcataactggctcctgtgaacctggtacagctggctccagcctccagtagacactcatgtgttcagacacatgcatgtgcgtgcacacaaacacacctgttcaacagattacagttgcttattgtattgtacttgagtattgaataattgcttcttgcttactttgaaaagtacctaagctacaacaatgggcaaaaagtttctcgaatgcacacaaactaaaatattaagtgatattttcctattgtcttcttttttgttgtcctgtcttgctaattctttcttgtttacatgctataaccattagaagctctgctaacatcttaaataaaatagaaatattaaaatatatatataaatataagtaatataaataaatataatgaaataaaatctcaaagcatcagtaattgctacatgaggagcaaaccctctgatataattttacatttactcatccattcatttgcaaatgtttgctaagcactgtaggggacagaaaagactttctttatcctctgaaggttcgataatgtagtctatgaaataaactgacagtagacagatcaacacgataaaatacatacaaatttattacatacatatgcatgagagtccctcaaaatataaggctcaaagaaggggtaggtaattggagtttatatagaatccctgggctacagaaaggaatagaggtttggggtctctggctgggaggtggtgacaggttatggaaaggtgaggggaggaaatgtatgatgaacaaaggctatcttgttataccgatagaaagcctcaggagtagtaaaagttgtttcagtgcatctctcagaagaatctgtgatcacctgtgacagagtctgtctgggtaaggtatcacctccaatcttacctcctgtgataagatcttctctgtttcatgagattcctatgacaattattttcctttatagatatagatttcttttacaaaagaacagctattcagaggcacttctgtgtctgcaacttctcagaataaccagctcaaaatatgccaaagaagtacattctggggtggcatgttctggtctcctaccatcatattttggggtgaagtgtcttgagccccaacggcatcaagtatgaacttggagccagggctttggtgtacatttctgtaatttgtgcttcacacaaacaattccacctataaggccagaagggctgggaaacagggcatttccctccctgaaccttacaacctgctggatgctatgcccacatgagggaggggtgccttctaattcacagcaagatgccttctgctaccaagtgctgtggcctctctctgcctgaggggtggagtgaggaacatctgcccatgggtagtagcaccttgtaaaatctaaaaggtggggaggcaaagaggacacgcactgcatcttcttcccttgcacttccttttactactagaatgagagtttcctctttccgtgatgctctaatattcctagtcaggccaagctattgctaatcagaacattctccggctctccagtcttctttattagactggcctctacagggctggagtctcttttctgacagtgccactgaatcagctgtctgaagaacccttgcgggagactgatggaccttcacagacaccgtttctctaggtcagctcagtttaccccaaggccacaggcattactgcctcctttaacacagcactgcttttaaacatttctttccccccacttagtccccagagacttagagttaacttgaataaattcccctaatctgagattgaaaagacagaaaagatagaaatcttttcttccttcaaaatacttaacatatatttgtgggacagaagaatttccatagatataatatatgcataaaatgtcactgttaaagtaatcctcaggggaaagatttttcatttgtgactttacttagccatgtcatattgagacaggattttattctgattggtagtttttggttttctctttctgtttagtaatgaatactggtaaacctcccagctacaaatatctcctgatatgttaaagaaacagagtcttccatagctgtagtgggtgcacagctgtgggaacgcaatgtggcctctcatacactccaggagctgttcctccaccccttccatgaaggaaaggtgatgccttaacccttttggagaggtgagcagtcttgaagccctcaataatatccaccagcaccccagtgaaaatgggaaataagacaggaacttggagaactcccattgagaaaagatcctagaaatcacagcagagtggcagggtctttctcaactgtgtccaagtggaaatggggttgtgtacaaatagggccccctcatataacacgcaactgactccagggcacacccatacttttaacgtctgattgctttcaagaatgctgtgaaaagttgttgcgagatacatgggattgagacttctgcagtaaagggttgaggttagacactgagtaacttcttgtcagtaaaaggaattaaacactgcctcaggagatggtataattatctcctggggaggtgactttttgtcttgaatgattaggtgaagtccaatgagaatctaagaggctggatgaaaattcttggaaattaagccacaactgaaaaaaggagccaaataaataaggccttctctggggcctcataccgtgtaccaagggtcgaagaagtaaagtttgcctgactcatgattctagcttagaaggcaggaatcctgctttgttttatttgaattattgcattgatattcacaacaacagtcttgtttgaatatcttaatttaggagtctgctacttaaaacagctgtcttatgtctatgagatatacgagccacaaccacagactctacgctgcgttcctctccctagtcaccgcatgccttcctgttccagtgaaatttagggtattgaaaggcaagagtctcatcttcgaatatctgatttgatgagtgattgctggaagtggatgccttagggaaggtgagaagacaatgatggggatgatgttgacacctggttgtggctgacggctgtgtccctccagctgcctcacctggggccgcagtaagcaccaagttcacaggcttagtgaggcgagtcacacattagcccatctgctctggtaatgtcaataccagcatgcaagaaagctccgagtcttagagatggaagaggcctccttttgtagaggaacgggaaacagtggcacaggaaaggtgaaatggcttacttatgatctcacagcaatgggacagagaaatggctggtttctcttcaaactcacacagtttcagttccagtaataaaacatctaaacctccatatttggacgaagtatagtctactcataggattacggcaactcagtttaagtgaggctgttttggaagaagctgtcctacatataagttgtcttctgcaaaataagacacaaaaatagttttgaaatcaaaaaagatttataaacattattggtacaactgatttttgtctctggctggaaaatttttcatgggttacacattctttcatatatttctcacatttgagaagtggagatttaattgcttacattttgatgatgaagaaaaataccacttgacacaaattaatgtcaatccttgagggaccagttccttttccacggcatatataataaaataacacaggaacattaatctactttgtagagtagtgaaacttattgagcatgttataaaaacaacagagcagcaaaagcattttacttaagaagcatttaaaaaaaaaaccctcattcatttcacaccactctgatgttttagccaacagttttttcactgggccgtggctgtgcacacgggcttcttgccatcacttaaatggacacttctcaaactctccctcacaggtgttcctggacagcacaggaaagagaacaaagagaacaaaaactacttggattgtctggaggtcatagtccaaaggaagggttgtaaatttagacattttttgaagattcacgtgtttggttcaatataaaagtatcattccccacccagacctgtcccagtgtctagggaaatgcaccttctcctgtgacattgcatatcatcttccatatcaggtaccctggtttgaaaaatcatacttttagaagaaattgccctttccattttcttaactgctctggagaccagcaggaattggagcagcctcattccgtgtcgaagaagacctatacggcttgcttctttttttctttttttcttttttttttttgagatggagtttcactcttgttgcccaggctggagtgcaatggcatgatctcggctcaccgcaacctccacctcccaggttcaagcgcttctcctgcctagcctcccaagtagctgggattacaggcatttaccaccacgcctggctaatttttttctatttttagtggagacggggtttctctatgttggtcaggccagtctcgaactcctgacctcaggtgatccgcccgtattggcctcccaaagtgctgggattacaggcgtgagccaccacacctggcccaaggcttgcttcttttaagagaaaaaggctgtcatgctgctctacttcagagaacagaccaatttttagagagcttcaacaatttctttctaatgataattcaaatctttaccaaaatcctaacacatcaaatttcagtttcatattttcaactacctacgggatattttattgcttcaaacagaacatagcactccaccatctgataataatgtttattttacctgaatgcaagttccgtaagttccatcatttgcccagccttaataataattgtgcaaggccgggcgcggtggctcacgcctgtaatcccagcattttgggaggctgaggcgggcagatcacgaggtcaggagatcgagaccatcctggctaacatggtgaaaccccgtctctactaaaaatacaaaaaattagccgggtatggtggcgggcgcctgtagtcccagctactcgggaggctgagggaggagaatggcgtgaacccgggaggcagagcttgcagtgagccgagatcatgccactgcactccagcctggatgacagagcgagactccgtctcaaaaaaaaaaaaaaaaattaattgtgcgaacgccaccccctaccctcgcccagcaacacagcaacattgctgaggaaactgatgcactcccacattttaatgacccagtgttggaagaagtcaactaaatgagttaaaagtgtcccaaggtaggtggcccagtaagaccatcccaaagaaaggaacctgggcagaatccaaaataggctcaaaggagaagattttctctttagggggcttgtacgtgtgagtggacatagatatatacgctgcaaacgtgtaggggatatttaggagcactgtccctgctgctctagggcacctattccttggaaagagtcagggtgctctgaaaaaaatcatgtcagtcttaccagcaagggaattgtaaacctgaatatcagacatgcgggtggattacctgcgtctattatccaggcttgggaaatggaggtgctcagggatgagaaggattagattataaaagaacagctttgaggaatgttttggaactgttacaatggatcccacttttagggatacatagaaaaagtctttgcaaataccagagatacaggcactacaaggaaattagatagatgccaaaagcatttaataaagaaggagtttggggtaaaaatttgcaaatcttcaccatcctactcttccctgaaacaaaaaactaatttcaatttaaaattttcactatgattagttctattaaaaatcaatcaatctatccatcctatctctgtcttgcactctctctctctctctctctctctctatatatatatatatatatatatataatctatctatgtgtctataagtacaagatgcttcttgcagaaaaatttgcctagagactgtgatttgtgtaaaactaactggattaaaattaaaattcgcaagttttagggttcacttaagcaaaaaaataactttttcattggtaaaatggtaaatttatttctggatctagtttgtgaagcaggagtgtgtatatggctgtgtgtgtatgagtgtgggtgtatgtatgtagtgtgtgtgtgtgagtgtgtgtgtctgagtctggacccagctccctactcaggagtttactccatactctatctcttccagagtaggctgtgattcccagtgtactaatgttaaatgttccagagacattgaaaatatctagggttgttataaattagctttgtggggtttttttacttgcttttgtttgtatttttgaataaatgagttgaggaaaaaacatccttgctaaatagaaatcatgggttacgagacgggagagacgcccacgtggtaatatggctggaatgtcatggtcagaaggtctttcctgtctttcactttttcatgttcactggtgcatgcacgtggatgctgggatatctgagtcaagaagggtggctgtcactgtccaccctttatacctgccaccacttctcaaatactggtagaaagcctcttataaatctacaaatcttgtcacttgcgggacttttcaatatgaaaccctcttatacaattatatgtatgttggataccatggtggatgctgaggaaacagtaaggaaaatttgctatttcagacttgtaaatattaaactcatatttttagatttaaaaaaggcagcaaattatgcagcataataaagatgggtgagtataaatattctatagtgtaccatattagctattaaacattatacagagagtggttatgaattcaatttctaaataatctctaaaataaaagaatgatctaaatcttccacatccctgaggtattagtcttaaatgcatatgatattacaaaactaaaattcttaaaataatttctgaaaaactagtgatacaggagttgtaaagaaattacttgggcagtgagggtatggaagtcctcagtaaggttttcttcttaatgaaaagcagcccccaaatcattttcttttccaacaaagagcagcctgtaaaatcgacctgcagacacaaacaagcatgctggaagcttgcacaggtacatgctggcagttgtgcccgtaggaatatactacctgggactagccatgttcaaaatggcggctccatcttctctttttgccagccacgtgtccagtaaggagcagacaagatagccccaccaagtggaaagcccatttgcataataagattagggtggggcgaccagccttcttcgcgtgctaagtaaacgtcacacctggtcaaaccaatctgtgagccctacgtaaatcagacactgcctcctcaagcctgcctataaaatctgctgggatctgccaccttaaccctttttttcagacatctctctctcttgcaaggagctgccctcctctctcctttcttccgcctgttaaactttccactccttaacccacccacgtgtctgtgtacttaattttcttggcgtgagataaggaaccctggggatttaccctagactacgatgctgcttcactagtaggaagagaaaagataaacagcgattcctgttttataaggtaggaaggctgtatattcacacgacactcgccgtcacagtggtctctgtgacttcagtgaaccccctttccacctgtcctcctcgccctcacactagattactttttccaaaagatctgatcatgtcacttcccctggaagcccttgcctggcctccattgtctgcaggatgaagtactgaatccttaacccacagggccagactccctttccctgtcctgctcttgatcaggcaccatgagcccacgactcctctccgtcggctaatcattcctccctggccgtgttctctgcagctgcctagctttctgtcccttcactctgttccagaatcttctgcctgaaatatttcagtcaccacttccaggtcaaatttctccatccctcagtgcgcttaatgaagctccccattcttgattccaaaccttttcctttctcactgcatcattcatgattgatacaacgatgagtgtgctgaatgcaggcatcgttgctgaggatacaaaaatgaatagaaggcagctcctgctcaccccaccagcggccccacagcagctccacgtgtgggcaagtggtatgcacacgagcaatgtgatacacgtgactatgagatgtgttcaaggtgatgcggaaactgggtacgaaggcccttaagtatcctggatttctgtgggacattcccctgcacagttacgtgttgccatgcggctatgctgtttcgcatagacatgtcttgtcttcccattagatgacgtgtttcttcagcacagtggctgtgacatcacctctgtgtgcctgtagcatctagcagagagccacatacatgctggataaccaattcatgcatgtagaataaacaattttcccctacaagtattactgatttattttaaatataagaaagaatatactgaattttcccccttggtgcatgtttcttatgagtacagcttagttgctaaaaacagcgtgatttctagtgattgcggtagaagaataaaagctaaaactcctaggacttctgttagaaatgtaaatcagaagctgatattacttcaagtgctacgtgaaataccacattcaatttgtaactccaaaagctttagtctgtggtacatgtggttctacatggtttagtagtgcctttgtatgtgacatgagaacaaaataatcagcaggtgtaaatgtcaatcgaactagagaattttctagaattgtacctctgctttcagtttatggcactactgaatgcaaactctatttatctgcacaacttcagaaggttattgtggcaacaccttttaatagaaggggcgaatacaattttacgggtattattgagagttagaggtctaatttctcatgcctgggaatacggaaagtgaaaaatatatattgttacaaaaaaagataaccaaggaaatactcaattctgttagaaataaaaaagaagtagtttcatgccagaagacttttttcttttcctgcatgaaaatatgaaactctgagactgcacacaagtgaatggtatttgagtaatgataaaaggagacagaaaagacaccagatgaggcagaggctgacatttgtccgctcatcatccatttgcccttttcttcataggaacagtttctagctgggcacatcgcaccccgaatacagatatttcccaactgctttgggggctggccatgtagcctcacaagtaacttttctctgtcggaatacgagtacgatgttgtgtgctacttccagatttgacctttaaagagactgggaatgtcctcttctctttcccctttgtttctggttgaaaagtggacctggggctgagccaccttgcaccatgtagatgagggcaactaaaggcttggtggagtggagcatcccagctccagacattttatgagagagagaaataaactcccatccccttaagccactgcagtcttaggaactggccacacaccacggaactaacgtcagaataatataatggagcctactacaatccatttagccagagaggaacaaaaagattttttttttttattgctgattacagttacagtggacacaaccatattatggaatataataatctggaggtgattttgtttgctactaaaacgctctcatcaaatacttcttttttttccccaatatctgcccaaagtccttagtaaatgaattcctttggtcattattaagagaaataaatgcctgtgtgcccattaagagattttgattggagaaacagaaagccccaatttaactggcttaaatagaaaggaaatgtatcatatcccatgacaggcagtccaaccatggagtggcttcagagctgatgaactcagtagggcaatgaactctagaagggcctggatcttctgaaacctgatcactagtaagggtcaagggattagcaagactggtttagactactcagaactcactactgacccggaaaatgaggtcatttcccaaactggtccacacttgaaaaaaaaaaaaaatctgttctgttagcaagagaaagggggagatggccgtcaggagggaaaccgacattttagtgtacagtctgtctgctgtgcacacagagattctaaccatgacctgatagaaacttacccctgccagctgccagccaggtgctgggggtcatgctctatcagcaagcagttctgtttgtacagggaaggtgcatagcctatagagtcggtttcatgctggctattttattcacattctgaggtagtttgtgtccctgcagatttctgattatacatcagtgacgtttaatgtgatgctcagaatattaaaagcatacccagtaagtgttttatctaaatcatgtttacaagggaagttctgtgcttttctgaggtcttgcaaaaacaatctttggtttctttagaccaagaaactaaaaatagacacagtgacatagcctccaaacagcaattttgagatcgaaaacctctgttacattaacaatgtgaagcagttcccatccatcccattacaggaagttctgggtcaatagatttagtctaacaaagatcttatctctttaatcctatctttctacttcaacttttcttattgattaagcatcttctgaactttacaacaatacaatactgcttatacaaagcccagccatgtcttcacataaaagagtttttgagaagcctactttgatttagatttctttctttccaaatagcagctatcttctgaacacatagcttttctacgtacttcctatttacatgtaaaaccatttaaatgaatggtctaaacaaggttgattaatcactgggaaatttctctttcaggacacatccattccaagctctacattctttaaaaatctagcaaataaaatttcatcttatttctgatgcaaatgactaacataagttgactggactatctcttctatttccttcagataatcagggcaagtcaaaatgcaggcttgtacaaataaagaacaatgcttcaagttcttttttttttcttttcttttttcttttttttttgagatggattcttgctctgtcgcccaggctggagtttagtggcgtgatctcggctcactgcaagctctgcctcccaggttcacaccattctcctgcctcagcctccggagtagctgggactacaggcacccgccaccatgctcggctaattttttgtgtttttagtagagacggggtttcaccatgttagcctggatggtctcgatctcctgacctcgtgatccgcccgccttagcctcccaaagtgctgggattacaggcgtgagccactgcgcccggcctcaaattcttaggacacaatcaaaagcttgcatttgataatgtgtgtaagaattctttaggcatatgtcacattctgcaagtggactgggtttgtctacatggggaggcggccacgggaagagtgaacacagacttcctccaaattacagccctgccagtttagcactaataccttgagaggaattgggaaaaaatcgcttggcatcaaattcccagactgtccctgaactctggtcaataaccaacacggctttgtgaagaaaaatgtgatgtgtgtcaggaacaatattatttctgtctgaaggagagtaacaggcaactttgattggataaagaaacaggcattcttggccttcttctacagaaaggaggaagaaaattgctttttggaagtgcagcaataggcccgcttgacaaattacctcctagagtgcaagagtgaggcttatctgcttctgactgggttccttctcacttgtacacttcttctgatcctggttcaagaatgggcaaacagacaggcaagggttatacatttgacctgggccttacccatggccttgtagttacttgatatttttcttctccttgaaaaaaattcttaaataaattggactttaagaaatctccttcttagtctctatccacaacctcaacttcttaatggacagtggggacaaaggcctgtatggtaggcttggatagctctgccaggtgtacctcctaaggacctccaaatcttaggggaggtgggactaaaggtcaagccaggacagatcagatttgcctaggggacacttcaagtttccacttcttggtgcaaaaagaggccaaagtgagtctttgaggacttcaactggtagaatcctggggcccactgagatgccaagcggagaaggaggaaaaatggctgcatttcttggaatctcaggaaatgtgatttctacatctgttgcagatccttggagaccagtgcccatgggactggctggtctttacccaagaaaagccctattacctcccaggagcttgtagagagatttgattgaataactgatcgacttagcctttcccagtggaatgttggacaagcgagagaaatgcctgtcactctagtcctgagtgctcattctgtgtgggctcccttgaactctgcctaaatgtcatgaacaacaggaataacagcaggtacttagcgctgaccttggtgttcctgtttcgtgtgaagagtgagggcgtgctgcttcttcatcatgccatgaggctaacatgcgatgttcttggcatgtgctagacaatctctgcccttacccccaaggggcactagctgaacaaaaacaacactaaaatcccctgtaggaagttgattgctagaatacagatatgtgcaaagttgcattgggatacgttttcctataacgtaagaactatttaaactatttaaacattttgtgtaatttaattaaaacatcactgatttgcattggctgctcaatacatttggtgacatgtttcagagaccctattttgcgaaggtaaattaaatttcccagtggacttcattctcattaaaaaatgacattcagctacatgggtatgacaggagagttgctcctgacgcattccaggtttaagagtggccagccggaccaccacctgcatgcctggctctttctggaacagcagcgagccttcacggagttggtttctgtgccctcggtctctgccagtgaaaagcatatttccttctccctaagtttaacctcaaagaaacactttgcctaaaaaggtgtaaaattctacctaataataattattggtcacattgcttttatttttaacatgtaacattactaagtttaattaagaaaaaaagtaattcataaactcagtccctaagtaaccatcaactacatgttcagaaacctcaaacattctagaaggttataaactgaaaagtaaaagcttcctccctcacatcatcacttcctctacccaaaggcagccactgttcccggggtgtctttgattctttccagaaaatatcttatatgctcatgtgcatggatccccttttcatgctgtctttacttcattctgtgtattaaaagtgattccgtatcaggacacggattgaccttactcttcataacagagtattgtattccactgtataattatgtcaagaacatacttaactgctataatactatggaaaagtggatcgtttccatatttttatctattacaaaatagtgctggaaaggggaagatcaccattcagaatgctgggggttggggagatgcaagctgcctgtctggtggggggccgccaggtctgccccagctggactggacccaagcactacatccttaggattgttctcactgtttgcagaagcacttcttctgacatggaaaacaaaaacacaatctacatgtcatttttgttgttattatcataatgccccatgcagttaatgtttttgagattgacacatggtgacactcgccctatgaaaatattttatttatcattatataagttattctatgaaattttaaaatctctcatattcatttaattaacccttggaagaagagttactaagcatacacgatcacaaaatttcatcccatcttctctaattgatcttaaacccataaaaatatatatcaatggcagtgttagaaagaaaaagattttactgtaaaaataaattgtagtctcaaaaatacatttgaggcaaataaaccatataatttaaaaagtcatactttcattagttctctacagaaatgaactattgtgggcctaatggctctgatttttgggtatcacttgctcattgtgactagcagtatgcaactcagcactacggattaaaaaaataaagcaagccatctgaatcccaagttgcttcataaaacacctgtcttacaaaatgtaccacacaaaaggtagttcttgctctacagagtttaggaaatgctgagtgtgctgttctgcttgttcaagcaatacatctttgcatagtgaaagttttaagtcctataggaaagaaattggtttaatctggcttacctggtgcctccaactcttggattgcagctctctgctccacctctctgtaccccaactcctgccctgctcctggcagcatctgttggaacctggattgcatgacccgtactctggaaaatgctgctctatatttttgtagtcaagaaattgctttatttctggaaagtttttttctttttttccctcaactacagctgaatagctcaaagtgcttgtgttgaaaacacaggaaacctgagtttgcaaatgttattccttggacagacgtccctgtccttttccagactggaactgtccagtagaactttctgcagtgatgaaaatgggctatatctgcactgttcaatacagtagccacttgccatgtatggccactgagtgcttggaatgtggttactgtgattgaggaactgactttttaattatatttacttttaaatagccatatgtggctaaaggctgccatgtcagacacacagccccagacagaggtcagagcacgaccaaaataaatgcacagaaacaatgctctccacacagaaacaatgcaatcttcacaagaagtctgttttcaggactgttctgagctctctgcagcttataaagctaaagaagtttctccaatcgatttgccataaaactgattttctaacacattattcaaaaagatggatcttacgattttgaaagagtataattattggtcaggtgcggtggctcacgcctataattccagcactttgggaggctgaggagggtggatcgcctgaggtcaggagttcgagaccagcctgaccaacatggtgcaatcccgtctctactaaatttacaaaaattagctgggcgtagtggcacgtgcctgtaatcccagctactcaggaggctgaggcaggagaatcgtttgaaccttgaaggcggaggtgacagtgagccgagatcatgccactgcactccagcctgggtgacagagcgagactccgtctcaaaaagaaaaaaaaaaaacagtataattatttcatatttacctttatttcaacaaaaactggctaaagacaataagaatagctagtggtctgtgttgggttaaaaaatatacttttctatgtgcagctgacccttgaacaacatgtattagaacgtaagtccacttgtatgtagattttcttcctcctctgccacctcggtaacagcaagaccaacccctcctcttcctcctcagcctactcaacatgaagatgatgagggtgaaggcctttatggcgatctacttccatttagtaaacagaaaatacattttctcttccttatgattttcttaataatgttttcttttctctagcttactttatcataagaatatagtatataatacatgtgacatacaaaatacctgctcattagccatttatattattgacaaggcttcccgtcaacagtggatcattgtagttaagtttaagctatctgccgactttcagttgcaggaggggttggcacccctcaactccccgtagctcatcaaagatcagctgtacctcaaaatcacggaacactttctaggaatgtctgccaactgatagatgctttccagatgaatggtatgcagaacttgtttgtacatttgtgaacagtttctttaactaaaataaatactctccaaagctttccatctttgcacttcaagctgtctcacaggcagaaagtctagcgaggcttatttccaatctgcaaatgagctgatcttagagtttaaattagatttttggacacatgtcaaataaacatggactgcatatttttgacatttcataacaccaactttcttttttaaaatgctctttgatgaagaacatcttgtatatcaaagcctaaagtaccaacaagatttgattccagtctctatgtgctggagtgtccaggcggttgaggcaaacttacatggggacagctggagtgaaggctcatgaacccacagttagtcatcctgagaaacacctgttctttctgatgtctccctgaaaacatcatatatttggagactagattttaatctctagtcttaaaaaaactcaatatggtttaaaaaatatctaagcataatttaatgaaattacatatttttacaaaaataaattaaaattggcttgaataagaaaagtaaccattttcttttttccttttattattaaatattgatcatctacatgttttctctttccaaggtccacctattgaaaaaagagcttcacatctatttgttaatttggattttaaactcaataattagttaaatctttgagtaaaagggtaggtatcatcataatttatcttcattgactcctttcctacgttaaaggctgaaaatgaggttcagactctcatttcactaaaacctccaacagtattttaatgctgttgtgataagtcgttcaaaataaccattttcaccaaaaacatatacacgtttctttgcacgaagtaggtcatatcctgtatttgcacaggtctaaaaccacatttgagggaggctttacaacttcatttttataattttcgaaaccctttttaagaaaaccaatgcaagaagatgaacatggttaagaggatttggaaagggtccatgcaagtgaggagcccaaggtgaatgcctcattagttccctgacaaacctgcctccgagcgacacagcatggtgtttgtttaaggacagagtgactgttagatgccttaagaaattctatcgcatttccttaacttatggtcactaatatgatttttgaaattcgattttcatttaaatgtgtatttttctgcagttgccacattttgtttctggatttctaattaaaaacagaaaattccttatccaacttcaaatcattattttaataaattatcacccagacatgtaataccccaagataatatcaaataagataaagatgttttatttatagagaactcagaaggtttgattgccatagctttctgcattcccaggtcagtgagtataatgtattccatattttgttgctgttttccagcactaaacacgtcagcattttgcatcggagtcattaaagtttgtgagatagttctgatgaatagcaataaggccagaaaaaaagaataatgcataacatgaattctttaggaaatcaattaatttttttatgagcagtagtaaaaataggatctagggttagcagagtgaggctagactagtatttggtaccaaaatacattctctgctgcgttctatctatgtaaaaatattctgtgctgagtcaaaactgaaatctcagttctcccaagagtaagacattttacatatcagaatgtactctttacttggccgtgtatgtagcctttgatagagcacaccaattctgtaaattctgcagtactttcaggtttctaatggactttttgtggatccctgaacatagtgttattttggttttctgaattatatactatgtgtgctattaaaacactgtatattgtataagtatataaaggtgcttacgtatttttcaaagagctctttgttggggcaaggtaagcagttctaatactgggataaatgatgattaatattggaaaataaaagtaatagtttgttgatattactcctagattattaagattcactcaaccatttattttattcattcattcattcattcattcattcattcattcatacatttgatgaatgttaaacaccaaatacatgattcaccaagaagaatgaaaaggcttaggacaggaatataaagacaggaaaccactgtaacactgcagcttgaattctgggaggtagtactttcaaataattctttataatggtaataaatttactggatccaccccacatttatcaggcctttcctaggtggactgacatcatcacttaaatggaaatccctgtcttcatttattagttaaggtacattgctcctcggggaacagataagcctgtgacacagtggagcaaagtgtctggaatctgattttccaatggacattcccatatgtttgaacaaaagagtcataaatactaactatagcacctattttacagaagctgaactaaagacacagaagccttcaaatggaaaggatatacaacagaaaccacagctgtgcggaagaccacccaggtacatggtcgtgggtgaaatgactagaagattagaatcctctggagcccagagctcaacacatgggtgtctagctccgaacaattttaaatcccacaaatgacagagaatttggttttcaacttttttatacgcgattttttttgtaacagctaacatttcttgcatacccacatggtaagagttgtactttttctatcttgataattgagggaaaaaaaaattaagcacgggtgaattcacaggcatcttacaataaatctgtgaaccacatcctgataatcactggagttaatgacgtctagggctttttccacatctggaactctgtaattcttctatagctttgctaccaatgacttttccttgaacgatgtattgaatgaggcactcacttctccctgaggcagcttattttgttcttcgttgtccatactgtgagagcaaagagtaaaaagagattcaccttcttctaacttttatgtatttggccatgttctacttctgaaatgacataatctaaccacaatttcttccagacaatggctttccattacactccttaaacccagaaaagatgggcagcttacaaggttatacaaaccacagcaaaacaacatgtatcaggaaaaggggaagagaaagaaggaaacaagtaaagccaggaaaccagtttccaaatccactgtgtttatgacctctatatatgctatagggagcccacagatgtagctttagattttctagcagtcaactgtcagaggaaaaccttatcagctggtttaacatccttaaaggcaactttcctcaggacaagcataaatgtgcctggtactcagatcagacttgaatagtcaccatggttccttgtggaaaagtctgttgggatgtcctgaaccacaggcatcacatttcctgtgtaacgatcacaatataaacaaatggcatggtggcaaagtagtatttaggaaaagcaattatttgaaaggctaaaaatagtaaggtctaggtgcccagtttcctgccgtagatctgactacatcctggattctagactatttggaagagtatatccaatgaatgccatgtaagcaatcttccttgaatgttgggtttttgggtgagctttggataaatattcattaagcttttgattaaatattaaataaatctgcacttaactctgtgccaggaactattctaagtattttacacttattatctcatttagtatgcacaatagttttatacagagttgctcatatataccctattttagagataaggaaaccgagaaagatgaaaaccacaagtagtttgtgaagccagggtttgaacttcacacattcaacgccaccctttttaaatcactgtggaattcctttagcattcaagttaggtgaatatccttctgtgaaagtttgggatttgaagacaaagggcaatgatgaaatcaatttatctctgctgagaagccaaagcaatgggaatggacataagcttgcaaaagtgtatggagactggggcaaaaagacagggagggaaaggaaggcatacagttcagtgcatcctttagaaaatcacttctctgttcttttttcagcttcttcaaattgcaaactgtggtggtttaaaatacgttcataaattctttgacactctttaagatggagcccaactcccttccctttgagagtgagctggatctagtatctcacttctaatgaataaagtgagagtgacaggtgcagctttggggatttggtcctacaaggcactgtagcttctctctgttctctcttttggacaacttgctctggggaaagccagctgccatcatggggacaaacagcctaagacaagggccatgtggtgaggaactgtggccttctgacaacagccagtgaggaactgaggactttttttgccaacagtcatgtgaatgagctaccttggaagtagatcttccagccccagttaagcctccagataactgtgaccctgctaaactgcaaactcaggaggaaccctgagccagaactacccagcaaagccactcacgggtgattcctgactctcagaaactgtgagatgatacatttctatcatgttaaattgttagaatttggagttgctatgcagtcatagataactaatacacaaaccaacaaacacacctccaaaaccaacaaatcgaaacaaattaagataaattaagaatacgctacctacaattgccaaaggacaaagaaaccttgagaacataactatcctcctttaagtaaagttgcctgcagactcttttaatccaaagacattacagcattttgattcacttctaaaataatttgtcatgatttgcagcttaagtatgtatgttatttacttataatttacttgtataaaaaagggaagataaagatattcaagatttcacattacataaacccttcaacattcttaaagcaaggtcaacaaccaaatgcaaaagatgggccagcaaaagtctctacctcctaagaaaagttaaaatcttaaaatccagctttagaggatggaaccacagtaggcaattagcaggcagaagcacataatttagccagtagttaaaaacaattcattaaaagctcattttaaaagacaacatttgctagcattctgatcccagaggttggcaacctgctgaggccacacacaatcattgcagataattcagcacatgataatgactaaggctggagagtgtgtcctgatttccatcgtctccagggagagtaaacacttgagttttcattctaatgcaatcacgattatgaatccagaggtatttctttccacttaggcaccatggtatctcattatttttcaacttccacttcctctactccattgctcaacccaggattttatgagccccactgcatgacatacaggaagctttactaaggggaaccaatgctaatttatttctagatgacttacagtgctcagccccaaatcaagactggctaatacaactctgctatctgtgctccttcttgcacaaaactcctcatgaagttgcaattttaaaagaaatgtttctcatcaaaattcaatagacttttatatgcacatacactttctcacttttccaggctgcatgaaatttaatatcaggattattatccatttgtcattttaacctataatttagtaagcctttttgtgtttgagttatgcttcttccccccttgagccatcagcttgcagccatagattcatttgaaaagccggccaggtcacatggtttgacctcttagaacaaacattttccacatttcttattctgcttccataagagacaccattagttttgttcatctctacttaaaatgatttttatgacataataacatttcaagttttccacattaaccttcattttatttcttgaaatactcaggcaaacaatgtcactaagacgtcactgatggagaattctttctccttcactcctgtctacttaaaggcaactctgaagaaagaataaatttttgctctgcatcagctgagtgctgggagaaaagtttaaaagtctggcctagtggctcacagcatcttaaagtaaatacttccataagcaaccaaagcagaaaatcttcatataactgttttcaccaaaataaatacataaattttcaaatctggagtcctataaaggaatttaaaatctattttcttatatgtaagttcaaagatgtctaagtccaaagggaaaatgaaaataaaataaaaatataatcccagcccatgtgcaaaagcaaacaaggacaggaacacaccgctccaggggtgtgggcagtactcaccccacagcccaggccattgcccccttcgcaggtgactttcctctggtcaggctccggcagcagccccgctccacagccagggcgggggcataacacgccccccatctgcaggacacactcctctgcaccatactgctggtaccggttgtactgcaaaacccaaaaagcagattgagctttcaaactgactgcaaatttcagccaaagggttaggagctacagtgcatgggatttcttgcttaaccagtttcagtaaaataatgcatgtgtgtgtgtgtgtgtgtgtgtagggggagggagagggccacggggttgataggggaggacgaatatggttcaatgcagtaaaagtctaccaaattcaactggcaagacatataagtgtgtttactttttgcttttttgtcttcagaaaatagattttccaaagttttgtattttataagatcgcttctaccaactgtattttaacaatcttatttcatatacattttgaggaacatatttatgtattaaatgatgaacacttttaatacatcgctatcaatcttataaagcaatatattgtcatgcctctatttaaaattcaacaaggttttatatttattttgaaaatcggcccagcattccacctcataatattggcagcccacacaatatcaatgagctagaagaagactaatgttaaacaatcacattttccctttatcattattcttattcttaaagcatgatttcttgtgtccctgatgtcatttcttcctggtaccgttttgctcaatttcctttaatggtttccccagcctgcaaataaattccaaactccatcagaccattttcaaggtcttctttgtggcagccctacacttttgatcttacattatttgtaatataaactcagatcaagtcaaataggtttgctcaattattaattaaataatgcaacatttattgagagcctactacattccagactctatcgaggcgctggggatacagcagtgaatgaacaaacttctccgccttcatccacagcactgtaacagtcaataccgagaggttagaatgtctaggatttccaatggtgctaagtgaggaagaaaataatcaacagggaagagggagagtccaaagaaggtggagatttcaattttaaagaggtgattacagaatgccttacaaagcaggtgtctttaagcaaatgtctgaaggagattagaaatgcaagtcacatggatccctgggggaataagcattccagacaagcagagaatactataaggggccagagccccagtgtgctgatgtggttggctgttcagggtacaacaaggggggcagtggggcggaggcagagagaacaaggagggaaaaaaacagaaggtgaagttggagagtttgtgaggatctagaatatgtagttccctgacagctgctttcagaaccctgggtgttattctggaagataccagaaccactgcagaactctgaggctgaggcatgacataatttgactaatattttaaagacatccacctggctgctatgttcggaataccctctggagggccagggtgtaggcaggaagcagagaagcttatgtcaacatctatgacgtaagctaggagcttatgtcaacatctatgcaaaagatggcactggcttgaaccgggaaggtagtgctggaggtaggatgagtgtttgaattctgggtataaattaaagggagaagttgcagaattttcagtcaggttggatgcctggtgtgagaggaaaagaggagtcaactgtgagtggagtgtagttccccgtttcctgagaagacaggaggcgggtaggggtggggacaactgtggtagaagaaagggtatgtgtgtgtgtgcacgtgtgtgtgtgtgtgtgtgtgtgtagggagttgaggcatgaaataattatttctattgtgctcgtgttcagtttgataagctattacacagcgatgtcaaaatgtccagtatctaattgaataaataagtgtagtttaggagaaaggcatgggtcctgggtacaaattttgaagtcattagcctgagcctctaatccattttctcattcttctgtccccaggaaagaaagaaaaagatgacctggcctccttgtaaacgtgtgaatggcatacacatacagcacctttaccagaaaagaggtctaagagttcggatggcaaacaaactagaatctctgaatttatggggtaaggttctctggacagtgtcataagctgtgcaattaccagaggatacaatgaagatatttcatcaggtaatgaatgatgagacagtttatgtaactgagagattgcctgtgagtgattactgcatagatttcttagaggcttcatacataacccttgcccacagcacagccccaaatgccaaggaaggacctggggaggcgcgctggcgacctgaacgtctccaggtcctgcctgagtctcaggattacctgcatccttgaaattattcgtaaagctcgacactaggttagatctatgacactctgaccatgttatgaggtcagatgtgattatccaacctctgcagggaaggtgagaaaacaccagcaaaggagactaaggagcagcagcctatgaggcaggtgaaaactgaggaggactcaggtgtcccgaaagccaagggaacacatctcaaggaggctgccatgatgagctgtggttggagctgggtgtgtggctgccattgcggtcttgaaaagtcatttcagtggagtcatggagccaaaagcctttggagtggagtccagaaagactcggaggagagaaattcaaagaagtgagaatagacacttttttaaaggagtttgccagtaaaagggagcagagatcggggaggccattggataggactctggggttgtaaaggattttcgaaaatggagaaataacgatatgatactatgctgaaggcaggactgagacgagaagcgcagatggacagtttaagccagagaaagagctctgtccttgagtaggttggaggggaggatctaaaggatgtgtggagggttggccttcagagagcaggcagccatccttaggaagaggaggcccggctgagtgcttaggcccaggtgcagacaggcagaggggtactgggatttgaggaagaagaaacgtatgagtgatgaaggaaggggagggcggaggaagtcggtatcactgctgggcggcacccaggccctcctgaggtcagagatgatgaatttaaaggaaaactcgtgagcagagtcttctgtttctctgcaccaacactgagctgcaaaggcaaagtagaaagaatggtggatttaagtttggttgcagttttgccggaattgtaaaaggaagcgggacatctctcgatcacctctgcctatgactgtgaatgatctcacggtgatcctccaagcccctctccctcagctctgttcacctccgcctatgactgtgaatgatctcacggtgatcctccaagcccctctccctcagctctgttcacctccacctatgactgtgaatgatctcacggtgatcctccaagcctctctccctcagctctgttcacctccgcctatgactgtgaatgatctcacggtgatcctccaagcccctctccctcagctctgcatcaccgaactgctcaacctacttttttgtcttgacctgtccaaatccttccacattgaaaaaaaacaaaaacaaaaaacaaaaaacaaaaaactttttattgtaaatatcacatagaataagcttaatacattataaagtgaccaactttttaaacactacccaggccaagacacagaactttaccaggtccgcctgaagccctccatgtatctattctcatcacaacaccttcaccccttcctaaaagacaccatggttttgttgttgtttttgttttttgttttttttttttagacggagtctcgttgttacgcggctggagtacagtggcgcaatctcggctcactgcaaccttcatctcttgggttcaagcgattctcctgcctcagcctcccgagtagctgggactacaggtgtgtaccaccacacccagctagcttttgtatttttagtagagacggggtttcaccatgttggccaggatgatctcgatctcctgacctcgtgatctgcctgcctcagcctcccaaagttgtaatcactctcttgtttttctttatcactcaaggttcatttctaaacactacagttcattttgtctgttttgaagatgtgttgtttagtccatcaccctccattgtctttttttccttgcaatttatctgttgaagaaagcaggacatgtgacctacagagtttcccagtcttcattttgctgattgtatccaatgttgcagtttataatgcacctggataatttttttcctataaattgataattggtctataggcttcatttaattcagcttctttccttccttctttcctctctccctaccccctctcttttcctccttttttccttcctccttcattctcatcccttcctccttttttggtccctccctctatctctctgtcctcctttctcctcttccttctttctgtctctctgtaatactacttcatagatggtgttttgtacttctatcaggaagatcataatgtctttctctcttcttgaaagcttagcagtcattaatattcagtaactagattaatttattgggattgaaaaatgatattttaattcaaacattccttcatttattagttagaatacttctattttttggttatccagtggtattgtatgaataggaaaggcaggataaaatatttgaatcttttttttcaatgaacatttataaactcataaacttaaacatattatgtgttaagtgtgttttaactcaatgcagtgatttccttcttgatgcacaactatctcatctctggccaatggcaatcctatcaagatgagtttccataacatgatcctgacaccattcaatagcttcctcgctatctgctatggaaaattactcaggttcatcttacacgtttcctgctccaggccaggaattgcctacttttaaaagaagcactgcttcttaaaaatttcaagaccataaattgggtgctaggcatgttcagtgctcctaagttagtcattgtttctaagtcctctcagttctcactttgaaggacaggtatctcagaactacaaggtttttacttaacattttctgttttacctctgttgctcctttcttccacactggttctcaagaacacagaagatgacataattacaatattccataattgctcatttgctttttctcacattacacaatttcagaataacaataccatcactgtgcctatgatttctgaaaacttcaaatatgttttcatatgctctactcattctcccacaaaatttttaaaataattatactgtatccacactgttaacacatgcggccatttcgaactatgctgtctttctcttaaccttcatgttatcttacttctatacacacacacacacacacacacacacacgcatgcaggcacaaccatcagtacttatgttgatggttgatgttttcccagtaattttgattgcttgaatcttgttctctagtaaattcctcaggaagagttcctgggaaatacagtcactgagttcttccatagtaacagtttatttagggcttttattcttgataatgagtttggctgcataaaaaatctttatattatacataaaaagaatatatggaattatagtttcttacagtatacatataaggaatatacaatcctgatatacatacagggattgtgtgtgtgtgtgtgtgtgtgtatatatatatatatatatacatacacacttatatttatacatacttcccccttgagtatctgaaatctcttacttcatgttcttctggtataaaatattatggataagcctgaaaataatgtttttttcctttgtaaattaattgccctcttttgcctagatgcccaaggaattttttccatttctttagaatccaggaattttgttagagtatatcttggtgctggtcatttctggatcaattttcacaagcatactgtgtcaggaaagttgtactgaatttagtttttagggttcactttgttcagttgctttgatgtttttcttatgtcatttctagtatacatatattggatcttctttacctcacttctaattccaacagcttatctcaaatccctttttaattttcttatttgtgttttttagaatttccttcacttttcattttctatttcttttaagacaatatctattatatgtatttgtgtaatttcctaataatttcctaataacttggttcaccttgaaaaggttattttggctttcctttgatttgaggcattcttccattgtccataaggatgctattttgttctacattcgctgcatcattttaatagccctgtacgggactgaaccttgcttcttttctgttagagttttaccttgttcctttgctgttgctcagttttacatgaaattagttctcctgaaattttacaaagaggtaggattcagaaaaactgtagacttttctgttctggtgttttaggcagtgttcaaaaatatgggggcttcctttctgcaatctcacaactctgttaccccatttttaaccggactatctccttcctttttttctcttctattttgagcaaatttctgctcagtgtggggctttgtcctgaggagggcctttgcctgggtaaatctggtgagtgcatgagacctaaagtgctccaagccctttaaaccttattacagacttttgcactcattcctctatccttttgtgcatccacatggcctgagtttggcatagtatcttgtcaatagtttgtggacagtaaataattataaattaataaaatctaactccattaagtgacaattaattaaataattctaataagataatcaatagcaatggaaattaataacagtaactcaggattattttacctacaaaaataattttttaaaataagttgctcttaagtaattgactattttctcatttgacaacacatcacctagtctatttaatttagttaggtaattttattactatgacaatagcttttatctcggaagaagttaatgtatggacaacgtccaataacaatttagaaattcttgttgactgcattcatagtggtctcaaatattgatggaattttaaaaattatgtccccctttccattcattagctagggaatttattaaaaattattgttatttattttgtttatgataaactcaagagcatttgagcatacaattcctttttcaaaggaagacaaatattttaacatatgcgcctgggaatttctgatgattaaaaagtacacacaatacctgaaatatgcctattgaaagtattacttttcaaaattaacattgtgatatttataagaaaaacactgacctggaacaaagaatgtgctagtatttgtagaaagcttaatatactaaggaaataatttagtcatgtaattacatatcattagcaaagatccttactaagttaccttcgagatataatccacagttttcatagatccttttaaccatttactggcacgaagttgaaagcgcattaatggagatttgtgacaaactagcactaatacagaatactgtatttatctcagtataaaatatgtgtgataatggtaaagtaactaataaatctaccccagttggtggaagggaacaaacacttcccttgatattcttgtattggttccaagggcttttttacttatcaatattgaatagcattttataaacagactaacttggaggaatgtgattaatttataatgtgaactgggtttatatagagtccaccctcaactgagctcaaaagtggaaaaatcactcatgcatgttttgtctatggaatgcacagtgagcatctgtgtgtgtgtagatatgctaatatttacatgtcaaactatactgacagttttaagctattaaaaatagtttgcaaatttctagatatgctttcataaagtgaataatccacagacaactaaaataattttgaatttattgtacaatatttgcaaaaatatttgaaaataaatgtaaatattcacaaagaatactactctgaacctaaggaaaacaataactgtttttctcctgtattttatcagattatagcaaaaaatacatttcattagtatgcgttatgcaggtagaatcctgactcactgctatactttctattttatttctttggggagtaaattattcagtctttatgtgaatgctcatggattctcttaagaacaaaaagtattcattttaaagcataaaattcatagaagtttcaataaactcgtattttaagaatttaaataatgggtcatgggagagtataatgaaatagatattgtattctgttagtctgcaggttaggagacctgtatttgggtagaaaagtgttctataatgaaggaacggttgcacgttcaagccccagaagggccagtgaacttcccctttcttgctggctgttgactgcatgttaagtacattaaaggaacatgggtagtcacctgagaagtgtggctatggggaaaccaagcgtaaacatcccccaccactgaaacaccatccaaaaggcctctcctctgtaggagagaacaggctgcttcactctgatgcttaatttgcatgctttcatagaaaaagaagaaaagaatctaattttaaaaactacaagaaatgtgaagtacagggatccgaggtaaaactcaagtctgagaaaaatggcacatgttctgtcaaaatgagtcaatgcttgccagccatccaggagctatgtggccccctttcaggtcctccaagctaaggaggttgattttgtgctgtcatagtgtttcccagagtatccttttgggggcactcaggtacagctcttgggtctcctttgcttccccacaccactccataaattatagcttttgttacatctcagccaaaagcacttcggggactccctccctgggcttctccctcaatccctcctagagcagaggggtcgtgatcaggcttctgttcactgagctactgcagtgaaccaaaccacggcaccgacactttgctgctcggttaattctctgtccactctgtgaagtgatggatgtggcctcggagccacaaagaagtgccatcttttgctgacatccacacaggcagagaacccacagtgctgcattagaactaaggctgaaactttcaagaccacgctttccacaatacccagctgcctctttctcttattcccttctattaaaaaaaattcagtcaggtatagtgactcatgtctgtaatccaagcactttgggaggctgacgtgggaggatcgtttgagaccaggagtttgaggccagcctaggcaacacagcaagaccccatttcgacaaaaaattaaaaaaaaattacctgggcatggtggcatgtacctgtagtcccagctactcaggaggctgaggtgagaggatcatttgagcctagaagttcaaggcttcagtgagctgtgatcacaccactgcactctagcttgggcaacagaatgagactttctcaaaaaaaaaaaaaagaaaattcagctcactattcctctgccatcttttagaaactaatgaaaaatagtttattatagaacttcctctttggattaaaaaaactataataacgtcagagaggaacatcagcttatgatttagccatttctccttgctatgcagataatgtcccattttctatacgcattagaaatttttttcaaaaaagaagcactccttagattgtcagtaatcttcatcttcctttttttttcatttgcaggtagttagcctgagagcatctgtgacagcctaagtggtggcccccatgaccctgctgtttttcttctctattctgttgctaataatgttttcttcatccctgaacatctgtcagctactgatgaagtgaattggctagagaaagggctggaccttgttaattgcatagaaaaaactatcaagatggctgaaatcaaatgcaaagaggcaacatcaaacaagacctaaaaaaaaaaaaaaaaaccagtaaacaaaaaaaacaagcaacagatcatatccggaagcacagtttaagaagtttttggtttttttttttccagatatttcaggtgacccaatgccaaaaagcatctcatcttctagtagttgtggaatcttctggaaaagagatccaaatcaactggcttccttgtcccctctccatgtgtgacacggagcagcacccacttccagtgtagctcccctttcaggggagggctacaaaggctgttttcctcacaagagttcctacagctgatgtgacttcagagactcctgtagactatggaaacagggtggtgaagcgtctcctgatggagcgcactgcagaaagcagggttgtctgtggctgtaaattatttcactctttgctctcatcccagagaaacagtgttagggtagcacctaaatctgcaaatccaagagccttgcccctcagataaatgagcgttgcctctgccttccttgaaaggagctggggcacaggtcactgccaccatcctccttcctggctccctagtctttttctttccctgaattcagtattttcacctctcttctttctgcttattctctagaagctctttgtccagtcctgaagcaactgcgatggtttctaggtgattctgagggaagggtgacatgtcattgtctggaagttttgtgtaaggctacgggtggggcagtgaaatgggttagctccactgagcatttaatgatctaattagaacttggatgaaccaaaatattttttaaaatcatgtggattgtattagatggcttcatatttataactatctgaaatggacaagcctctaacactgaggaagccttttggggtgaaagccgagaagctgccttaatgccaaggcacacctgagcacaggtaacaacagccaggtgctctggatgtccacctacgtccctccaaagatcatcacaatgcatccctcatgccccacatcattgcttcagaggctcaagctgcctgtcattcttatcacccaaactgtcagtcccatatgggtccatacgtttcctaatatcagccaatttccatgcttccctctctcctaagccttttttctgtgtcccctgaaattcctgttcatgataaactaactgccctgtataatcagccttttgaaaggtttccctgtccacactgacttaactgaaactgatccatctcccttgcaaccttttcaagtgaaggctgcttttcatttcatattcacatctttcaaggccagaggtgaagatggttgtcccttggctccttaacgacgcccccaaatgcttgggttcctctcccttgcaaaacccaccactcctttgagacccatgcttcaccctcacctcctcactgctgccccctgatctcctggatgcagcccctcattcttgaagactgtagcttcaggctgttctcaccttttctccgattcttgtcatcattctggggacttgaactcctgtatgaataagccaccatcaatctattctttctgttttaccttctcatcctgctgacctttttctcatccttctattcgcacggtccatccccaggctctgtcatcctgagaaactgtaccacctctgaaatcccaattccaaatatgtctctttctgatgatcacctcttatctttccaaatctcttgctaaagtatgaacattgcttaaattcttcaacttcatcaagacgtctaattaattggccccatatttcctctccagccatgggcctctccaggcccaccttccttcctggtctgacagcttctgtcatctaccaccagaagcattgcctggaaaacacagatttccgtggtcttctttatctgatggcaaaattccacgcctggaaaacatcacctccaccttccctgggcgtgtagccctgcagctggacacaatggcacgatgactttctcttaaataatggaccacaaacttcaaatgggcatttacaacttcctcaagattgtattgtgtttctccagtgacatgttctctcttctttcttcccctcaacccgccgaaaaaaggggtgaaataaaaaagatgaaatgaggatagttacaaaagcataggagatagaagttttcacatagcaagggtaagaaatatttttataaatgttggtaatagttatgataattagtagaattaggataacagtgaagtagttatagaagaaaatgaatttattacttttatctggagttgcaccaattttttggttcctaagaccaatgtaggtaggacctgcctctctccagccatccatactttatatttcactgaggagagaggaatcatggctgatgtcctgatgtgctcaacagatgtttcctaagcacactctaagtgtcaagtactcttctatgtggaagacgcagcagtgaaaaatgacatcttccttcgtggagccatcatactgcatctctcctcttcacatccctgcaactatgaacacacctgcacctgcactcaccctctccagcccctctcacaacacaaaaagtggccttcctcctgttaggggccgattcctccctctctgctggatctgagcccttcttgccttccaaagtacttcccttcttcagttcttggatctctctctcaaattaccggtaattcatctctgtggaatccttcctgtgagtgtaaaacaagttctggcccttcgatctttaaagaactgtcttgtggttgctgcatttctctttctcttcatagcaaaccctctagaaggaattatcctccccttctgttcactcttcatcccataaaactctggctcctgtctttacgcatcccccaaaactgctcattatggtcattcgtgacttttgccacagtgtcacaggcgaaggacgctccctgacctcatcttctgcaaactctcagtagcattcaacacaaatcaccattcctcctctggaaggcccgccttctcagcttccccaacaccataaatcagcattcctcctctggaagccccaccttctcagcttcccaaacaccataaatcagcattcctcctctggaagccccgccttcttggcttccccaacaccataaatcagcatttctcctctggaaggcctgccttctcggcttcctcaacaccataaatcgccattctcctctggaggacccgccttcttggcttcctcaacaccacaaattgccattcctcctccggaaggcccgcctacttgccttctcagcttcctcaacaccatatggccctggattgtcttctactttccttgaggttccttcttggtctcctttgttggttgctgctctttacccaatttccaaacactggtgttccttacggttcatccaatcacggtctctcctttcttggcttcttctgagaatccccatgggtttaaaatttcctctacatgctggtaattccaaagttatctctccatctcggacctcaggtctcactgtcctccaagctctcactcacacatccaagtcccgacttatctccttctccatgcttcaggcatagcaaatgtgttcagaattgaagctcagatcccatgcctctgatctcacctgccccattttgctcatctcagtcaaatagaactttcaaactccttcctttccctgacccacagccagtcagtcaccaagtccttgaattctgcctctcaagattcacttctttttgtctccgctgccaactgtcttaatccagagcctctccatattgcaacaagattgacatactcaaaatgtaatttggataatgctaaccccttgcttaaaccttcaaggatttcccactaaactcagaacaaaacccatatgcttaaccctggtgtccttggtccaggtggccttcatcttttggcactgtccttcctgctcagtattttccagccaccttggtttaatttagtgtcttgaataaagcaagctcttcacctccttgggggcactggatgtgtgctttcctctgcttgggatgctcttctgcccactcccataatgctagctccttcaatagctggtgtcccctcaacgcttagtctcagggctcctcaactacccctcatctaaagtaggtgacatccctatttgttttcatcctagcatcaattatgatcagtaactgtgacttcctcatttactattttatccaacactagcacaataatagtacaagaaagtattcaatacatttttgttgaatggataaaggttatttccataaaatttcagtgattaaacctaaggtggaggaagctggtataaatggaggtacttctgaaatgcaattggttcaaaggccctacaaacctattgactccagacatcatacctgatttctgaagggctcacctggaactgcagagtgactttagtttcctacaatgtgataatgtctttgccaaagaatttggactagggggaaggagtgttgaaaggtgctatatgaatatgaattgtgaacacaaatcagagaaggggctaagaagctaatataaatgtattattttaaggagtttatttttattttgggaaggcagtgatacatagtgtttaatttttaatccaaatctaaaaaatcaagatacctactaaagatcaacgaaaacagaaaggaaccacatacaaagaaattagaggtctgctgtgggtctctgccatacagtaatgaattagtaattaaccagcatttttgtaggttttatcaactcactttctaagtgagtattacgcttactttactgtctattttgttgccactatgtaaagctggaatataaacagcatttaaaatcagaggaattttagtatagcacaatatttgcaacttacttggcaacctatttatttacaaatattctaagagatgattgagcttcactctcccttgtctacaaaaagctaagttagagaaacaaaaatgatttgtccaaggatgcttgtaacagacattaatataaacattttattttatcaagtgataacagttgcctcaagcatccagtgagatcccaagagtttcaccagctcctggagcagttgcccccaccgctggcaggaatgctgggacaagagctctctgcttcctctcgggagcctcattgccaccatctgcctagaggccagtaggtcttgtcatgaataatcaggatataaacgtccctgactgatatgccctgttcacgacagtcaccaaagaatgcctgactcctgttccatctctccaggctgagccccaagctccacatccactctgtgtatcctttttcctaccacatattccagctgccccaaaccctgagacccttcccccatgcttggggaactcatgggcaatcagcagtaactgccctatgactgcaatctgctttctcaatgtttttcttacattcttccctaactgaaacaggcgtgtccctgaggacactacttcgcctgcagcaccctcaaatgtttttgtgtctgcaatcccagtaccacaaagcattgctctacagtgttgtaagtaaaacattttccctttctccttctaaagccctccaactttccatttcaacccatcagcctacaccatgcactatttccccttctgctgtcagctactgacatccatttctctctctctctctcatttctcaaatcttcagtttgcaattctggaagatctcagcgtgcacaggggtggtactcccaactctccgacttcccaattccatgacctcaacttctctcgtcaccttgtcctccatctgaaatcagacacacagcctccctaggcctcctctgacctcgtcggtgctgaccatgcagctcctccacaagctcgatgtgaagtctttcattctttggccaatgcctgtttgtccagttcaacccttctagtactcaaatcccgaaaattctttgagccactggcatctgtaaccaactttccctgtcctctctctcatctgggttctctgcttgcccagctgaaatttcatggtcggtcataatcactcccttagattcaccctcagcttacactgttgttgtaacactgtaagatgagatccaccctcagcttcttagcctccctcttgtttttgttacattttgaccgcaaaacttcaatgccagtgccttttctgcatctgtgcctacacagatgagtgtgtcagaaaaacacccagtggattgacctcactccaaattcaaccatttcccaagtttattccctcctcaccctcctaaatgacaatttcattatcctctcctgacatggtttggctgtgtccccacccaaattctcatcttgaattgtaatccccataatgcccacacgtcaagggcgggaccaagggtggaagtgattggatcatggggatgattccccccatggtgttctcgtgatggtgaatgagtcctcacgagatctgatggttgtataattggctggcatttcccctgcttgcacttttctctcctgctgccttttgaagaaggtaccttgcttccccttcgccttccgtcatgattgtaagtttcctgaggcctccccagtcatgtggaactgtgagtcaattaaacctctttcctttataagttacccagtctcaggcatttacttatagcaatgtgagaccagactaatacatctcctttccctctaaaactcttccccgatctgtactctcagctgatgacctagcttcctgttacaccaagaaaagagaaacaaccagcagagaccctacgcaaggtttaccatcaaatccaatgctcatacgtctgtgcctgcatattctgtctcccccactgttaccaggcggaactggccactctcttgtccaagcccatgcctacatccaaggacactgctcctgaattctcccttcccccttctgcatcatcagtctcccaactcctctactgaatcattaccatcagtacatagacatgctgcaatttttcccattaagaaggtcattttcttatctccatccctcagctacctcatttctttgctttcctcttcagctaagttcccagttgccaaaattaaaatgtatgtatttgcagtctcccactctttggttcacctctcacatgaatccattcgaggcaggctttcccctcactgcccatggtcaaggttaccaaggacctccacattgtggagtccagtgctcatttctcatccttgtccttcttgctgagcataggacacagatcatgattcctcctcctaaagatgccttcttcctttggctcccaggtcatgatacctgcctggattttttcccaccttattatcattattatttttctgagacagagtctcactctgtcacccaggctggagtgcattggcacgatattggctcactgcaacctccgcctcccaggctcaagcaattctcctgcctcagcctcctgagtagctgagattacaggcgcccgccaccacacccagctaacttctgtatttttagtagagacagggtttcgccatgttggtcaggctggtctcagactcctgacctcaggtgatccattcgccttagcctcccaaagatgtgggattacaggtgtgagctgccacgcctggcctcctcccactttattattgcaaccctatctcatgcaatgtggctccttcctctttgttttgctctgtcctcctcccctcccctccaccagtcacacttgtttctggactattatgaatgttaaagccaggcacatgatcacattggagcctctgttgttgcttcatccactctgtggaaatctcctttcccagatgtcaccatgaggcttctctggatacctttcagtctttattcacctgtcacctgctcagtgaaactttccctgaccaccttatataaaatttcacctcttcctccagtattcactgtccttgttttttttttttttttgtgtgtgtgtgtgtgtgtgtgagagagggtcactctgtaacaaagactagactgcagtggcacaatcttggctcactgcaacctccacctcctgggttcaaatgcttcccatgcctcagcctccagagcagctgggattacaggcgtgcaccaccatgcctggctaatattttgtatttttagtagagatgtggtttcactatttcactatgttggccaggctggtctcgaacttctggcctcaaatgatctgcctgccttggcctcccaaagtgttatcattacaggtgtgagccaccacacctgagtgctgtcctttttcatttcctttttctccatagcaatgatagccatctaacataatatacactaaatgtgtttatgtgtatataatatggttttctctaagtagaatatggagatttttcactcctctatccctgtaacctaggatggtatatagcacatagtaggtactcagtaagtatcagctgaaagaaagaaggaagtgtgtgtatgtctgcatgtgtgtgtgtgtgtttgcgcgtgtgtttgcgttttaggaaatagagatcaatattgctctgatgcactatattaccaaaactaatcgtagtgatattaattttgattatggctcaattaaatttctaggagaatgcaaagtgacctgacctttacaaagcagatctgaggagatgattactgttggcttctttccttactaattacccatggactctaaaacaaaaatggaaacactgcaaatattggtacaagtttgaagagaagactccattatctgagcagaattgtcagggtaacaaccagtgattcttgctttaagaagtctttaggctttcactgggaaatggctgtgagatccaggtgtcttcacaaggagttatgtttgggagagtcagttgtcaacttttacctgcaatacgggataactgatttcacttgtatttgaatatacatttatgcctgctattctggaaactcacaatatagaaaaatgaaggggatgtactgtaattctctaactccaggatgtggcagtgattccagtttcttatcctctccttactaatccttttgtttttattctcatattggaaatgggcagttttactttgccacatacatacaccaaacaaaaacacacaaaccaaaaactcattgatgaaagtgagctgccacatctccatttgcatatttcctggtcaaagttggcagagacaatctttaggagtaaaaataaataacactgggctgggcgtgatggctcacgcctgtaatcccagcactttgggaggcagaggcaggcggatcatgacgtcaggaaatcgaaaccatcctggctaacacggtgaaactccgtctctaccaaaaatataaaaaattagctgggtgtggtggcgggcgcctgtagtcccagctgctcaggaggctgagacaggagaatggcgtgaacctgggaggcggagcttgcagtgagctgagatcatgccactgcactccagcctgggcgacagagcaagactccttctcaaaaaataaataaaataaaataaataacactggaagttaggtcaatcagccttttgccaactctttagtgtattttaaggataacttgacacctagatttaacatactaatacagagtttgtagttccatatagggatcaagaaacgtatttttaagcattccatactatatatgtgtgtacatatatataatatttagcaccctgaattatttacttagcatatctatttaaattatgacacgcctcactgagcacaacacagcatttaaataatccacttcaaatggtcaccctttgtatagacgtcacatgttcatacccgtgtacaaaaggctgccatgaaatacagataacaaacacccaatacaaaaacctggtaaaaaaaaaaaaaaaatgctcacacattcacccacagacagcaacttaggaatgtctatgaccatcgatccctcaggcataattcatctctgcatttatttgtttgctcatctgccactatgcagtgcttgcttcctgcttgagtcttgagatgaaatgcactgcactggcagatagcagatgtagcaattaataacctgtcaggtctgatggatagaagaggaaaaaagtgtcctcacacatatctccagcatggttttcttccccatttcagggcacccagggtcaggagacatactcggcctccctggggagcccaaactgtctcattagcgtctatctttcatgacagtctgatgcagcctttgagatgctcactcacctgctcttctcccagaatcctgaagtgatggagctctttaatcaaggagttgggacagccagctgttggaaagaagaattaatcacaaaaacgtcactttcactctgtgtggttatatgttcttacacagagttatgactatcaactgccagtgttgccttttgggaggacacagacgtgtacctgaaaaacacacatctaaccaaccacaaaaaaagccaaaccctcaaaagagctatggccgctgcctggcctccaaccgcacctctttagaaaacagttgcatgtgaccctggccaggctttctctcccctctgattatgatctggccttaggatgtcatgccactctggttcttagaaacatgttcagcatgtcactggttcctcatatatagccaggattccgcagggccagagtaggggagttggtgaccacaggctctgacttattcatcatgtcctgtttgctcaccatcaaggccaggggcctgctcattgagaggtaagagcaaaggtcgggtagctacacatccattctttggggggctcagctggcggttagtaccttgcctggttttgtcaagaggctttgtgaagacctattagatcttgcgtttgagtttggaaagggcatcttacggaaggaccaagagagaaggcccagcagttctggtgcctatcactttctcgttccacccaatcaatccaagctccttcagactttcaccttttccttcttcagttgtaaaacaaagtaagtaaataggtaaaaaaaaaaaaaaaaaaaaaaatatatatatatatatatatatgcacacatacacacacaattaaaatacgtatgtataaaatattatataattatatttaatgtatagatatgagttatatatatttttatataactcacatatataaattatatatgtaaatatataattttatagaattatataattaatataaatattggcctaaatatatatatttatatataataatataacatatataataaatattctatgtaaaataaaatacagttgaccctggaacaacatgggcttgaactttgtgggtccacttatacacagattttttcttctgcctctgctacccctgagacagcaggaccaacccttccccctcctcctcctcctcagccactagctgtgaagagaatgaagatgaaaacctttatgatgatctgctttcacttaatggatagttaatacattttctcttcctgatgattttcttaataacattttcctttctctatcttactttaagaatatagtatataatacatatgacctataaaatatgtgttcatagactattgatgttataggaagggcctctagtcaacagtaggttattagtagttaagttttgggtgagtcaaaagttccacatagttttttgacttcagggatgttggtgttcctaagcctcacattgttcgaggcccaaatgtatagatatgtaaaatttaggccagtatatgcttaatatcatttaaaatgtgttgcatccctgtcttttcaatagaactattcctcgatattaggttgtagtcatttatactattatttttttgagtcagggtctaactccaggctggggtgcagtgtgtaatcatggctcattgcagccttgacctcctggctgaaggtaccctcttgcttcagcttcctgagtagctgggactacaggtgtgtgcaccaccaagcctggctaagttttttattttttcctaattttttgtagagatggggtctcactatgctgtccaggctggtctcaagctcctgggctcaagtgacgctcccgcttcagcctcacaaagtgctgggattataggcgtgagccactgtaactggcttatttatattattctctctggaaacaaaattgatataaaaacctgtttctttgagataagacctatggattatataatctgttgaacttcctagtaaggaaactggattgtatgcaggacatatcaactaaattatggagccatttctcatattcctcagcattgtgatgtgagagtggtcagaagccctgagagtgtttgtctgggggagggcaggctgaggaatgagaaaacctgtattcacacaggtgaaggtgctcattgcgatacagattagatctgtgcattgtttcagagagtaggatttaaaccaacagaagaaaatggaataaactgccttataagacagtaactgcaggtttttcaacacatgctaaatgaatacttatgtaggatattttagagaggaattttactgggtatgatgatgaatttatgtgtctacttgattgggctaaggggtgcccagatagctgataacatgttatttctgggtgggtgtgtgagagtgtttctgggagagactggcatctgagtctgtggaccaagaagatccactctcagcaatgtgggcaggcatcgtcccatccactgagggcactgagggcctgcacagaacaagaaggcagagaacggtgaatgctctttctcttctagagccttaaagatcagatttcctggttctcaggccttctgactgcaagacatacacgactcccaaacctgctgcccctagttgtcaggccttcagacacagactgaattagaccaaaggctttcctggttttccagcttgcagatggcagattgcaggactgcttggccgccataattgtgtgagcccttcccccagtaaacgtcctcttgtctctttctctttatagatcctatagacagaaaggtcctgtttcttgggagaagcctgactaatacactgagttatttccaattccaaaattctatggtcatgtaaaatgctggaacatagctttagcctatattatataacatttcatatgttgagaaagtgcttcacaaatgtttactgagtagtacaaaagattacaaaaatgtgaacaaaatttaaacacacgtgtaaacaggtgatgccaccaagaaaataaataaaaatcctggccgggcatggtggctcacacctgtaatcccaggactttgggaggctgaggcaggaggatcacaaggtcaggagtttgagaccagcctggccaacatgatgaaacgctgtttctactaaaaatacaaaaattagtcagacatggtggcgggcatctgtaatcccagctacttgtgaggctgaggcaggagaatcgcttgaacctgggaggcagaggttgtggtgggctgaaattgtgccaatgcactccagcctgggcaacaacagcaagactctgtctcaataaataaataaataaataaataaataacccaagtgaatattttactggaaaacataatacattagctttcacaggcatgtctggtactgtagagaaggaaaaccagatccttcaagtgagaaacagatgcttgagctgagtgcttctccaactagagaccacggagacttgcaggctgaagattctttttgagaagttgttgattttggggttgctattctgatgattacctaaacaatagtaaaaatatattctggatcatttgactggcttcagttcaaacaaaaactgctgtgaaattcagcctcaagtcagttcctgtgctttggatctctttgggagcaagtcatcatagtttagtttcctgaaatgagtgagaaaagagtggatagaaggcaagggaggcttcccctgccagtgacgtcccatggtctggggccgagtgtccgaagggtagagtcacaggagaagttgtgggggaagggaggcagcctacagctcagggtcccaggcctgctgagatggaacatttgaatctgggccaactcatcagggccctgttcggatcccaagcactgctttagtgtcagtaaaatgacagcctctggcgtattaaattgatagagtccatcagaatattttggtcttgtactttcagttatatttaattgatatgtttttatttgggccttctagttgtataagcataaagtatttatagctcagtttatatctagacacattgaagacatattgtcttaaaaataatttcattcggccaggtgcggtggttcacgcctgtaatcccagcactttgggaggcagaggcaggcagatcacgaggtcaggagattgagaccatcgtggctaatacagtgaaaccccgtctctactaaaaatacaaaaaattagcctggcgtggtggcgggcgcctgtagtcccagctactcgggaggctgaggcaggagaatggtgtgaacccggcaggcggagcttgcagtgagccgagatggcgccactgcgttccagcctgggcgacagagcgagactccgtctcaaaaaaaaaaaaaaaaaaaaaaaaaaaaaaaaaaaaatatatatatatatatatatatatatatatatatatatataaaacttcattcaaccttgggtgttttggagaattttttgtttctttacaagcggtcttttatgtcactcaaacttgagaaaaatggctttattttaatcctgcataaaataagaaacacaattttaaattagcttatcttcagaatgtgtattctggctgtctcctaagatacaagtgaaaggactgatgttgatgatagctcgtatataaacatctttaacagaagactagataattacttgaaacacctggtaggttcaaaaaaacaacaaacaagactagacacagcatagacttagatgagaagagctggaaggcggcaagatatttaagaagaccgtggacggctatctgcaaactgtgctcatcacagggacactagtgtgggaaatggccagatataaactcagtgtgaagatggggcttaaaaataacaaaactggaactgcaagacgggcccacagaatgcattcgcgtagggagacaggaaaacgttagcggagggggcggaggtggcagagaggaaaacatgggcctggcgaataaaaaccacagtactacttctggatttggagcaatagagaccatgtccgatccttccatgccctttaagcatcacctccctcacatatgggttcttctgcattgatttttggtaaatctgcgttgactcttaatgactgcatattactttacgtaatgagtattcctgatgaaattcgtgagtaagcgctcacatgatttttttctttgggtgtttgatgggtgaaactggtatcaaactcactgcttttcaacttttgagattcaacttttcctcattctgaaaagttaaaaaatcatctccggaactctgaactctttattgtatctcaaagattcccggcagcatctctgagactataatagaagtgtttggacatctattggcatttaaaatatttgtatatgccatattatgtcatcatttttcttaagcacaaggttctccttaaattgttattctgtcctttctaacatgggacatattctctttgctcaagaaaacagaacacacaggaatcgagtagtgtttttacctactgacactgtgttagctttcttgacaagagcctattcttctctatcttttccctcttttcttgtcctggactccacttttaaagcccgtcctgctgtccttggaaatttaaaagagaatgtcacctctttccgtgccatcctcatgccgtgctcacaagtttgtgctcttctgtcgtgtttttcctctagttattaaacccatcactcaactgttgcctgtgttttctaaaaatctgagctcattggtgttcaatgaataccagctttttggtgttaaaaatgaataagacaatttgttaaaaagcatataaacacaggattgaatcttattttaaaggacaactgcgaaactgggctctatatttcaattagtatctgtaatcaacatttacttttattctgttgctataccataaaggtcattttatcatctaacggggaagctcctcaatgaaaacgcgtcacaaagttgtgtagcatttccacaaagtcactgacagctactgagaaaaagcaaccccaaacaaaacaaaacaaaacaaatacctttgagagattaactgagccataatgttttcagaaagctttcggtgaatttcctcaacaatcatgctgtaaagtagggaaaactcatttggaaaatatattccattgagaagcattaaaaaccacatgagtcttcgatcactatttttccttttaatttctttgcaagtcatcacaggagcaattgtgatatcctttgggttcaatggaaaatcgtgagcacccaggcttgggatagaaatggaaatggatttcagctctctgatgtgctcctggcactggtcacatgacacaaataatctgcaatttgcagattgctgctgtttggtgcgaaacgctttgaggattaatttctctctcggctatagcttagaatccctaatgtgggcttgacaattacagtgaccttctatttcccccctaagtacaacttagaaaaggaaaccgactaacgacaaaatggcatcaaaaataaatgaagattcaatgtgatcgaagacaatgcagcgagactgaacactgacctctgagcacaagccagagagcatgggccacatgtgcaggctgggctgcagcagtgaaggaatccagtgggcggcttgctactccagctaagccaggttgattagggttgccatacactgtgctgaagtagccatttctgaattagtctgagagccaggcgttaataggatccctggaaaactcactaagctgtctcgacagagtaattgcattcagtcagcagcaggactttacagaatcaagtttaaagcattatcgttttcataaataaagccaagcttattttaatcctttctctctgctgatgggtttttatttataaaggattattcatgcattctttctccgtagccaatacttgctgtctcaagatatcctaagccagttaaggagaatcttgaagatactcaccttccacctaataatgtacttacaggtatacacacgggagagtaacttacatggttacacaaggagatatggaatagaatatttactgcgacatttttgtaataacagcaacaacaaaacgacacatctaaaatgaccatcaacagaagaagagataaaatcattcaacaaatagccattgtgcacccactttgtgccaggcactattacgacacttgggtcgcagccgtgaaaaattaaaacagacaaaaatccctcattggagcttgcattctaaaggggcgagagacaataaaaataaactaataagtaggtaaatgaagtaacattttggatggtcattagcactgtgtggaaaagagaaaatacaacagtataaagggcagggttggctaacgtaaaagtaagtgttcatttcttattgagaccatgacactgaagcacagatttttaggaattgagttaatatgagttagctagagtgaaatgtatcaaaacaggtaaatctcaaaatcataaagttgagaaaaaagttgcaatcgtttatgcacaatgcaatgtcatttacagaaagtttagagaatctattaaacaatgtcgatgcacgcaaatatactaagaatataaaataatgcctgcaaatgataaacgcccctgaagtatgtatcaaattgaagggaagaggaaagaggaacaggaccatagaagggcactgctattcaaatctgtcttaaagtgtattacaataattgttaaaaagaaaagctaatacttctatgatgcttagtaggaacaaaacactcttcacagtgttatgcatgtaattcatttactactcatgacaaccctataaggcaggtactatttttatccccattttaaagatggcgaaatcgaggcagaaaaagaactaaactaatgaagtcatcaaagccgggtagtgtgtacatggacattgattatgctactttaaatatctaactggatgtctggaacttttcataataaaaatctctagatgaaacctttaaagtacatctaaaaataaccttggaaaaggctgaataaaaattcaataacgtatagacctgagtttgtgaacatatatgagcatgaatgtagtctggagaaggaaaaccttccaatacaaccactaattagtagacataacttatctgagtagtatagcatgaaactttgtaaattttgatgctttcagaataagctgaaagaagccatgaaatattatctattcaatttcttacttgtagatgaggcagttaccagtccagaagatgcgaagtatcttttaggagctcagcatagtgtgtatgaagctcagatagctgtgatttcataatttatattaaaattgatgcagattggtattttctggttttttgcagctgctgtattaatccaaacatccttgctgggtcagcttctagtggctatgagactatccatcttccaatgaggtgccagggaagaatcagtctcattgataatgagacacgatcagaaattttcatttcacaaataatattatccttattggccggaggtgaattccaagtaaatattcattgattcttcatcgaacaactcttgagtgtacacttactatgcgtaacgccaggggccatagagaaatcataaatgaatcagacagggattctgccttcctggagcttgcagaagaaataagacgcacaccaacaaaccaagtagatgtagaaagagccaagtgagcagagagcaaccaaagaggtataaaaaaagaaaaagaggaggtggcttggaatcaaagaggccaaagcctggagtgtttgaggaatccaagcagctgcttggctgcagatgagaattgaaagcacctgcatacacacagcctacctactggggctgagaactgagaccactgagacctaattatttgttccagaagaattctgccctggaagataagcttgtaaagcaataaataacttcactgtttgcttcaagaaactcctgcaaataatttaaccagacagtttgctcatctgagtagccatctctcttaacaggaaatcagacggttcacctgggcaataatagctcttgtataagacaacagtttccttatgaaggcttccttaggactttgtctcactgtgtccactgaccccaaactactatgtcattgatctgctcaactccaatcagtttcccacttgaaagatctgcaataagcgcttaagcccagatccccaggctctatgaacaccctcccctgacctctctttcctgtgacacctccatgactgtccacacgatggtgtcacttcctgcactagatctaatcagcgctgctctgcaatagattttctgtggtcatttgggaggtttgagacagaggacaaggtagaacatgcagtaacaaaagatgaaaaacacttctcatttttcttatttgtatgtcattacaatgtcaaaacaacttaaatattttgaattgtgtgtatattcttggcgctttgccttcacctttgaatttcataaagttcttcctttgttattgacctatattttgagtgattgtgatgatacattttacagggcaagtgttttcaacatccagcatccctcagatcacaaatttaatttggctggtcaacacatgagtggccactgggaatgggaggctctcagagtgaaaagggatccttatccattattttctttctcctgctgctctcaaaagtttgtccttggttgacatcagagaaaggaaagggaggaagtgaaggagatggaattttgtgctctctttaatatgtttttccacagattatggtggttggttggttacctgagtgaaaatgtcaatgtctagttaacgttgggggaaagagaatctgtgggactgtcatcccccaagtgggtgtaaccaaaaagggcacttaggttaggcacatccctgtcagataaggcctagttaaatagggtctagagggtcagcggggcacctaattatcatggttaatgaggtttctttaggagaaaagaattctgagttccaaacaatgtatagacatgaacatttatggaacactcccctgtttataaactggaaacttgtgtaatttatatttgtaccctatacttcgccatagagtgtgctctgtaaactggccttccttgtagggcatgttcctgaatagggcatattcaggcactattaagtttgggaaaataaatcatatccaaaaccagtattaaataaatataagtcatcggactttaggaattgatgcaattccttaaatggaggaatttcttaaatggacacaattccttaaaaatgaggtaaagagaggggctgggggtaaagtggaatggggcaggggaacagaaaagagtttatagttttacaagtacttaatggtattttttgtttttgaattttgtattttaaattcatttcagtactttcccttgtcactttagttctgtgcatttggtttcttttattcatcttagcgtaggcataactgcattcattactgaaaggcatctttcaaattcttataaaaaacaaaacccatgtaagcactctaaatattgccacttaaattcatcactgcttttatatagcatccctgcttttatatatttagagtgtatatgctggggtgagatacatttgaaagagattatgaaaataaaacaaaaatccaatttaaaagacaactaatagcttctatgatgcgggaaaacccacacagctttgagtatattgttaattacactatggtttgattgcccagatctttgcattttatcacgagaattagtaattattctttattttaattagccaaaatgatgaatctgagcacgtctcatctgtcagagagttttaccaatgagctcaaatttgctatccatgttttgcagtgcagcatcacaagtgttcaaccaggtgcctctaaaacacgagaccttgagccttggtatgcggctcaggtgactgcaccatggccctggtataagcaattccagacagttaaatccagcccttcatcctgcacacttacataagaaattcatttatagacaatttttttgttgttgtttgtttgttttttgacacggagtctcgctctgtcaccaggctggagtgcagtggtgcaatctcggctcactgcaacctctgcctcccaggttcaagcgattctcctgtctcagcctccccagtagctaggactacaggcgccctccaccatgccaggctaatttttttgtatttttagtaaagatgggatttcaccgtgttaggacaggatggtctaaatttcttgatctcatgatccacccgcctcggccccccaaagtgctgcgattacaggtgtgagccaccgcacccagcccaaaaatttgttttaagcaagcacttatcaactagaaaatgaagctcaatagacacggatatcgttggtgtgtcaaagctgaagattatcctaggaaaaactttcatctatctgtgtttgtgtatttacaacttcctctatcatccagacatggtggctcacacctgtaatcccagcactttgggaggccaaggcagatggatcaccttaggtcaggagtttgagaccagcctggccaacacagtgaaatcctgtctctactaaacacacacacacacacacacacacacacacacacaaaatagccaggcgtggtggcatgcccttgtaatcccagctactggggaggtttgaacctgggaggcagaggttgcagtgagccgagattgtgccactgcaccagcctgggcaacagagtgagactctgtctcaaaaaaaaaaaaaaagtttctctatgtatcaatttttattttaagaactttcataggcatgagtaaagctactgcagtgaaagaacctgtcaaaggtcatttcactacttctgtgctgtccttttggtctaagttcacaaagtgtttgtctccattgtatttgctgtttttgtgtttggttatttagtgactttaaaaatgtcaattaactaccatgcccaataagtacataagcaaaaggagtttttttgagaagtgttgagagagaagaggcctggaatctaaaaacacagataatgtgctgaacggaagaaggtcacggaagaggatatgctgaagtctgaggtttgagtcactggacaatcagaagcaaagacttacttatggacaaggtgaagggcgttgggcctatgtcatcaacagtgagcaagagacaggaaatagaatggaagaaatgaaggaaaaatggaatcgctggcctgagaatgaacatcagcaattggtgttgactcagaaggctgagattctgtttgaggacttaaaggtgagggatgggaaagtggtcctgccgagctgctagtgcagagggtgtggaagccatgctaagctagtgagttctgacaagggctcctttcctgcttcaggttttatcacccactcaatatttactgcgcagagagctgaggacacacattaatgaaacagtccactcttcacagtgcttagggcgtccttcgctcatacttctttgaacatatccactctcttgtctattttacattataacacctccagatcagagaaggagtttttgacttaacttgttactccccagctcaccgtgcccagagctccacgcatgactgaatggtgaatttggaatcattgctttcatctactggtttttaccaaagtgtaaagtgcattttctaaatggctctctggctcacagaaagtaacagttttaaaggagatattttaaaaggtagaatttccaatgacaacccaattctttggataattcgtcttattttataatagcagaaacattcctatatgagaacaccaactcttgttaaaacattgagattaccttgaaacaatttagagtctctaaagttgaaagttcttctttgaagatctatacattacaatgttgggcgcagcagatataatctgaactaggaaagactgcatctgcagactattattattattattattattattatttttgagacagagtctcgctctgtcgcctaggctggagtgcagtggcgcgatctaggctcactgcaagctccgcctcccaggttcacgccattctcctgcctcagcctcccaagcagctgggactacaggcgcctgccacctcgcctggctaattgttttgtagttttagtagagatggggtttcaccatgttagccaggatggtctcgatctgctgacctcgtgatctgcccgcctcggcctcccaaagttctgggattacaggtgtgagacactgcgcctggcctgcagactattattaattttataataaggataaatgaaaccagacgtaagtgtcatacatgcatgaattgagttcagagctgtcgtcttatgactcagatccatgttcacccaggttgggaagctcaatgctgcatccatgtagctgatcccagcataggcctgacataggaaaaagactatgggagcccttgtgccagtgactaaattccaaccagcatctttccagtgagatggcctattccaacacacacacacacacacacacacacacacacacacacacacacacacacatacacattttgtaagatcttgaaaaccataaaccaaaatagatccatgatttactggttaattttttgatgatgaactatagagcattaccaaaaagcctaaaatgtttttctgtttgactttcatgccttactttttttctttctggtgatatgatgtcactctgagcacacagggcataggttatatatagttcctttagattctctttaaaactttcaggaacaatgaaaaataatatatcgactaggtagcagttaggacaaatggtgttaagctgttctaaaaagacaatgtttaagctaaaaaacacatcttgggataagaaataaagaaaattcagttacataatggcactatcagggtatagcatcaaggcatatgtatttttctcttctcttcttagaagcgttggtgtcagattatcatttccaggttttttttttcctatttaggagaagttcaggaaatgcttaatatttacaattccctttttaaaggtgtttttcaaaattaaaatagctttgttttcattgccattataaaatattaaaatagttgagaaaggtagaaattagcaattttaccacccagagacagtcaccagtatttttttatgaatcatctcctagataactcattgcatgcccttacatcaatacacataggatattaaggatgttgcatcatactatgcatgacattctgtaacttgttttttccacctaataataggaatgggcatcatttcatgtcaaatgatacagacatacatcatcgtttttaatggctacgcacctttgcaatatccttgaggcaaaccctaatgatcatattggtgtcagtgagtcacctagacatgcatatttgcaaaccattcagaggcattaaattggacacactccccaaagtgcgactaccaccgggttaaagtatcgttccatttaacatttccatcattcctgccaaaacactcttcagaatttgtctacaaacttaacaccaccaatcacagtgaggccaatgtcccccagtttcccagagtattagagacacaaccctcccctccttggttgtatgtgtattcatctcttcttccttcctgagatgaagcttggcatcactccactctgaaagaaatgagaaccgtttttgcatttcaccttaatcagatcaaattaggacaggtggcaaccctgcaggcaacataattatgaaaaatgtctgtgctcaatacagcctgtccttccagcttcccaatcaaataggacaccagagcccaacctttctatttcagctggtgactcatagagcagtcacccacataattgctctgaatataatggtgctgcaaaatctgaaattaaacataatataaaaagcacaaaaatctattttgtaagattagttaatttaatataataatagttcttctattataatcttcatgtgccaaattgggggaaaaaaccttatggctggcctgttattagaagaaaatcttttaacatatcccccttacacttgccatccaaaggtaaaaagaaatgatgttgaggatttcctggttttattgtaagagagtagctgttgtccctccaataaaaagtgtgcaatgaatatctgtttaaatagatttgagataagctgaagctggatacaaaactccattatacaacagggggatcctacatccagcttcatttaggatattgcttctcagaagacatcccgaacacctcaataacaaatgttatattgaaaatgtgctcagtaacaattgcgggatgagtctctgtgcagcgatttttcagcatgtcaaaattatactatcacaccatggaaacaaattaaacagcacaagcctggctgccgggatggctgtattagcaatgcagtgctatttcataaagaatgcattgcttcagatctgtcaatgaatgtcaacaatggcttctccatttgtatgaagcccaatttgtatttggagaaaaaccaaacagaacacttcagaatctggttccatttcttcccaacatttagattaaaagaaaaaagcccggttatctaatttatctgtagtcagcgttccttttctagggaggcacttgggaggaagcctcagagtgtgagttaagcactaacattctctttctgaagcacacgggcaccattaaatgcttactgacagctcagagaaaacacaatctatgtgctacacattgtacaagaaggttttgttgatatattagattcatatatgtgagctttggttttcttgtatttgtgaaacgtggcttagctgtgtattatggctttttgtgactaatgagtgggtcttgcttcagaaatgattacagttatgtcagaataatgtcaaataatcagtattagtagatgagctcttagaaaacagaagccctcttttgcagatagatatgtcataccaaagagaaattaaaacccaagactattctaaacgccaaatagagtctgctatattcacatctcaaattttgtgtatctaacaattaagttaaatagtgattgtcaattaaatagcgttcaaattgtagctcaaaccgaataagaatttcttgtccctggagtggatgtatgtagacatcaacattttaagacacaaagggatgatgagtttcaggctttgttgcagaagtttggacagccgtttggctcttccctagcagtcctgaaacacatgaagtaggtggtcctcctgcctcttgcctttttattttctacagctggctcgattacagccctgaggacttgacacagcagaagacaacccagccaggcagcaggttcaatacacagctgaaatctcactgacctctacatatttggctccagtaacctcttatgtatgtatttattttttaagatcatgttctcagtctccataagggtaaatttgtaaggaagaatttctttaattgtttttccaaacatgcaattctgtgcctcaatcgcttctttttttaaaaaaaagaacagttagggtgtcactctgtcacccactgttgagatcatagctcactgcagcctcaaactcctcagctcctgggagcaatcctccctccagcttcagcctccagagtagctaggactgcaggtatctgccaccatgcctagctaagttttaaattttttatatagagacaggattttgctacgttgcctaagctgatctagaactcctggcttcaagtgatcctcccacctcagcctcccacagcactgggattacaggtgtgagctactgtgctcaacctgcacctttggttttgtcactatattgccatagcaaaattcaggtcagtgggacttgagttttggttttctccactgagttccacgttcttgctcacgtttactccagctaccctggtgtagaaatgaaattaccccagtcctcatgatgcaagcgcttattctgtgccaacaccttaagctccgtttctaaatgagattttgtgaaacgaatcaatcaatcaatattaaaactcaagactaaaatctgtctttgatttttgttcttcctactgctatttccactgaaaaaaaaattctctttcatgtgtccatgggtagaatatccttgcattctttctgttgaaatagtatggttctagtattcactagctatgagatattaaagaacggaagccatcttcctcattatgttttataacagagaaatataactccccaatttacatctaagttcatcttaatagtgctttatacaaaaagttcctgaagaattacaacagttggccattctgcaaagtgccaagggactgattctgaatccagagcaacaacaaccaattatgaagaaatggtctctgtggctagtatggtctagacactagcaagctacatataatgagactgctctctcctttcaaaggctgtgatttaaatttataggtggggtcaatgggttaattttcactgccttgttttcactacacttaccgctattgaggggccttaaaatagctctgctatcagaactcactaatccaaatcagtttataaaaacactctcagattaacaaatcaatgatacttacacaccacaaaattggttaccacttaaaggctttattctgactagatttatagcctgcataaatcccattctcatgtaatttagatggaagacaagcaagaggtatctctgctgtctactcacagcagtgtaggccaaaaaggagagcgattctttattattgatgtttagcagcttgtgtttaaaagctataaagaagacgcaatgaaaatacaatagatcaattcctaaatttccagtatagtttacaaaattttaagagggattaaggatgctagtaattaacttaaaaataagggcatcattatatgtctgtgtaacagagatcttttcagaaacaaaaaatcaagatttttttcttttccaactataaataaagcaaagcctgtttcagataaaattcatctgccaaatactttaatgctatcctgaggttaagaatgatgaaataagtttgatcattcttatggtaaaatgaaggctatttaaagatgagtttcattcctgctttttttttaaaaaaaaacttttatttctataagtttttgggaaacaggtagtatctggttacacgagtaagttctttagtggtgatatgtgggattttggtgcacccatcacccaagcaatatacaccgaacccaatgtgtaggcttttattcctctcattcttgtttttttaaaggtgttttgaacacataaaactcactgtatctaatatattctgagcattggattctagtaacatcacctcttaagatgtaaaatctcttcattttagtctctgttgagaattaaagactggtaaaaccagtaatgtttttagaagcatatattgctgtctgaacttgggatttctgattcaaaattcagagtaaaattttagctcttgggactgctacagaaatattctataagcattaataagaccatgtcaatagagcgttaattattaggattaaaaatttactctatggggggctgggcgcggtggctcatgcctgtaatcccagcactttgggaggccgagtcgggtggatcacaaggtcaggagttcgagaccagcctggctaacatggcaaaaccccgtctctactaaaaatgcaaaaatcagccaggcgtggtggctcatgcctataatcccagctacctgggaggctgaggcaggagaattgcctcaggaggaggcaggttgtggtgagccgaagaggcgccactgcattccagcctgggcaacaagagcgaaactctgtcccctcgccaaaaaaaaaaaatttactctatgggtatcaataatcaatgtgttattctaactcattctgtgcctcattcagtaaaaggctatgaagcaatttaaggatatttgcaacaaacaagttggtttgctggtgttgctcttgctttttttaatgaagggaagactggaaaagggaaagtgatggcaataaaagtaagggcaaactgggaggtggggctggacctctcggtgcataccgtaaagccccatgatactgatccatgtgagccaccaacttggttctgagtttcccagcaatcagaacaaagagggcaccacaatccctagaaaatacacccaaagtggtttttgagaggacaccatcatctctagaaaataaacccaaagtggctcttgagagaaggacagaacttaattttggcacaagcctaggactgccagatttagcaaataaaaatacaggacacccagttaaatttgagtttcagtaaagtaccaagtcctttttttttagcctaagcctgacccagatatttttgttaacctgaaatgcaaatgtaaccggtatcctctagtttatctggcagccttaccaagccataattcagagagaatatttgtaacagaaggccatttgtagcatgtagttttagttcttggtttcttaaggaatgactagaatgagaaatagtatatttcctagaaacaaaagcttctaatttcaacaacatcaggacatagtatacggcatgccgtcaagaaacctgctgaaatacaccagcagatctgagcaggagcaagtgctgcagaagccagggtaaggaggacgcgcagagacgccccgctgctgagagcgcctgtgcttcagggtccactgcaggtctgcacaccacagggtgggtcacacctgagacgcccgtattttaattcctttctcccgtaaagccctcacctcactccactctaaggatttagtcggtgaaaaataagattatacttcagacaaggttcaaccaaacatcatcaaataaacctattctaagaaatgaggagtatctgtattcgatggtagaagtttgaaaggaaatacagatttttttttttttcctttcaaagagcttgttaaatttgatctccctcttcaggtagataactcgtggtcaaagttttcaaaagtttcgacatgtaagaaagaggaaaatacatgtaaggcacacaaaaaccatctattttgtgtatgtaattccaaaggattttgcttctttcatggaattgcatagagatgtttgtcttattttcagacactgataagccattatcagtatcatctttacctgtgcacatgttttttgttgaatttcctttaaaatacaatgaattgaaaaggattaaattcttttttttttttttttttggagacagggtcttgctctgtcacccaggctggtgtgtagtggtgcaatctcagctcactgcaacctccacctccttggttcaaatgattttcctgcagcagcctcacaagtagctgggactacaggtgcccgacatcatgcgcagctaattttttttttttttgtatttttactagagacagggtttcaccatgttggccaggctcgttttgaactcctgacctcagatgatccacgcaccttggcttcctgaagtgctgagattacaggcgtgagccactgtgcctgggctagagtattaaattctgaaatgcaattataattttatttaggatatattttacatctaattaaataaatatcctaaaattagcttcacagtggagaaacctgacggccaccactttgaccaagtaatccaagttcatcccaccagtaatgggacaagctgacactgtgtgcctactgagaagggtacaacatcctcctccaacactcttgccaaaaatgcataacttggttgggtacggtggatcacgcctgtaatcccagcactttgggaggccgaggtgggtggatcagttgaggtcgggagttcgtgaccagcctagccaacatggtgaaaccccatctctactaaaaatacaaaaattagctgggcgtggtggcgcacgcctgtaatcccagaactttgggaggctgaggcgggccgatcagttgaggtcaggagttcatgaccagtctggccaacatagtgaaaccccatctttactaaaaatacaaaaattagccagatgtggtggcacacgcctgtaatcccagctactcgggaggctgatacaggagaattgcttgaacccaggaggtggaggttgtggtgggccaagatcatgccactgcactccagcctgggtgacgacagagtgagactctgtctcaaaaaaaaaaaaaaaattgcataacttgagtctaaacaggaggaaacattagacaaacacaaattgaaggatagtctacaaaataactgtcctgcgctcataaaaaattccacagtcataatagactagacataatagtctagataagaggggtctaaagagatgtggcaactggatgcaacatgtgagctgggattttcttcttactattaggtatgtactgaggataaattttgaaatttaaataaggtttgtgtaaagtatggcatcaatgctaatttcctgacttcgatcattatactgtggttacataacagattactccggtattgagaaaacatattctgcaatcttcagaagtaaaggaccatcatgttggcaacttactctcaaaggattcagaaaaaaaatatatgcacatatgtacacagatggagacaggaagaaacaaatgtggtcagtgtcagcatgtgggtatctagttgaagaatgtatgaaaaattctttctcttgcaccttttctcatgagtctaaaattacgtcaaaattagaaagttcaaagaaaaagacatttcctttggtaaaaaaaagtcactcagtatcactaggggaggcatccactttgttttaaagcttactgggcctgaaggaaatgacactcgaacagcacagccagctatagctacagcacagaaaaccacctccaccctctcccacaggagggctccccggctagagttttctgaatacttactggatagttcaatgttgtttttttgtttgttttgtttagctttgccttgttttttgttttttacagctgagaaaatttgagtttccacaacatccacagacaatctggaccataatcaagtcagtgcagtctaaagcaatgtttcaaatatccgaaggtaaggccagttctttattttttgattgctactgaaactaattgaatagtgttatgaatggagtcaaatgatgtgcttaatcaactgaatatccaataattctgtacagcctattctatgttagttttctctaactataagatattctaatggagaacaaggaaaggaataatgccatttttacccggccctttagaagacaaggtaaactcatcttttctaacaggatattgaatatgcattttttttttaagaatccaagccttacctgtacggttgtcccttggcgtccaaggagtattgattccactactcctttgggatgccaaagtgacaattgctcaagtctctgatatacaatgatgtagtatttctatataacctatgcacatcctcccatatacttaaaatcatccctagattatgtatatctaatacaaagtcaatgctatgtaaatagttgttatattgcaattttatttgtattatttttatcgttgtgtcattttttatgttcattttttccaaatattttctatctgcagttgggtgactcctcagttgtggaacccatagatacagggggttgacagacactaggttgaggtaatgcttcatgattgttgaatgtaggattttggatatgcagaaacgaatttctaccttaaagactgaggagcaaaatataaggagacaatgcattaagcccatctgttaattttgattagttttaatattctctttaatatactcttctgtttatataatgtggggctagtagacgaaagaatatcaatatcatttgatgatattaatgttctgattatgcctatattccttctacaaatatatatggcacaaaatccaaatgccaggaactggtctagataagaggaatacagacgattagacacagttcctatgctcaggggatttacactccactagatgatacttaagtacacaaactaaagagagaaaaccctaagggctatggagaaagatgaagcagggaaactgttggagggagagggaggatctggaacatcagcaaagtcttcactagggaggtcccttgtgcagaccaagggacagccaggaccagcactaggaggacgagggaacacaagcagagcagacaggtctgcgggccagggtgccgccaggataggagggctggcgggagaggcaggaggtcaccgcaggacctgaaggaaatgactcctggccaggggccagatcgtgatggtctcaagggttgaagtttaattccgagagtagggagaaggcactggaggacttgcacatggtagtgatgtcatagccttcatattttagaaggcattctacattataataatgtgagatttacagaagagttgtaacgactgcacagagcgtcctcagatgcgctgcaccccacgtccgctgctgttaacatcctacataaccaggccatcttcccataatcctctatatttaaaaggtgatctgtccccttactgtatagaaaataattacgaactaataataacgacaatcattatgaactaataacatcgcatgtcaactgcatcccaggagctgttccgagtgcttcgcatggatcacctccttagtccttacgggctgctttgagtgtgagggcagggctattgatattttcattatccccatttaatggatgaggacagtgaggcagggaaaggtgcataaacctgcccagtgtcacaaaactaatatatggtgaggctggtttcaagctaatattggccaatccccaaccctgaactctggaatagtctgggggagcaaaacaagatccagggagcccagttaggaggctctggctgtggcctgtggtcagcagtgcagcggtcaggtgggaggtgatggcacctgggggctggaaggtgaggccagcaggtcttgctggtgggctgccctgtggagcagacaaaggaaaaggaggcaggggttgcgctgccacttttatcctgaggaaccggctggacagtggtgccttctactgagagtaggaagactggggaagagcgagagagggctcgaggagttctgcttcggatgccacattggcaaagcttataaattatccagttgtagccaagagaagaaggtgagtgtttggagagtagagagtgacacaccaagtcatgatgctcaggggtcaaataggtggaggtgatagaattgactgctggaggccgggcgcagtggctcatgcctgtaatcccagcactttgggaggctgaggtgggcagatcacgaggtcaggagtttgagaccagcctggccaacatagtgaaaccccatctctactaaaaaaaaaaaacaaaaaacaaaaacccagcagggtatggtggcgcatgcctgtaatcccagctacttgaggggctgaggcaggagaatcacttgaaccctggaggcagaggttgcagtgagccaagaccattctactgcactccagcctgggtgacagagcaagactccgtctcaaaaaaacaaacaaaaaaagaactgactgctggacttcatgccaaatctatttacaaatcaatttaacactcttcaagatgtagaaatcaacaaaaattggttcatcaattttctgtcctcagcctgtctcctcttcctcccagatccccatcccagctctgtcttatgagagaaacaaggaaagagagaaggaaggaaagaaagaggggaagaggctgtgggcaagatgggagaagacatcaagaaacccaaaggcaaagaaaatgatggctttcaagaagagtggcaggccacacctcttccctttgaacaacaaattcatgtcacttctttccaatatcaagacacccgtaggacacaataatatattttctctcagatttttgttagaattcagtcaaactgtctgctttagaatttattatctcatgacatgagcctctcattacagggtcacatatttgatttatgacatcaccagttaagttgtttctagtataacacttacacagttaaaatatataaatatttttacatagaagttatgaaatttcaagttgactgaataactgaacaactaaaaacactggtttttttatatttgaaaatgtaactacatgtgcaagaaaattataggtaataaaataatagtgaagaaaagaaaaaaataagtgaaacaagaaaataaggaaacaagtggattacaaaattatacattctagagaggaaaaacagtcaaatcagataggcagaagcagggatacctaaacgaacatggatcaatacaagttcttcaactacatgaacactggttgggggggtccccaagaaagcaaaatccaatggaaaatgtgactgtattgggtgggtaccctttgtgctattcaaaaggacaaacaatgccgtgagaaatctaaacctacaatgtaattgttgactccatagtgtgactataaagtagtgacaaaataattatatacttgtttctattgtgtgtcagataaaacagcacaaattcttgcacccatgtattacaagaacatcaaagaacacgttgtcagtgttcaaatacggcaaaaagttgagagggaagtttttctggtaatctctcacattcaacaaaccaccgacaacaagatactccaaaggaacccacagtgtggggcgagatgtaggaatttcatacacacagacaagaggcaggggagctatgttattcaagctcaagaaaagtatgaaagtaaaggcttctgttatgacactgggttttacctgctttcccattgttgtgttacaaaccaccccttactttttattcttttcacaatctctttccacgcagacactccatgtggttagcttggacttcctgacaacatggtggcctcaatgtatctggatttctcatatgaaagcccaggactcttcacgaaggccaagacggaagctgacagtcatgtcaagagctaggcctggcagagtgtctttttccactgaactcagtgcaagcagggtgaggtcagcccaaattcacagggcagggaagtagaacctacctctcattgggagggggatcacattatttgcagtgatctttactatgccacagggttgatcacctttatggcaatttgattgcttatcagccaaaaggaaggaggtggtgctataatttacggcgggaaagtgaaaaaagaaagaacattcctgggtcacttctctaggctgcctctgactaactccactgacaactttaaatccacatcagaggttgcatttgaaacagaaagacaagaaatacctgcaactaatgttgtcctgtggagtggccggtggcaggggacagctgaaagatccacacagaaggacaggggacttgcagacatggggtcggggtgaggagtggggactgcaaggagactgacagcgtggagctgccagctgtacaaagcttgctatacctatcagggttgaggactcatttttgtgtttcgacacattcttggcacgttccccttgagcatgaggcagaacgcaactgcctttgcttattttatctagagaatgatgaccaaggtgctctttccctaaagagaaggcagaacaagaggagagaaacacattactatggttggaggttaaaaaaaaacacttttctggaaataaaagttattcaccactaaaacagtttacacctaaaagtcagagaatcacttatttggaagatttctatctttactagtgcttattgtataggaaaacaactatttaaacaatactcttcacaatatgtatgtttttctttttctgacattgttttccaactttggtttgctattttttccctttattcctcaacttgtctcccacttctcagcctccattcatgtctgccttgcctttcacccaccagtggtcccagcgatatcgacaagaaacccctaggaacatttagcacacacaaaaaaagcctactaaatcccttcctggtggtccctatgctcataattaagtcggtgcatttctgtctggaaggagagttacactagattatttttctgatcatttaagagctagtgcccattagttataacaatggttgtaggagaatgaaagtgctgaccaactcctatctttgcctacacaatagttctctacctctttcttccctgaagatgatttgatgcaagacctggcctgagagccttccatgtctcggcagcagggactctctgactcagagaattgatggctaatctcagtttgcctcaagaatcctattctccgtgtacagtgactgtattaggagtgttcataggacctagtcttggccaatgaaaagtaccgggaagactgctgggggcttctggggagtctatcacttcctgatacctagagagaaattcaaaagaacaagaggctttgggcctcacgcttttcttcctgtttggattccagggtgatgagatgttatcttgagctgcagcacctgtgggcatggggtgatgaacacatgccgaaaggaggagcccagggcttcacagaagtgttagctcctaaacagagccctcacctgccaacctctggacttctcataactaaacagcaaatgttctcaggtttcagacctcagctggtcaggttttctgttattgtagctaaaggaagctgtgctccatgaatattttcatatttcacatttctgcatagctagggcttattgagtaaggattactggcaacccaagttaaagaatgaccgaatggtgaacatgccttggaattcgagatagtgacttgttcctgtgacatgtaaaggctcatctcctctgcagccattcacttacccaggggtgacaaaactggggacctttctctcctttcttcagagaagattcttccacattcccggacaaaacttcctgccttgctgccctccacccccgactctctctctctctctctggagtggagaagggacaagtgtgacagttactctatgtaagctccaagtttcataattccagaggtcctctcctggggagaaagccctgcccatgcaggcacatgtggccctcactgtaccataccatgggagattagtgcatgaggtactggtgctgctatgatgttctgtgagtaaataaaaggtctgtcctctgatccagcgtgcgcacacacacacacacacacacatattctaaacccacatacacacatgtgtgcgtacacacagttagggtagttcatgtacctacttaaatgcatgcacaattctgtgtgtgcatttttcttagtgcagaaggggagaaggtcctatggttttaatcagattctcaaaggtgtcagtaatcaaaacaaaacataacaaaattaagaactagttactagagtataaatctcttgaggaaaataacattgtcttaatatctgtagggcctagcacagtgtttgacatgcagcagatgctcaataaaagcttcctaattgaatgaatagataaattagttgtgtggtcctccaactatgctcgatgcctagtgctctgggtgaaagaaacaagtatgtgacatttaaatacaaactcataagccataaactcatagaaacagatgtatacacgacaaacttgcatttatcagcatgaaagtctgataaagctctatattgagaaacattcaattgtatgatagcatggaacataattttgtacatccaaatgttaattataagagagagaaaagacctgtaaatgaaagagagagatcaccgtgagttatctacttaacatacgggcttggtcacattaagcattcattctgcatttaagcattctgaatcttaagaattttaatttgccttcttagcaatgagaggctggagtaaaaacccaaaacatatacacgcatatgatttctatattatatgaattttgtataaaacatgattatctttctctaattcattagctagtttatcataagcatccactcgatggaatgtgtttttcttccttcaaagcataagatacaggatatttaacaatatatgttacgaaagtatgtacagcagatagattagtaaactcttcttgtaacatacttcttccaactatcctttttctttggatgttgggtggccatggatgttatgggttgaatttactccccaaagagatatgttcaagtcttaaccctaagtaccaatgaatataacctcatttgggaataaaatctttgtagaagtaatcaaattaagataaggtcatgagggtgggccctaatacaatataactcttgtccttgtaagaagaaaagagacacaaagacacacagagacaaagccatgtgataacagatcagctgtctgagtgatgcagccacaagccgaggaatgccgactcctggcaacaccaaagctcagacaaggggtgggagcagatccttcccagagccttcagagggagctcagtcctgccaacaacttgattgcagacttcaggctcccaggacaatgagacagtaagttcctgttgttttaagccatccaagcttgtggcagattgttttttggcagccctaggaaactaatacaatgggtgacaatggatatattcttgtgactcagatcctgctagtgcaatgttgatttccatctgtcactatataaaatcattgacactcagatgggaggagacagatcaaaggagatcaaatcatagaaaatagaaggatctgagaagaccattcttttaacatgcaattgccacttaacctaaccaaaagatgtattttgtaacttatccttaagactattgttctgataaaaataacgtttctttagagttctgaaattcaagagcaaaatgattgcctcattggaattacagttgacttacatttgagacagggcatcttggacatgtcatttgaaaataaggaaggcattggacttccctttataccaggtaaactttcattaaattcaaccaaagcctggcttacagcaatttctgtgctcccatcagcttgaattgttctagctgtgtttggcagtgctgggatagggatggggtaacataatgatctctcgctagctacccagttttctatttctcatttgttcttaaaagcctcaaacactcccaaagtattttcttaaaaattgggctttcgtttatttttggaaagaaaacaatcaaatgttgatgggtgaggaatgtacagagacagcaacacagggattctcaaatgtttctgctactgggtgtctatgatgacaaaggcgagacccaatggtgcaattttcccaaacatcccgcacacgtgaaaacaccatgtttgtttcttcaaccacttctttaaaatctgttatattaacattcaattaatgatataatttctttttattgtacagttcattttcttagaaaagctctgggtattgaatccttagaagttccccaaattgctattttgaatagcctaatttttattccttacttggtattattatttcttctttctctcatccttttctgttatttctctaccccttttctttgtgcattttgatcagctagagttatattcttttccactcccagaggatacttcaaatcccatcaccctctctgaacggtcttccttttctatcctcattcatctgggtggacttcttccaactgcatcctcctgttcaaatccatgcttgcctgggatcacactgagtcagtgattctgatggtaattttttcaacaagcatttgttaatcattctctgtccaagtagtaggtcataataattagatactttaggtaagagataatttgggcccagtttctaccctctaggtatgtctttattgatatacccagacagtactagttagttagttaatatactccgtatacaatatactctagaaaattacggttctgttgaattggcatgcttttgttaatgcagattgatgctacatctccaacactaacctcagttaaactttttacctaagacaaggcatattatggggatatatgtgtgggaaagaagaaaatgttctcacctactagatgggtctttctttcctttcttatttcattctttctttcccttttcccttcctccctgattccccttttctctctttcttctcagaagacactattaaagcagctaagtcataatcttacaggtcagggcaaaaattagaaaactattcaaaaccactattacccaactcctagggaaaaaaataaaccaaactcctattaaaaaattcattacagttacccttgggaatcattctttcatccattcactcataattcatcagtgtatttattattgaaaattcctaagtgtcagcttacaacaaagtcatcctaaactatatgaatcttttctaaataatcaagactgtatctcaaattactcaacattacatttctaagaatttaccatttgacttcatattgaatatatttgtttttctatttatgtcttagtctgttcaggctattacgacaaaataccataaactgggtagcttagacaaaaaaaatttatttctcacagttctggaggctgggaagtccaagatcaaggtgctggcagatttggtgtctgctgaaggcttcttccccattggtagtgctcctagttgtgtcctcacttggtgaaaggggcaaacaagctcctttgggtctattagataagggtactaatccagtcatgtggactctgccctcatgatcttgtaactccccaaaggccctacctcttcatactatatcttggaatactttgaggagaattaacattaattcttctttaagtatttggtagaattcagcaataaggccatcagatcctgggcttttctttgatggaaatgtatagaaatgtctaatatagtggattttttttttttttttggacggagtttcgctctgtagcccaggctggagtgcagtggcgcgatctcggctcactgcaagctccgcctcccaggttcacgccattctcctgcctcagcctcccgagtagctgggattacaggcgcccgccaccacgcctggctaattttttgtatttttagtagagacggggtttcaccgtgttagccaggatggtctggatctcctgacctcgtgatccgcccacctcggcctcccaaagtgctgggattacaggcatgagccaccgcgcccggcatatagtggattttaagtcatcattatttaagacacaatgtatttagcaaaactaaaaactgttatttttttaacagggtgcatgtaatgctgtatttaaatatcaaaagaagctaattcaatgtgatgaagtaaaataattcgtatcacttgccatctttcagtggttgactaaagctgttatctaataaccatatttttatctaagtatatttaggggagattatctatctatctatctatctatctatctaatttgcctatcgatttacctacctatcttatctatgtaatctattttatccaatcaatcaatctaatcaaccaaccattcaatgtatctctctatttatctatcatctgtcttccaaagtaactttccaaacacaattagaatttgtgctatttctacgtatgacactgaatttttacatcaattacttaagctataaaaaaaaccttccacagaaataatcttactaaaacaaaactgggtgcaagtgaaattcaacaccggcttgtctcccagtagccttagcatctctgctataatttactgagagtataaaagtgctcattcatttggacttacttctgtttgttgcatagggcctgttagtcatgctatatttccttacaaaatgttaacattgagttgtccctcaaggaatattttaatgtgagagagaagtgtcaaggttagaactgctgagagatttgctctctgtagactgctggactgtaaataatcagccatctccagcatcaagtgattgctcaaaagataggatttctttctctgaacttaaaaatttagcataacttgtatttacttcatttcaacatttagatctgcatttcagagcactttaagaatgtgttggtaacttattaggccaatactaatgcagctcagcaaatgaatgcttattatgagtaaactaagaactctagggaatataaacaagatctaatccttgccctcaaagagcccacagcttagttgaggggatacataaacaaatatttaagtacagtaagaggcagactgataatggtactaataaagacttctgtttttataaaggtctacacagttttcaaagcccttcacccacattacttcccttgacctgaacaagaaatatttccagtagaccagaaagactgaatcatccttagtttagaaacaaggaaaatgagaatcacaacattaagggttggatccacattcataagcgtagcagcaacagtgctaaattgccgatttttttttggcaccatattgactatcttctgtgaaaataattaaatgggaggccatcagacagaggtggctctaaaaccccgggttcctaaatcagcaaactgaaatataactcagactcatttcctatgatcggctaatttaaaagatgaaacttgaactcagctgatcacaggcagtcaacttggaattagttatattgttctgaacttcccatgggaatcgtccaaataaggtaattgttcaaactttagccaattacataatttatttgcttccaaatttatcctataaaagctttcccttcaatgacctgtggtggagctctgaccacttgtggctagattcataaatcactgtttgcgcacataagctgtttaaaattttaatacgccttagtttatcttttaacacttctattttattcactcttccctctgtgttctgaaattttgttgacctctcttacctgacttttatcttctctctaactctttgtgttcttgtggacttacactattttaactccttccgtatcattttgatggggtttggggaagtagcagatatatggaacttcttcaggaacccatgtgggacaaaattatttccataagctctgggaatgcctcacagaggacagcaaatttgacctgggtctttagaaatgagtaagattagagtgagctgctgagctgaaagggaaatccaagagaaggaggaaaatgggagaagctatggtctgaatgtttatgtctctcatgagtgtccatgcatctcaattagtacccgtataaaacagccccttctactatgtgaggatgcataagagggcaccatctatgaggaagtgggccctcgccagacaccaaatctgccagagactttgtcttggactgccaagcctccagaactgtgagcaataaaattctgttgtttataagccacctggtctatgggatctcattatagcagcccagatggactaagacaggagacttttaagcccacatgataagctacgttaatatagagatcaatgcttttcttttttttccagggttgaaccttaaaaagaggtcaactatttgaaactaaacaagttcttgtaaattaaaaaaagcaccttcaaaacacagagacaatccagaccatttagtttaagacataactttgagcctttcagctagagcgggttttcaaagtaggagtcatgaagctgcctccaggaggatggcattctttacacaacagaaagcctccaccatggtgatatggatgggggtgcagaagacaaacttagcctccaatctactcggctaacaactccctaggcctttagggcagaacgggtggccagaatcgaagtcaaatggagtttattcagctggaggaagaacttgcagcatggttgctcaacttcaggccacggatttgatcctactttatagagatgagaatgagtctctgaatgcacagtgtttaggttagaaatctgacacattggcaagcatgaacggttcatgcctgtaatcccaacactttgggaggccaaggtgggcggatcacttgagaacaggagttcgagaccagccttgctaacatggcgaaaccctgtctctaccaaaaatacaaaaaagagccgggtgagctggcacatacctgtaattccagctacgcaggaggctgaggcaagagaatcacttgagcctgggaggtggaggttgcagcgagctgaaatgataccactgcattccagcctgggcgacaagtgagattctgtccccaaaaaagagagaaatctgacacattcttaagagacaccataaagggatttacttgttactgaaaatcttagattagcttttttctctttgattaaaaaataacataaattagaataaaatacagatttaaatttatattctattttattctatattttagagaaacatatttgagttcctcaacatctaatatttctgcattctcacagtatttctgtgatgtaatttttcaaaggatctgtgtaccatccacccctttcaaagctgagaatttcatattagatcattgcagctttggagaaaaatgcattaaaatataacagttcacattcttttgtgagaaaacatatatacagctatgtacccgtatgtgtatatgtgcatatatattacatgtacatatagaatgtacatgtgcacacagacacatatacatttacacacatatgtattttgatatttcaaatgctcaatgcagcatggccataggtaatagcaatctattctatttttagtggtagccatgtcatacagatgttttgacaccattgtaaatagcagaaaggggctgccctctctctttttttttttttttgagatggagtcttgctctgtcacccaggatggagtgcagtggcgcgatcttggctcactacaagctctgcctcccaggttcaagcgattctcctgcctcagcctcccaagtagctgggattacagacacgtgccaccacgcccaggtaatttttgtacttagtagagatggggtttccccacgttggccaggctggtctcgaacccctggcctcaagtagtctgcctgcctcggcctcccgaagtgctgggattacaggtatgagccactgcacccgtctggactaccctctctaaagaacaatgccaagcagaaattacaaccctctgatgagtggcatatagagaaaagcatcctatggtatcagccagaggagaaaataggggctctacagcaagatgcggacatgtgtgcaaacaccctgagccaagagtttcctcaggaaccaaccataagctctttgggggcctgtggtggtggtagtcctaggaggtggagatgggggttcgaggaaatgcagaaggttttgtatgtaatgaagtgttttcttttcatggacagagactgtttttctatcccaaaggtctgggggagccataaaaacattttagggaaaatgtcatcaattcctgttttagagtcacaatggcagggttggtgtgaagaacaggctgatattggaaggccaatgtggaagctgctcaactctccagttaagtgtgatgtgagcgtacactaaacacacagcaggaggaagggaggctgggagacacatttaagagctaactagtaggtagcattgagaggagttggtgactacctagatgtggtaaaagaaggagtctgggatgacttcagggtttccaattttgaccagtagggatggtggtgacagtaactgaaaaaagaaaaacaagtgttccagttccatgtggcagactgaacaaatgtgtttaaatctcctacttcctaaagcctgactaaaatgatattggtgcagaagggaaataaatctataaggacaaagagtttgagagagaagaaaaaatcagaagagagatgttaatcaaatcatagaacacagatggaatggtagaacctactgtatttagcagagcagagaaagctaaagcctcactgtctgcagaagggaaattcagtcataatcaaggccatttaggtgcagcaccaccggaaggcccaggactggaggatccaggtccctggcaaattcagagaaaagaaagggcccaaatgagaataagtacttgaaaatctcatacagtgagcagtaagatgacagcatcccaccccccagcctatgaagctggcaactttccctgcttccccaggctgaagacaaaatgttcttttcccagagtagccctacagagtggatctgggctcaggccacctggcacagcatgggggggagatgaggggctttattgaaatcagggaattacatggatgactgcatgttgattggtgatagctcaacccctttgttctgcctcccttccagactgacggcatccagatttaataaaaccctacacctccccaccactgggcaggacattattgtagactttctatctgcagttgtggagtcctaccaccctagaaatagtccagtgtttgggtgcaggtgtgccccttcctcacatcctgttcactgctctactacaggtactcaggtgaaatgcagaatttaacaagcctgaccttgcacacggtttccaatcagtttttttaaaatgcttttaaaaaaagtatgaatgaaaagcaaatgaagacaagacatctggagaaagtcttcagtaccaaaggtaagagactccaagaaactgaaaaggaaacagaaaacaatttagggaagagtagaagacttaaaaaaatcaaacacaacaaacactcaactacaatcaatttctttgaatagataagataatggtataaagaaaaaatatttggagaaaaagaagcggtcttaaatattaaaatgatgacggcagaaaattttaaaaatttagtcagtttggaaaacaagtttggagaaatctctttgaaagaagagcaaagaggtagaggaatgggaaacaggagatgggagatttaaagaaagaaaaacaaagaattgacctaacacgtttcatatccaagatgtaggaatcccagaaagagaaaataaagtggagaaaaatatcaaataattaaatacaaagatgtttcccagtatagaaggtcataggtttctggcttcaaggagccactgtataagtaggcccagaacaatgaatgaggaaggcctgagccaaggacagccgtcacagtgagcaaatggatgatgggctgggggagaacaggaacaagaatcagaatggccttggacttcagccaccagccctgaaagcttgaacagaatgccttcaacattctgaaagaaaatagtgccttacctaggtttccctattcccagacaaaccattgatctagtgttggggggacaatagagagaaaaatcagtgcagaataaacctggcattcgggacaatgtggacgacagtgccctccgctgtgctggagggtcctgacagcctcaggaggagtgggacctcagaatgcatgtctccaattggaaaaattggggagaaaatgatatgtgatttttcgtgattatactaagagatttataattctattagaaagtttggggctgaattaatgacgactttacccaaacccaagtgaacaagcaaatgaaaaaaccaagtcaatcactaaatccaagaaaaataaaatagttgtataagaaagggaattataatacctagtctgaacaatgcttttaatagaggaggtgtgtgtgtggatgtgtgtgtgtgtttgcaggcacatgttgtgtacagcattaaaccttcattgatctttcatagctagaatttagcagatagtagttaaaattaaagtaagaaaaaaatagctggatagtcatactatatttaatttttttttttttagacagagtctctctctgtcacccaggctggagtgcagtggcgtgatcttggctcactgcaatctctgcctcccaggttcaagtgattctcctgcctcagcctccagcgtagctgggattacaggtgtgtgccaccacgcccggctaatttttttttttttaatttttagtagagatggggtttcaccatgtgggccaggctggtttcgaattcctgacctcaagtgatccacccgcctcggcctcccaaagtgctaggattacaggcatgagccaccatacccagcctagaattttttatcctaagattcatcttgggctctttcactgatttattttattattattactataattaggctgcagcttaggttgtcatccaggtggcaatgttgtcacagttgtcattgcctgcacatgcccgtcaaacatacagaatagctgtcaggagcttagaagaaaattccaaagacagtagctgctcactccttaactaagggcagcatcttcagcactcttgcttgttgagagcatggtatttggaaaccatagtttctgaattatgggacataggtcccatatgtccaattatgggacaaccataattctgacactgcaagtgagctagctaggagattgcattttgaatgtgttaaaaatatcttaatctattttacttttaattttttatacatgtacaagggggataaataatgaaaaagtgtctcatatatttctactctaagagcacttttgataagtattaaatataagtctgagaaatttgaagtgatacaaagtctttcagagttcattaacagtgtttttttattttttcttgatgatgaagaaaatgatactgttttttagttcaatggcatcttaataactatttggtgaaactacaaaagaatgaaaagtgattctataggaataaggaaagtgagtagtttacagatatttaacactaaatgacaaatgtgaggtttctttgatgaaatattgaaattaaataacagaaaagcttctaggagatggggcttcgggcagatggttggcaaagttgagctgggcctgagatgataatacatgaactttcctttaagaacctgtttttccctattccaccaaaaccaaaacaaaaaaccctaagaaaacactgcaagtgaagatctactaacaggcaggttttgggcatggagattcagggcgaggtctgtgctggactcagcttggggagtcgcagtgcctgggggctggactacggttagagttctccagtcaccaagaacctgctgtttcactgaggaccagaagcacatgaaaggagaatgcttttccaatagcttcaaaggagtcgaattgttttgaataattagctatgagactgttccccatagtttacaaagaaaagtcattgatatatttttaaggtcatcatttgattcacaaaataagcaaaaaaaattttttgaatgaggcaatgactcagagtgcagaattattttatcattattcatgtaaaaagatattaataaattgtattatgtgccaagcactatgctaggaactcaaactgaattatttcatcaactcatcccaaaagcactaaggaatcattactaacactgtccctgtgtcacaaagagggcaacttgcccagcgttgcatgggagctggcctgtggtgggaaagtgggttctgactctgggggcaaagccgggagctgggatgtccgcgagctgcttctgaacgctgcccatagggagttatcttttgtaaggtccttcagcaccaccaaaatacgtacctctaaaaattacgggcaaaacagaaacagggcaggtatttcgttggttgattgacccacttatttattaatttattcaataaatatatattaatatataactaagaaaaatgtatatgtatattaataatacacacacacacacacacacacacacacacacacacaaatttaagaacctctatggaccaggcactgtgaggagtaccagggatatgacagtgaagaagagaaaataaacacctcaaacaacccaggatgttgtgttgcttgatattgggtgccgtaacaagtagaacaggaggagcaaataaaccagggaggcaatggggccagggtggtccagggaggatgtggaggaaggtctgggggaggctatcagctgtgcacagtgcccaggaaagaggatgccaggaggggcctgggcttggccggggtgtccatagcagagccaaggtgcttgtgttggaaagaagggtcgtccacgtggccagaggttgtgataggagaggggtggtcacaaggtgtcaccgaagaggtagagaggaatctggcactcacagatagagttgtttgaattttattctaattataaagggcagttactggagcattttgagggcggggataggatctgatttgcagctgaaaactatcgatgccctgaaacaggagcttgaagccttgttctcacgtctaaagccatccaaatataggggccactgtggtttttgtctggttttacaactcagttaatcccaatgaataattgagtacataaaatctattaattagggctgttaaaaaagatgtgatggaaagatgatcaatggaaccaccaggcgtggaaataatgtgagtctatgtgcgtatatgcagggcgagcttgagcttcacccaaaatctgtgggtctagaacttacttctctcttacagcacaggcacacctcttcttcttgtgtgtcacttcactgcattttacagatgctgcagtttttacgcattgaaggtttatggcaaccctgcatcgagcaagtctgttgatgccattttcccaacagtgtgtgctcactttcagtctctgtccatttttggtaattctcacactatttcaaacttttttgtcatcatcatatttgttatggtgacctgtgatcagtgatcttggatgttaccattgtgattgtttgggagcaccatgaaatgtgcccacataagagggtggactgaactggtaaagtgttgtgtgtgttctgactgctccactaaccagaccttcccctgtcttgccccttctcctcaggcctccttattccctgagtcataacaatttaagttaggccaattaataaacctacaatggcctccaagtgttcaagtgaaaggaagagtcacacaacttctactttaaatcaaaaactagaaatgattaagcttggtgaggaaggcatgtcaagttctagatctcttgcaccaaacagctagccaagctgtgaactgggaatgcaaaccaggagctattgaaggacatttaaaatgctactcctgtgaacacacaaatgataagaaagcaaacagccttattgctgatatggagaaagtttgagtgttctggataggagattaaaccaatcacaatactccattaagccaaagcataatccagagcaaggccctctcttcaattctatgaaggctgagagaggtgaggaagctgcataacaaaagtttgaaactatgagaggttggctcatgaagcttaaggaaagaagccacctccatcacataaagtgcaaggtgaagcagcaagtgctgatatagaaaccgcagcaagtcatccagaagatctagctaagatcattgatgaaggtggctacactaaaccacaggttttcaatgtagatgaaagagccttctattggaagaagatgtcatggagaagtcaatgactggcttcaaagcttcaaatgacaggctgattctccttaggagctaatatagctggtgactttaagtagaaaccaatgctcatttaccattccaaaaatgctagggcccttaagaattatgtgatatcagccaggcgcggtggctcacacccataattccagcactttgggaggccgaagcaggtggatcatttgaagtcaggagttcacgaccagcctggccaacatggtgaaaccccctctctactaaaaatacaaaaattagccaggcgtggtggcgtgagcctgtagtcccagctactcaggaggccgaggcaggagaattgcttgaacctgggaggcagaggttgcagtgagctgagatcatgccgctgcactccagcctgggtgacagtcagactccatctcaaaaaaaaaaaaaaaaaaaaaaagaattatgtgaaatctctgactgtgctctataaatggaatggcaaagacaggatgagagcacatttgtttacagatgcacatggtttaatgaatattttaagcccactgttgagacctactgctcagaaagaaatattcctttcaaaatattactgctcaatgacaatggacctggttacccaagagctctgatggagatgtccaaggaggtgaatgttttcatgcctgctaacacaacagatgaagggataatttcaacttttgagtcttattaagaaatatatttcataaggaaatagctgccataaaaagtcctctgatggatctgggcaaagtacactgaaaaccttctggaaaggattcaccattctagatgccattaagaacattcatgatttgtagaaggtcaaaatatcaacataacaggagtttggaggaagtcaatttcatccctcctggatgactctgagggcttcaagacttcaatgtaggaaataactcagatgtattggaaaccacagaagaactggaaatacaagtggagcctgaagatgtgactcaattgcagcaatctcatgataaaacatgaactgatcaggagttgcttcttatggatgcgcaaagattttttttttttaagttggaatctacttctggtgaagacactgggaacattgttgaaatgacaataaaggattttgaaaattacataaacttagttgatcaagcagtagctttgagaaagtttgagaggatcgactccaattttgaaagttgttctactgtgggtaaaatgctatcaaacagcatcacatgctacagagacatctttcatgaaaaaagagtccagtgatgtggcaaacatcaccgttgtcttagaaattgccacagccacgtcaagcttcagcagccgcaaccctgatcagtcagcagccatcaacatgaaggtaagaccctctcccagcaaaaagataaggatttgctttattgcagtgggctggaactgaatctgcaatatctctgaggtatgtcagtattcattttctactgccattataataaatcaccataaaaccagcttaaaacaatatccatttatctcatagtttctgtggttcagaagtccgggcacagcgtagctcagcttctcctctgcccagaatcccaaaggccaagatcaaagtccagcactgctctgtggggctctggagaagaacctgctttcaagctcattcaagttgtagcaaatttcagttttgtagggatgtaggattgaggtcccttttccttgctgtctacctggaggcacctgtactccctgcctgcttcacagccagcaggggtgtctcaaaagcttctcctgcttcccctccatctctatgcatgcctccacctttctcttcagccacatctctctggttgcttttaaggtctccaggggtgagtttggagagcctccctatttgaggtctgtgacctttatagctgtagctgcattcgtgtttaatggcataactagaggacagaatcttggaggaccctctttacaattctgcctaccacaataaatatttttagtgatggagacattattttaaaccaattcactgaggaccaaagagggctctattaagcaactcaacaacaacaaagagaaacagatttgagacaaacataatttaaacaaagctagaaaaggctttaaaacatcttttagcatgccttgcattagtaagcacatgtgcaaatgtatgccatcagaaggctatggtaatatctatttagaagtgcaccaccggactgaaatctagactatgttgagattgtatttctcaatatttctggtatagtaggtgtctaagacttcttatcagttatttaatacagacatttaaatagttgatattgtttcacatatatgtatagacactacagtgggaatgtctagttttataaaaacaaatctatttggtgccactaatacatgaaattttgacaggtggcagaaatcaaatgacatttacagaaattcaaacaaaatcttcgcttaatattactctcctttcccccacccttaatcaatcttgaaatgtcaggctgcaggcagccactgtgtctatttggaggtggatactgaagctgacctcccagaatttcctccttccatcccccttggcaacaacagcagtttcttatttttagttttctgggagaggaagacagagagagagagagagagagagagagagagagagagaacactgaaactgtatatttctatgagatgctggagtctgataggtcctttgaagaatgaagatgcaaaaatattaggttgatgcaaaagttattgcaattttttccattacttttaatagcaaaaactgtaatttcttttgcaccaacctacacatttttcttttaatgagatgataagcatatagagaggggtcttgaaacagctagatgccttttgtgttattttggggcttctaggctgcctttctgctgccccctaaccctcccttcatctcctcatccacacttttacaataaccccaaagctattattaatattaaggaccaataaaaagttggtagaatttagagagattgaaaatattttttatttcagtgaaagttaaatatctggtctagagaaatactcagggtataaatatgtcaatactttcatggctgttctcataaaactcagctccaaattttagctaggaaaaaacagcagagtgtcgatgaagagaagaatgaaatttcaggattcctgaatgaccactaaactaccaatgcatccaactatgttacaatagccacaagcaccggcaaacagccagccagccaaaggctgtggcagcaacgtgggctgccaggacccttgctccggccccatgccttgctctctttccataaagggggtcatgtgatacaaccgtggcaatgccacagggcagaatctgcagtgagttcctaaggaagcttttgcctccctctcctcctgcatgcaatggggagctgatggctgcagtggctgcaacgtggacctgactatgaagcaaagggggagagaactgcagacgagctgccttcacacaacatcatgaatccatgccaggaccacgtaccccgacctttttgttatgtgaggaaaatcaccctctctcgggtaagcatctgtagttgggttcgtgctgcttatggcctccaatagcctgaatggtaacacacacttctcaccaggactccctcagggtctcccgtctctcttctggccgctctctctccccagccctcctcctagctaccaccccttgctgctgatgcactgactttgatgctctgctgaactctcgtgtggcctgtcaacttgcctgaactccctgtcctgctctgttcatttttactccctcctgacacatagctctgtgtgcttctttatttggtagcctttgcagctcagagtaaaaggtatttcatttgcgaaagcaacacaacacaacaggtttgcctcctgctctccctgcaaggggaggggccggactcatcccatcccttttaaactttaaaccactattaggactgctgaagggaaaattagtgtgtaaaaataaaatgtccccagtgatgtgcacacccatttttccatgtgttcttttttttttttttaattatactttaagtgctgggatacatgtgcagaacatgcaggttcgttacatagatatacacatgccatagtggtttgctgcacccatcaacccgtcacctacattaggtatttctcctaatgctatccctcccctagccccccaccacccaacgggccccagtgtgtgatgttcccctccctgtatccatatgttctcactgttcaactcccacttacgagtgagaacatgtggtgtttggttttctgttcctgtgtcagtttgctgagagtgatggtttccagcttcatccatgtccctgcaaaggacatgaactcacccccttaaggctgcaaagtattccatggtgtatatgtgtcacatttgctttatccagtctatcattgatgggcatttgggttggttccaagtctttgctattgtgaacagtgctgtagtaaacatatgtgtgcatgtgtctttacagtaaaatgatttataatcatttgggtatatacccagtaatgagattgctgggtcaaatggtatttctggttctagatccttgaggaattgccacactgtgttccacaatggttgaactaatttacacttccactatcagtgtaaaagcattcctatttctccacatcctctccagcatctgttgtttcctgactttttaatgatcaccattctaattggtgtgagatggtatctcattgtggttttgatttcatttctccaatgaccagtgatgatgagctttttttcatatgcttgttggccgcgtaaatgtcttcttttgagaagtgtctgttcatatccttcacccactttttgatggggttgattttttcttgtaaatttgtttaagttctttgtagattcttgatagtagccctttgtcagatggatagagtgcaaaaattttctcccattgtgtaggctgcctgttcactctgacgataaatttctttaggtgtgcagaagcttcttttggtacttaaaatatttttagtactgcattggcaaatcaggaaaatgctgatgagaagaaaatgtacttgctccgttattaacaatctacatttcgctatacctttaaaacagactcattgaggttttagactcaattactgtaaagccagcatacagtgtatgggaccaggaacttgcacactgtgtgattaccacagagttttcagggaggaatataatgacaaactttagtgagatgggtttgtggtatttatattttttcttatttctttttagctaggtgtttctcatatccaacataagtggaggtttgaataagctaatagattatacaatagatttgaaggtacaaacatgttttacatatgaaatggcatgggatggggggcaacctattacaatcccaggaagccagtgccagaactgccaatcggaagatatggcctgggccttcctgttaaatcggtagattccttgtctattagaaaatgctttaatgtactcatcaatgaattacaacaaaggaaaaagactgtgagaaagtaaaatccttaaggctcacctaaatctgaccaaaatgtgcaggtagaaccagtgtatgggacaccaaacgggtgctgtacctctccacttccacactgaagcttggaattatgtatgatcataagaactactctgtgttcatgacaatttgcttaatcaatgttactttggatttactacacatgttctagcaaactgcaacatatatttttttcctatcgtacatgaagtgtttggtgtggaactttattttatatcccatgctcgttaattccctaagcacagctcccatttttcaactgctgctttgagaaaaggagttatttggtttgataatcctttccctctcctgaccttgttgccccaggatatgaacaacttcaataagcaatgcacaagggaagtactttgtgttttgcccggaaagccacagaatctttgaatgcaacagacactctctcaaggtaaaagactatgtccaaatttttttttgcttgcccaaatttttccccagcttttccttttctctctcacttttctttttccagaaaaataccaaaaaattaaactaaaggtttattctcagtattatgcccaaacctacctacaaacaatacatcaatataagactaattgtgcataaaattcaaattctattgcactgccgcataaaaatgcaaaatgctacagtggtataatgtctaatgctgagcccagttccataagagctgccccaagacagcttgtacagatgcaattatctctcacacactcaaactgctttctttcacaacattacttttattatgcaaatgtataaatctaattttaatccaaaagaccatctagaagattaaaaccgcactcgtgtcttactttcactaagtgtaattaaagatactaaaaatgtttttcactggaggaaggattttagccaccaggtcaagaaaccacaaagggcgccatggagctgccaagctgacttcgcattcatcttcattcttgagtggttctggtgaagcagaagtgatagaaaaatgagccacagtagcagcagttttcggcagagggcagcagatgctcttcacttggaagagacagaaagtcctggcagagcctgaagtggttctgaatccgccgggtctgaaaggtcattttgttaatcacaaaaaggctgaagatctacaaggtagcaaggacacagattgcctggtttcacagacatatggtcaccggcacaagaatttttggcaagcctgtaaagcaagcctttacaaaaactgtcttcattaaaaaaaaaaaaaaaaaaagagtgacgcaatctcgatgcccagagtagctaaggccaccatagggaaagtcatttgctaagctgctttttttttttttttcttctccttactttcctgttttactgttctatatccaggtaatggtagttacagcagaagttttttatttttttcaataggtctatcaataattgttacactataaacttttcatatgataaaattggtaataatgatatctatataacaataactaacatttacagggttcttacttggtatcagtttaagctctttgtatagatagttttattttaaatctcacagtgaccctgaaatattactattaccatttcctaaatgagagaactgaggctgagagagcaatttatccagtcacacttggtatgaagcagcagtagcccttgacttgaattggggtctctgagacagcagagtctagaactgtaccctccaatatggtagctgcaagccacaagtggttatttcagtgcgtctatgctgaatggagagaggactgtgaaatacatgctggattttgaagactctgtgtgaaatcagaaagtatctcaataatttttacatcgattacatgttaaaattataatattttggatgtattaggttatataaaatatattattaaaattaacttcacctttaatgtggctattagaaagcttacaattctataattgtataattggtacacattattctttttttttttttttttttttttttggagatggagtcttgctctgtctcccaggctggagtgcaatggtgtgatctcagctcactgcaacctccacctcctgaatttgaacgattctcctgcctcagcctcctgaagtacctgggactacaggcatatgccaccatgcccagctaattttttttttttttttgtatttttagtagagatggggtttcaccatgttggccaggctggtcttgaactcctgacctcaggtgatccgcccgcctcggcctcccaaagtgctgggattacaggtgtgagccactgtgcccagctggtacacattatatttccattggtcctgttggctttagatccttgactcccacgctgtacagcccattgtcccaagacaccttcttcctcgccattctcaggaaaatgaatgacgttaaggaattctgtaaaatttctcgacctgaaccttggtagttcctctcactgaattgatttgtttgataggaattatgtcggatgtaggtatcacatggaatggaaggaggacagaattcagggataagagggaagaaaccactactagcatcacctctcactgtgtagacaggaacatcagaggaatccgaatctccactttgcatcgacatttcctggacaggattacctctcaactttaagactccaacttctagagtttacatagattattggtcaggatagtaactaagggatccaatgcgtgaatatttgaacaacctacagtcatggaaggaaaatttttgttttgattcatctatgttaaaaaaccttcaagctcttcttggcaagcactgggccagagacaacgtgtctttggtttacagagaagtttccccatctttttcttttatcagcacatctctttcatttcaacaaagattctcaaccaggaaatggtcaccatggaaggcagtgagatggaggataggctgtataattccgatgactatccagggggattctggcaaggtgcctcctgtccacctttatgttcggtgcttcaagggctcacttgagtttctgcattcttctgttgatgcttaccatcaatgcccctgacagcctgggtgagggtgcaggggagaggctcaaaggggccagggttttgctgtctgtcatgtgccactctattagtcaggcttctccagagagacagaagcaataggatagatctttaggtagataaagatacatatatgaggggagatttcttagaggaattggctcatgtgatgatggaggttgacaagttctaggacaggccatctacaagctgaagaccctgggatgctggtcgtgtggctcagtccaaatcccaaaaccttggaaccagagaagctgatagtgtaattctcagtctgaggctggtgggggttgggtgctgatgaaagtccttgagtcccaaggctgggggtcctggggtcctgatgtccaagggcaggaggaggagagtgtatcccagctccagtaaagagaaactaatttgttttcctttgtttttcctctatataggcccccaggagcctgaatggggcccgtccacattaagggctgatcttccccttccccaatcaatccacttggactcacatcccaacctcctctggaaacaccctcacaaacacaccccaaaataacactataccagctctctagctattccttaatccagtcaagtcgacacctaaaattaaccattacagccgcacattttggttcataggaaagaactttaaagctactgatctagttaaccttgctggtcacccataaatgagaaaggatgtgaatcaaggaggaaggagacgtgctctacaacataggccacccacactcactcctagtatgttaccaagtgacaaattcacacatcacattccattgtagaaaaaaaagtcacttcttaatttcctcaatatctgatctcaccttccgcttaagccaccctctgtttttctccccagagaggatgccttaccacgtgtatgccgcctatctcagtatctgctggtgtaacgagcgcttttggtacctgttaggccccccgtctccaactcctcgcacctcctttccaaggtggtgactgggtcctcatggtgagtgagaggaggggtccccaggctgtttgcagatggggggctgccctctattcctcaccagctgctgcagtagtggtctccctgtcaccacctgctctggctgctaacttctttgaaaagggaaagttctctctttgcttagggctgtgtagcctctgaagatctggccgccattcccattcaattcctgggcacgcaggtctgccccgtaggctctgatggtaggctccgtttgctcagtagccagcaccaggcctgcccctttccagcgacctccctgcccctccccaggcccctaaaggaggttctgggagctgtgcccaggcattctctacctgaagccactgtgctcctgcctggccactgctgcagcccccagcaggaagcagagccacaagccctcacctctcatcctcccccacactctatgcagccttcttgtcatggacacaggtcttccctccaccccacagtccatgtgagcctgaaagagaggttctgttcctcttctgtctcttatctgaccagagctgccactacctcatgccctctcctgggattgtattaactttaggcttctgggaaagttgatttatgaggaagaggaagagtgagaaagaattggagaaacaaaagaaatcagagaacttgacaattttcttgttccttctgaaatgaattttcaaggtgacttattattctgtttaaaacactaaattctcagaatgctatgtacttcttggtgctaacaaactgaaaaagaatcacacctacatcaaacctatgcagtttggaaatcatctgctcttgtggctcatctgcgttgctcacttgtcttggcaaaagcatatctgagttggcaatgtctcttttcttttccgctttttcttaggctgtctatttcatgtgctatagctatttacaatagattgcatgagccccagcctgtttctaagaaaaagataatagaaaaatgtgtataaaattgtaaaaatacaatcatgtacaaagccatagttaacactcgagagcctatgggtgagtccactgagggcacctgccaagacccttaaccacagaagtctgagatatccccaagctgggactcccattactttccctattctggctctctggtgtgcttcctactatgatatcctagtttttctgcctctcttcaaccatgttttcccttaaaaaagatgtatatacagacataagtcttgtaagtgaatgcataaataatagatacaaaaaggattttattgtagtattccctagcaacacaaaaatatgggtatatacacttccagtgtcacattattcaggatgtctttttaaacagtataaatattatcctcaactgtaagcaaatatagaccagtaagggagcgacagacagctttttaaaaactgcttttttgaaaagcttatccaaatcaagcatttgttatctttttgcaatgtcaacagagctcttgaataaaatattagattatgcccctgctttttaatctgaaagtcatgtgggttttggttttgtcataactaccttagtgcctgtgtatactctctaacacccattattttcctaatgattttatgaaactacattggttttgcagatgagccaaaaatgggtaaaaaggaaagaatgaagacataagtaaaacagaaaacatggctttggctaagaaagcaccttttcttgcactgtgctttaatattcagtaaacatttggttacggttaaaagaaataagaaatatgtatgtttatattgaactggctaatttaatggctgctttgacttctactaaagggtcatctaatatttgataataaacacaacacattaatttttcacttttctttgaattacgggaaggaagtcttactatgaaaagcctcattatgaaaggcctcagtctggtctcaaatccgcagaaattatactctttcctcttgacatcttgtaataaataaaactgttaatattttgactttagacaaatttctcttttgctttcagcagctaacagttacaaaaagagacagtgccacattagttacagtaatttactttggggacaccagcagaaacacataaaattcattagtggcgccaaaagctatttccagttctaataaaaaggctaaactacaatttatgaaacgagtcttaaaactttcctgaagacagaagagttgagatgatctttggaataaccaaagcaagaatccctactgtacttaagccaaaatgtttgttttcacaataccgtaacataatgtgttaacattaaaatactttctcattgccaaatgaatataaactggggagatgctctctcagctcatgctcttggtccattaagcccgggttcctgcctctggcagtgtttcatgcttcaaagaaaggcaacaacaacaaaaaaaccttataagcaaaattagaataaatctacagctcttatgatcaatcatgcaaggttagcactgggagaaaaacacattcgcttctgtttcccataggaatcgcatgcctctgactttgagaccttgggaaatacattttcatcccacaggaaactcaaggttgcagatggacacacacattctactaatatcatttttatttaaacagtttggtctgataatttattaaaaagtgttccctaaaggaatgatgctgctactaaaaacattttcctgaattacttttaatctaaaaagtgcttgagaagaaagctggaagatacgatagttgaattcctacagaagccttgccttctattaataatgaacacaaaatatttggaaaataagacaatggaaataaattgaaataaacaagttggtctgcactggtctttcttagaatacattatgccattcaacacttcttatttagaaatgtctttttccaggaaaagtcctatgccctttttaaagtagatgactttcaagctactataaagacacatgcacatgtatgtttattgcagcactattcacaatagcgaagacttggagacaacccaaatgtccatcaatgatagactggattaagaaaatatggcacatatataccatgcaatactatgcagccataaaaaaggatgagttcatgtcctttgctgggacatggatgaagctggaaaccatcattctcagcaaactatcacaaggacagaaaaccaaacaccatgtgttctcactcataggtgggagttgaacaatgagaacatatggacagaggaaggggaacatcacacatcggggctggttgggggatgggggcctgggggagggatggcattaggagaaatacctaacgtaaacgacgagttgatgggggcagcaaaccaacatggcacatgtacacctatgtaacgaacctgcatgttgtgcacatgtaccctagaacttaaagtataattttaaaaaatcaataaaaaataaagtagatgatttctcaattatttcttctgcatataacccatcgttgaggggtaagcgcagaggagcaatgtggcggctacgtagaaccacttcttaaaggggagagtaacatctaacactcgtgctaagatttccatgcaatcatgtgcacaaattgccagctcagggctcagcacacaagtgtaaaatttaaaaatgccagaacatttctgctcaggcctattcataggccaggcctccttaggtttattgatacccttcccttagtcacaaaatttccttacaaagggcctgtggaatagcagttggaggccaaaggtctggccaccacctaataagaccccacccaaagtcatccagtataagaagttggtttcattacagtataaagtaaaattaaaggctgattaaaagcagcagtttacatctgtacatcatctgatctaatttcctcattcctgatgaggaaactgggccgtagacaggctaaacaaattcctcagaagttaagatcctatatgttcctggtgcggttcactgtgtattcctcgccgtgcacacagtgtcaggacagggcaggctccaactccttactgtttggtgaacgaataaggagggaaccagcctgttttggcgtaaccagcttactggctgtgcggctgttaggattcagatttcctgtggctttttactctctactacacttaccaaagaaaggatggttctggaaagcatcacagtgtgacacagatcaagtgcagaccgaactaccacccatgtgtacacgaacaggggccagtgactgatgatgcttcaggtcccgttagtgggcgccagtccttccttcaaccattaaagaaaaataaagggaacacactgatattttttcctttcaactgggtgcttgctgacctcagagtcctagggcacatgtggttgccagactgaaagaacacggagcgtgtctggaggatgccggcaaagctgagaagccaaactctggctgcatccactgatatttacagctttgccagcctaggctctgctcccaccactcttgggtcagacccgcagaccctggccaaatgatggatgaacaaatgcactcagacacagatatctagtgaaagagtgggttagggaaccgggccgcttacagaccccaaggagggtactgtaaagagtcagcagccacggctggctggtgccgcaggcatttattcagcacaaatttaatgacaaaggctttgagtcaacacacttgtggataattaacatggtcaccctccccccaccacccagagcagtcctgctcgcagacgattaaaggccaggttctggggcctaagtaaactcacttatctagatcagtttctttacatccccttgttacctaacctaagctcttaagagaattcagctgccttcagccaaattttctttagaagctttgcaaacccctggccttccaaggtttgcatctttctacaattgttcccaccaccctgaccaatctcctacacaccacaatatgcattttctcaaggcattctgctgaaggaggtacagcatcggagaaaagcctaggaaacagagggccccgactgccttatcagtcatgctaagatgatcttaccaataatgaaataggatctactattatgtgatctaataaagttatacttttttgataaataattcagcaaagtttcagttttctgaatcaaagggcaactaaagtacgtattattttctgaaagaactctacctactttaccagaaagagaacaccatggaatatggtacacacatcactgtgtcatgtgatgtacagccttggactttacatgctacttaaaatggattaaaaacagtgtttactataaagaacaagaggagtgtagcaagtgtcatcaaatgctttcataaagcccatcgccagacagtcagttacaaacactgagaagacctccaaaggtctttatttgtggcggagagttctaggaaagatgggtggaacccacaccaaaagacgtgctgctctttggggagaatgagtggtgtttcatgtctttagctgttgatatgtttgatccccaattcagggagcaaatggccacatcttttgtgtggaccccattggtgcagagatgagcctgttctatgactgcttccaatgcaccagggtgactaggataactctcagtgtatttctgctacatcaccttgcccttcattcagtaatgatacaaagatggaggttttcaattaaaaacttcacttaggaataaattgtgtttcatgggtttatgatgccctaaaatgtctctgagaatttacacttccttttttattttttattttttggcttgtgggtatttgctttgtgggcagctgcaaaatcggtattagccaaaacaaactgataattaaacaaacaaacatgatggtgtcatgtatcatgtcaattagagtaatgttggaaaatggaagtatacaatacttctaaatattgatttattgctctcctttttcttattctatagaaaaactagattaaaaaatcaatgtcatttacatgattttagtccaataaagagtgtaataatttggctgttcaattaatttggtttgaagaaatgagtgtcttagtctgctcatcctgctgtaacaagatactatagactggatggcttataagccacggaaatttatttctccaagtctggaggttgcaaggccaagatcaaggtgatggtggagtctgtgtctgatgagtgctgtcttcttgctgtgtcttcacacggcagaagggatgagagggctctctgagttcccttttataagaacactaatcccattcctgagatctctaccctcatgacctaatcacttcccaaaagtcccatctcctaataccatcaccttgagggttaggagttcaccatatacattttggagggacacaaaccttcagttcatagcagtgggtaaacatttagtgcttgaatatttgctagtgaaaggattaaattccaactagccaagaaggccacaagccagcctttgtagagaagtagagacatagcacttagaagagggggtctgacatctccagagctgcgccagctcttactgcagtaccgttcattgttaattaatgcattcactcattcattcaacagacagaatcgcgcagggctacatttggccctgtggggatgtagaggcgcgtaataggcaggcccttgaggcaggaagccaatgagagtgtaccatgcatgcagataaccagagtgctgagcaggcaatgaagagaaccattcgcaggacacacagctttaattaagtaatttatagttacgggaaatcttcaataattgatatcttgtaagtgggagctgaaacataatgggcaggcaaaggagtgcagaaggcagacacagagctggaagacactaggcactgaggaaaaccagcaccgaggaatggcgtcttcgtggagcatggactggatcaagggatgatggaagaggtggggaaggcaggctagggatgctcatgcatctgggctttgttcaggaagcaggacagactccttgaaggcgtttgctcaaaaatgggacctgatcagactggtgtttcagaaaaatgactcctgtagacatgaacagggtgatgtggatccaggagaagtttagggcaacgctctcagccagcagaatctaactgagaagcaagggaggaggtactgacatcggttagggtgcagtcaggagcgatttcagaagccgcactacaagcctctcccctgcaccccggcagttgctgcccaatcacccctccctttcacctcacctctcccaacccaggctccacattccatcagtcaccgtttaacaggcatccacatttagcccttctgcttaaaacctccactacttgacccgtgaagtcagattatccagtggtcacaaaaggcaccctatacatgactctgccaacctcccacctcctgtcttgcccttcccaggctggccctgaaccacggacgcttttttaatgttttccatcctggtattctcacccaaccatcctccgcactctcgctctgcctgcctccttccccacccacctagcaaatgccaatttgatcttcaggaagatgctgcacataagctcgtgctgaagaatccagttaatgtgagtggagcagacctaaaatcttggggcgatagtggttacctagtgacccacatctttgtgatttgctaatgctgataaaagctttgttgacaagccctttcaaaggcactctgcttccactctgtgacaatagcgccaggtctgagtctctagcttaagggtttgtgaaatgctttcaggtttttcactgaaggagttcacaagctttggtgcaccctgagttgagctgtgtcaatgagctcacatagcgttcattgtgcttacacacccacggtatcataataacagaagccttttcaattttcaatttgattgaatttcaccctgaaaaggcataggtttttactgtgtactagagtaagtcccactcttccttgggaaactcataatataatatgaaagcagagcctttagggtctgaaaaattgagctttgaaggtctgacaacacctaccatctacccaaggaactgccgagcacccaccaataactccctagtttgaaaacgtggccaatcagcgcaactctctgaggctcagcttccctgtagagccgtagatgagatgctttgaagtaactggcacttgggtgacacacacggtatgtccccaataaatggaagttaccattgacatagtttatactgtcatcataatagaatttcagaactgaaattaaataaaccaaatttatttaatttaatgagtttccaaaagcagagagtatcttaaatcttcctgtacttccaagaattacattgttttaagatgtcttttaaagcagtttcagaagtaccagtgtgttgccatttaccagagtcaaattcaaactttcacaaattcatcatctttaagttatggcgctctctggataccctctccgcaggcatccacggttttctcttgtcatcatcatcatcagtgaagatgtttgtcccccaccatgtctagggccctagactaggcactcaggaagagaagcagtgatgaatcaaaaaagacacgtggttctctgccagcaaagggcttgtaaaagaccacacagtgacagtcaaccacttgggaaagaaccacatgacacaggaagttcgagtgtctaaatacaaaaacggttttcttccaaaatgttagtcacagataaaataggatacagacaaaaacaatcctttaagggctgtttgcatccccaggggtgtttgcgggcagcactaccccagaagggtggggccacgctttctaggcaggctgctcctgctaccctcttggaactttgtgctcccagccacagccatggaagaggaagagagggtgggagcccagcaatggttgattgggggtgagtacatcagaataactctgccgtagcagacaggagtgcccaccatgtgccatgcatgagctagtgcttactgaaagccttcaacattgtgggattccatagatagaattttttctgagaaacagttttctgatggttgtaaaggaaacaaattctttaccaagcatttaacatctgcaaagcactagagtaccaataagctctacaagacccgaaatacactagagtaccagtaaatcatgcaagactcacaagtagctcagtcagactggtaagagacaagacaggagaagagtagctttgccacgtgttttatgcaaagtgtcaagtgacaggtgcaacaaatccatggcacaaatatcacaggccctcaaaagcaatgagtgtaaatagaaaataaaataatctggaaaaataattgcctatggcataaggcatcttatttatttaaaaatgtatccatcataatatgaggatgacttcaggctatgaggaatttattggacagttttcattcaatggggagataaaaacgctttttgaaatgtcttgctatctgtagttagaggaatatcctcctcttcttacatttctatttcattttctatatgcagttgctaggggtacgcacacacccagacaaacacacacacacacacacacaccccacacacacacattcctcagggctttttattcattggaaatttgccatagctaaacacagccactgaaataaaaacatatcctgacatgcattcttacccaatttatcccatttaggactgtagaaagtatctgggaagaaaaactaataaaaaaatgtgtaagtcgttaactatttcttgttgagttcttttccccccagcagtacattaaaatggtctgtacaaattgatagcttcagcattcaaagtgcattaaaataagccaaaccaagactgtgcaccaatgtcagagagcagctcctgtttccaattaaaagagactttccagtggaactgatgagtcatggctcaacatggcagagaggtcttatttatttttttcaaattttctttttagttttaatgatagtcacagcgtcacacatttttgttcattagcatagatggggcctaaggttacaaaagctgtggtaagaatcgtccttaattgcaagggttattctaggatttacatgagaaaaaaaaccccataaatggcaacccaggcagacacaggcatctgtgagcatcttataaaatatctgtaactatagtgtaaatggcaaaacgttatctagtcttttacttaatatgacatttgggtgaaattgcatcttgattcatttgatcttgctgtttttctttaatatgaaattagaaaaaagtagtttcacttttgtttttagtcacattttgaaataatagaagtcaaaataaatccagttgtctgaaaaatgtatctgtttctaaatattctataaaccattggaaactgtattagtccattctcacactgctaataaagacatgctcaagactgggtaatttataaaggaaagagatttaatttattcacagttccacagctctggggaggcctcaggaaacttacaatcatggcagaagggaaagcaaacatgtccttcttcacacggaggcagcaaggagaagtacagagcaaaggtgggggataccccttataaaaccaaatctcgtgagaactcactcactatcatgagaatagcatggaagtaaacactcccatgattcaattacctcccactaggtccctcccatgacacatggggataatgggaagtacaattcaagatgagatttgggtggggacacagtcaaaccatatcagaagctttgcagatcattgtctctctctgttagacctatgattatctaattaaatttctattccaggctttgctgtacaaacaatactgtattcatttggcacaataaaaattaaaacagaaatatttgtcccggaaaatgtaaaggtatgaaatacctttcagaaaaaatgcatgtgtatttgtgtgcatgtctgactgcacacacatacacatacactcccaaaggagataatttagttggttttctttgttttctgattgccaaataaatttctctgctgaatacattgcaagtctaccctcatgattccagtttgtcatactgtgtttttatattccttccaattgaggatgttatgcctaaacatacaatgttccaaagagtctacttcacttcatactatattccccttagcaacattgaatccttaagacatccgttaaaagtcaggagcattcagttaacagcttaatagggttgggatctgtagaaatttatcaaacaaattaacattattgacttttaaacagacactgtagacagtttcaaagaatatcacgaggattttgtaaaagccacatcatactgtggatattaaatattcctggtggaataagatagctggcacagttaaaagaaactgagatattgcaaggccaggagcactgctctcctctgttgcccatgaatcttctaaggaaagaaaagtgctttcttgccacttcagagttgtttttggtttcctgaaactgtcataatttaattaaagcactcagtgtcctgcatatgtgacaccatctagttgacagaatcattccactcgatttttctaacaggggacaagatgcaggtgccaggcagctgctcatacagtatgagaatgggaggggcctctgtccaaaatgtctcctgtcagacgaattaaaatgattatgggctaaagctgggtgctaaaaatgtgtctgtgtgtacgtcacatgaggagggggctttaaccaaatggaaaacttaaacacacacacacacacacacacacacacacacacacacacatcccccaccccctaaaacccaagcaactttttgggactcctaagactgtaagtgagttatcgttactgatgggaatgggttctgtcccataggtgagtcagaacggagaaacggatgcctgtggcaaggcagtgttgtcagagacagaaagcacatccccttgtcggcctgtaaccacaaggtctggatgagctgaataaaaagaatagtagacacccctggtgagcgtccccgcagatgggctcagtccccctgaaggcctgtagcagggcagcgggagggccttctcaggctgagtgggacctttccataggcagacggtgctctgagcctcctgtatacagtagaatgggctcagcactgacctgtggcaactcatgtaatccccacaagtatctccatcttacagacaagaaagtgtgttcttaggaaagctaagcaacttgctgcaggtcacacagctagtaagcactagggtgtttccaaagcctaactgttcaatagcactcttactttctactcaactcaccccaagaacaggcacgaggactcaaggagagctggggatcacctggacacgaggatggaagttgaggtgggctcgccatcctttggggttggtcttcccaggagagaagagccgtggaatttacctggagatgctctgtcttgggcctcaccaatttcgaatttgttcatcataggctgccctccacattagtaggcttcaagcaggtcataagaactcaaaaaagtccaactaatcaacaaatgcgagtactttcccttttaaaatactttttcacaattgagagaaaggaagagaagagttaaggatctgctgagtgtggcatttcctcagaacttctgtatgtcttctccctagagcaagctgtgggcttcgcatagcatccctgttctcaccccaaagaacccgaggccaggacagtgatgttgaagcgggcagacggtgaggccgatgctccttcctcagggccgtaattaaaacgggagacttaggagctggcagaatccttgggaatcattttgtctgacctccttattggagataccatggccagtgatagttgataatttaccaaaccccaaattccttagtggtgaagtagaaaaaagagtagatttctggtttctaatccagatctctgttccttatgctgtaaataaggtgcaaacaaacaaaaaacatcaaccagaaaaatttaaaagccaaagagaaatcattttggaatatagtagaatcgcttctctacataactgactataatcaaagaacaggtagactcctgttcaaatgaatactgttagaacatctggtcttataaaatgagcctatttacatgtgctgacagatggcccacagtgaaaatgctttgctagtctgattacaacaaatcctaataaacccgaatcctctctcaggtgccttcctcagcccccattcatgtgagaggcaatctctattacaaggacatcggtgtgcaggcatttttcaataatttgccatacaactctatctgagcatcatcagacgcactacattgaaagaatcccggattttatgcaaagctatcttcattgggttttattttgctgctttttttcctggaggaggggcccggtggaaggaggttgacagctgcagaggcagtgactcagtgaaaagtggagagttccagagtcccaggtaggtgaagagcttgggggccgttgaattggtgggggattaatgatcaaggaaatctcagaactttaagtaactaacgcacttccctagacaatcctgaaagagctctaattaaaaataaagtaaatgtgtccaggcttttttgatatttcatcaaatttttgcaggaggggaagtgcttgtaagagcccaccaagggctgaatgtgaagacaggtgccccttcatccacacatgccccagggctgtgtcctcaaccctgacaccctgcaacctccttcagtcctctccatcctggtgcccccgaaacatgagtctcccatctcgagtctcccaggcactatgagcaggccgttgtgctgagggcagcacagagctagagacaaggccaccctgacaaggcactgtgctgggcatgtgatgtgctgggcacatgacagcactcactatgtcagcacaggacagcctaggggagccgcatgtccactgcccctgctctatccacagctctgtgcaggatgtgcatatttgtctcccagccctgatttgtgggcaggaggctcagagaaagggctggcaggggccagagggcaggagcagcgggcaaggctctccctgccacctctcgcaagggggctgtccattccggagacactgggccggacctctgtggatataatcccctgtctttcaggctgctgctgcagctgctggtgaacagtcatggcatgggggctgctgtgagtgaaagcagggagcgtggtccttaatgcacatgcgggagtgcccctttgatacagagttcccctgacttaactatttgcaacgaaagagccacttgctcctgtttcggaatgcccatgggaaggatggaaatgccaaagagcaaactcacaaagccactgtgggaggctgaggcaggatgatcgcttgaggcaggagttcaagaccagccagggaaacatagccagaccctgtctctatgtatatataaaaaaaatacaaagtcgagattaaacaggaggcccaacagaaatacaggcctgtggtccacacaggatgtttacaggctgtttcagagcttcagtccgacctacagaaaggcaggaggagggatgaccggccgcacgtcaacagctgtaagcacactggagaactgcctgagcgctcaggtctgttcatgttcattttagatgaagttttgcagaaaaagaacacctgttaccaaaagtgccacgccatcacataaaatgcctcatcagaatgtatcagccactgcagctctgagaggctgatggagcacgacctcataaaaggcttgaaatgaagcttaaagtaaatccctgttggtggaagaggtaagatgtttttataaaccgctaaatcatgctgaaattggaagtgtgtctgctgaggatctgaggtttttctaaggtattcatgcatgtaggaaatgcttctgagggtcccttcaccttggtgacaccatgcttctgcaccgccacttaaatgtactaggtgtgacttgggagtccattaacgcctggcaggcaaggaggttacatcatgggaatccatttcattaccataaataaatgtcatatggctgccatacattttattgattaaactgtcaagaacaaaattgtgtaagaacaaaaactttttattcctgtggcaaaaaaaaaaaggagggaaagaaaaagaaatgaaaatatctacataatttaatgtctctggccctctaacttcttacccagaataaaagaacaaagcccagcttactgctcccttggaggctgcagcacgacctgcctttcgtgtttctacagaacaaggtagccttttctcctctgcgttcccaggcctgttgtcaactctaaagaattgcttaaaagcacctcttcaggtagtagagcttatcttgagatgaaactaaaaaatagactcatttgccttttatccttaaaaaaaaaaaaaaaaacttacaggttggtaaaaagttaagttctttggattggccccaattctgtttaggatacagtttttctgcttcccttacttgagagcaaatagctgttgacctagaggcaaaatttgggcgtgctcccagaggggaggtggcccaatccaaggtgactgatcccaagtgtgactggggcaaaggtcttgatcccaggtttcctgtcaaaatagctagaggtagagttggctttccatacagtcttaaacttttttctcttgtgcttgcttttatttttctatccccttattgggccagggtattttttttcagtccaaggacaaacaatgcctcccaccatcacagataataattacaaaactttacctttgcacagagccttgcagtctgcagtgatattcacccctggtttttttttttcgagactgaatctctctcttttgcccaggctggagtgcagtggcacgatctcagctcactgcaacctccacctgctgggttgaagccattctcgtgcctcagcctcctgagtagctgggactacaggcacatgccaccatgccaggctaaatttttttgtgtttcagtagagatggggtttcaccatgttgcccagggtagtctcgaactcctcagctcaggcaatcttcctgcctcggcgtcccaaagtgctaggattacaggtgtgagccatcgtgtccggccacactgctgattttcttaaacaatcttgtccatctatgaaggcattatttatccctgatttacaaatgagacagaggctcagagaatgacttggcagaggtcaaatgccaggaagtcctacagctgggactagaaatccctagtaatatggtttgactatgtccccactcaaatctcatcttgaattgtagttcccataatccccatgtgttgtgggagggacccagtgggaggtaatttaaccatgggggcagttaccctcatgctgtttttgtaatagtgagtgagttctcacgagatctgatttttttttttttttttttttgagacagactctcactctttcagccaggctggagtgcagtggcacgatctcggcttactgcaacctccacctcccgggctcatgcaattctcctgcctcagcctcctgagaagctgggattacaggcgtgtgccaccatacctagctaatttctgtatttttagtacagacggggtttcaccatgttggctgcgctggtctcaaactcctgacctcaggtaatccacctgcctcagtctcccaaagtgctgggattacaggcgtgaaccactgtgcccagccgatctgacggtttttcccccttttgctcggcacttctccttgctgccgccatgtgaagaaggacatgtttgctttcccttccgccataagtgtaagtttcctgaggtctctccagccctgtggaactttgagtcaattaaagctctttcctttataaattagccagtctcaggtacaactttattagcagtgtgagaatggacaaatagacctagtctccaagtgcagagctccttctagactctgctgtggtcaaatgaccattggggatcagtccaatgaccatacaggatcgagtacgttcacatcttgaaaagcaattgttagcgcaacgtcggcacactctcttttctggcttcatctttccccatggagggtcaccaggtagcagaaacactcctggcctcgcctgtactcctcactccctcttccccaggaaaggaaaaaggagtgtttgaaatttgggagctaaacctggtggtaatgctcagccctggtcctcccacctcctcaaccctgtttgcctgcactgtacgctgcctggactgcacctccgggaaatatgtttgctagagacagcccagccccgatccagccccatggagagggaggcctcaggtgtctgccctgcacaggactagagtgagagccagcaccaaccctctgtgtatctttgccacattctccattattagtctttttagtcacagtcaactctgtctcagttggttcagaactcaggcaaggaggaggggctatttattggattccctcatcctgtaacacaaagcagttgatatttttgcacaaggcgcaatgcctaccaccccatcaaattctgctctgtgggggactgctgactgtgctactcagaataccatgaggctgcttctagtaaaattctttcccagatgactaggggctccagagagatttcattcaaaactgttggcaagtccccagggggcttgagtccttcaagaaccagagctcttttaacgtctcctggggactgcagtggtcttgtgcttaggctaaccagcactgtatgtattttattcttctttcacactttttgtttatttccaaccacttaatcctttttccattaaaattatgcaaaagcctcactttcctcattcatatgaaaatactttttcttctcttccacccccagttttctggttgtagttttactcctaaaatcagcaagacttgtttcacataatgaaagaagctattatacgtcttaaaaacttgcttttcattagcttctaaaacatatacagataaagtgaaaattccaaaactttatggagcattttagttttatgtggtctggaaggcactcactggggtagtcttggagcacatatgggcacctgggcagctgcttatgcttagctgtgtcgcacagacagatgtgattattagtgtcaattagtctcaactggtatgaaacaagagacaacgagatatggaatacaaaatattggcctacataataggttacctcttcagcttgagaataaaaagggagtatatcccactgggactctggcagcagtggtcgacatcctattttttgaccaggcttgagttgacagactcagccacggcctttaccaccgaggtttctttcaggaaaggaaagacaccaagtgaagggaaactattcaggctggtggcaccaacagcaacagccacatcctccccagaactaacacagaattgctgtattttacacagttttctcaggttagtgtgatcaactggagaaaaaaagctaacaattatatttctgagggatggaaataaagtttaaagggtgctgtgctgaataaattaactttataggaagggtacgtccagtgatctttcgaagccctgagctcagcaagaaggctggaaagccggctccctgcaggaatgaagccacctttgcgaaagtataactgagaaaattattatagtgaaagagatctgaccaaaccaactccatcttccttctcatctccaagctatcattgttcattcccgggcataggacaaactgactttgggagaaacttagttgataaaataactttgaaacaaagacggtaacagcccttttccaaaacaaacccccttcctgcctagggactagactgcttttgcaggacacaataaattagctacaaggttagaaatgatggtttaggagtcatgcagctggaggctgcaaaattctcaaccttctgaaattgctcctgggtataacatcattattgtaaaacctaaaatctgtgcttgagagattttgctgaccctgcattcaatggatcagttgggaccacccagatggataaagtggctcatctggtcagaaaatgactcagcacaagagggcagctttgatttcatttctccctatgatttcatttctgaccaaaccaatcagctccccacttttcaacttcttacctaccaaattatccttaaaagtcccatccccgagttttctgggagactgacagagtaataataaaactctggtctcccgtacagccagatctgtgtgaatgaaactctttctctattgcaattccccagccttgataaatcggctctgtctaggcaatgggcaaggagaacccattgggcagtataggatgaggaactcaaactcttcatctgatattttgcatcatattcagaatactttcacagccccaggcaaaaaggagtgtaacaaaggcaaagtgccctgtggcgcttaaagcttctgtgccatacaccatcctgatgggctgggtagtaccattcctgtaaattcccttgcagacaacattaaaaggcaggccacctaccaatgaaccaagctcattaccaaacatttcccaacaatgttgaagtttctgctagtgtaaagagtttacatacttcttttcccctccagtgtggggaagcaattctctaagaaagaagtttaatttatgaatgtctggctgccacaaaataataaggattttcccccactactgtagattaaattatcttatgaaatggattagaaagcaaagggtctgtcttatttaaaataataaaaagaaaaaatctttccaagctgatttgaaaatctacctagaagtcatttagctgtctgttccttttgttttagtatttccatctatcagggaattagttttgtccataaatgtaatcaatatggaatataaagtcatcaaattaaaaaatagatttagagttttcatgataaagtgtacctttaacttgagttaatacaaatgtaaattagatatagatatttgatgccttgcttattgcatttctttggtatgtgacagaaaaatgatcacagtgcttattttaattaaaaatttgttctctttctagaattattgtgatatttatggactgtaatagagaatttctgatgtatacaagaacacaatatcctctttcattctggaaatcaaaaggaagatcaaaggagtcttaactgagttactagtcaatcactttttaaaaaaagacaaaaaataaggtgtcaggtgtaacagagaggtctaagaagtcagtggaggtatacacatactaagtacccacaaaaattttaaaaactacaacaacaataacaacaacaaaaagtcagtggaggaattgggagaagttggaaaaaagaaaagccaaaataagaatttctggtgagaagagaggcagagccaaggatagaaggaactccttactatgatgtaaatgtggtgggttaatcagaaaattgatgcatgttttattatttctaaaaacatttaaacatacacttatatagcaatcttttaatggaagatcaaagcctgttttattttttaaagcatagatctacttcttggagtgtccagtcatcattcttttaaatcagtctttctagtttctggtttcaatttctttaaagtaaaactaggacataaggacagtaacaatgcaatctgaagtcagaattggtttcgagttttagattctttcatttttatagtaattctgcatgcaaatagctcaacaatagttttctaataagcctgctttattaaatctttgcaaatcactcaacttagttttttgtagaaacacttcttttttcattgatggtttcctggcttacttgatttttttaattaaattaagaaatccatattaagcacaactagtaaaaacaggtctgcaaaggaacacaactgacttgttaaaacacacaattaaaccggagggaggagaaatgctgaagctctctagtctcaaatatttagcatgctatggacatcactagggatgtatttcagaggaactgaaggatgttggttaacttgtgagcctcttctatatacattgctaggagaacattttttatgctactaaatttagataactcaaattcaatagtgtttactctcggaaaaataatatattctaaatggacatctttaaccaaaaagttaaattcatttaaacataggccagtgaacagatattaagaagtgtatattgcaatctactttatttaggtattccaaagatgtcatataactatctctcaatagctaagatgattcagttcttaaacctggctaacgcattagatagagagggacatcagtgtcatctcaaaaattatctgaatcttgagttttataccatctattctcattaatctctctcgacccactttttactactaaaacaagtaaaattttttttaaaaaaactttcatattaggcataataataacaacaatgacatttacaaaattacttccatggcataaagtactttctccagtattatttatttcattagcattgattgaatgtctgttatatgccagtttgacatgtgaattttttttagcctgtcttaagatatcttggtggggggggccacagttcatcaatgccagaggagcaagtaaaaaactattaacttcagtagctgcttcttgtgacaactggtagggtcccgcaggaaggagaatctttcctccaaggtggctcacctccaatctcagagggaaaaagcatagtctttttgagaggggttctaactcttggctgtgagcaatgagggatgcttggagtcagctaattaggaggcttaaaatttggaaaacccaaattccctgacccaaactaaccagactgttgggtgcaaagttagggattcactcaggttagggcatttatctacagattgatcatccataaaaatggtatctggatcaggctaggaaatgcatgtcagttttgaaagacatgactcatcttgctgttattgtatgtgagagagttgcatattagttaaggatagtctttgaaggtttataaatgggaagaaagtacatttggattctgtctgtcctccctggaagaggtggtagacacgtggatttcgcctgcctggcatgtcttccggcagctacatctttccctgcccttagttcgtttgattcaagtgggcttgtctcatctcccaggtccaagtgtgggcgcctgacctaggcactgccattcagatctctcatgtcttcatggcgtctgttggcttggacatatggttttggctaagccagggaaatatagatagggaactacctgtgctcatctctgctaccacctggggagagagtctatttgagagcagtaaacatggcatgagagccgagtgaagggaagacagacagcttcgagacgtcatttgaggacatgcacccaggcaggccaacagccaaggctgcccgaaatgactcagctgcacaaataattctcttttttgttaaagctaactttagttggattctattacaatggagatcatcctgactaataaaaccagactggaagcagaagtaggggtaagacctagaatctgtccttgccaacctgcatatcatttatccttatagccaacccaggagtgagtagaattggttagattttgtttctgtgacattttatcaataagaaaaaaaaattcaaagatgggaagccaatggtccaatattagatggttaatatttggcagagcagtgactaaaacccaagtattctgactctacttcctactataattgtgcaaaatatatgactgatgatgtttcaaaatcttacggaataatctcaggactaatttcctcaataaatagccaaaaaaaaaaaaaaatgaattacggaaacatactaaccgatatttggggatgtagatgcttaacttaaaccacagataccattcaacttgtcaaccatgatctgaaacgcacttgacaaaggtatgttcaggtaaactcatggaaatcagttggaattattggtctcatttaatcattgggataaatgataacattactgaatttccaaattcctgaaaatcactgtagtcattatagcaatcatttcaaaacattcaacttaaacgtttataaaatgaaaattcttactaaaattttttatagagcataatcctataaagcagtttgattgatttggttttattcccattcaactattttgcagtttcattcaatttatattatgttagatggatgttaatgtcctagctatatgtgcatttggcattgttgcctaattaaaacttcccttaatttatcaatgaaatcacaataaagtgtccatcactttgtattgcatggacacggggtttaagagcagaataatggcactgtgccctcttcaaagtcattatacagatgaaatcatgccaacatgtccagtagaaacagtcttgaaaagggaaataagttagaaaaggccgctgtctcagccatgccagcgcaggtggcggaggaggcggcgtatcagtgacagtggtgactgcgtgtgcatgcgtggcggaggaggtggcgtatcagtgacagtggtcactgcgtgtgcgtgcgtggcggaggaggtggcgtatcagtgacagtggtgactgcgtgtgcatgcgtggtggaggaggcggcgtatcagtgacagtggtgactgcgtgtgcgtgcgtggcggaggaggcggcgtatcagtgacagtggtcactgcgtgtgcgtgcgtggcggaggaggcggcgtatcagtgacagtggtgactgcgtgtgcgtgcgtggtggaggaggcggcgtatcagtgacagtggtgactgcgtgtgcgtgcgtggcggaggaggtggcgtatcagtgacagtggtgactgcgtgtgcgtgcgtggcggaggaggtggcgtatcagtgacagtggtgactgcgtgtgcgtgcgtggcggaggaggtggcgtatgagtgacagtggtgactgcgtgtgcgtgcgtggcggaggaggtggcgtatcagtgacagtggtcactgcgtgtgcgtgcgtggtggaggaggcggcgtattagtgacagtggtgactgcgtgtgcatgcgtggtggaggaggtggcgtatgagtgacagtggtgactgcgtgtgcgtgcgtggcggaggaggtggcgtgtcagtgagagtggtgactgcgtgtgcgtgcgtggcggaggaggtggtgtatcagtgacagtagtcactgcgttcatacgcgtggaggaggcgaaacgtcagtgacagggctcattgtatggatgggtggtgtttgatgcagcctcctaagccatggatgcatttacaaatagcccctattggttaagcacagtgggaccctgggagttgaatgccacaacccaaacaggattgggatcttgagtttaggatcttcagactcctttagttctggtcccctacaatttgtactgatggttccattgctgttctagaatcctgggcacttttaaaaaattcatactaaatttggcccctgtaggaaagaaagtacatttatctgtttcaaatttatttttgataaaacacttaatttcctattggctctgaactacaataagatcagtggcaatcaagtggaaatatgagacattgaatgttgatatttttctctctgaaggaaattgtgctcataatgtaatatggtgcaggggaaattgtattaatagtaacaggttgtggaaggtgtcctacacctgtccccaactagctgtgtaacccagagtgattcaccgaacccttccctgagacgtacatccttacctataaggatttccattcagagccttttcatatattgtttccaactgttatcttctgaacagtatgcagaacatacaaaataagagagggtctgatagggcatgacaggggcagagcaaaaactggttaatagcatctcgtcgacaggcgtggctctctgcccctgctcaccctgcagtggcttcttcagtcagggctaaggtctctgagcagccatcgtgcagagtgtgtgaagtcaataaatatttaaaaacagagcatagtaagcagagatgacaagtgcagccaccaccacagctcagtcaattaaatcctgctgccagcacaaacttcctgtgtttaaaagtgcaactgggtatgggcccatactcagagagtatattccttgtcaacatttttttttttcaatagaaatagtaagagttttcagatttgggctgtgctgatacaaacatgctcaaaatcccattgagaaaaacatattagtcatctaaatgaagaagtttgctaatgttctaaatctttctatcctgggatataattttgttttattgagtttcttcagtgttaagcatattgtgtcacagaagtgcttttagcattaggaaaagaatcatgttttaattttaatcctttcagataatttattaaaacaaaataagagcatgcaaagagcccagttaaagtgagcaataaaggcctagatattttcgtgcttctgagaaatttagtacggtatgagatttgctggaataaaatcaatagaattggttttatggctatagcattgctatttcatctctttgtttacttgggcatttattactggtgcatgatgcacagaatgggtagaaatgctgaaatgtggtcttttggctctcttccagccagggattattcaggtggagacaaaacaagcttgcttctccagtaaaagatctgatagccttgagatgcccaaggacagtggccagaagtaattgtagttttgccttattatttttttaaactcacacagatatggattgtacagaaatgcattttcatattctgaaagtgtaataaaagcctcaaagtcaacagctcagtagtatgtagacaaagctttgatccataagggaggtcttactgagtatatatcccttctgcccattatcccagtatataagccatcaatagatcgggggcaagggtgtgtgtccatcagagtttaatgaaacagtagggaggagaacaaacacctaggctcatgtttataggggccagggatagtctgtggactttcctgcaactgtccatggagccagccctatagttcttaattgccaatgtggattctcataaaattaaacagtattattctgtcttcactattaagagtagccatagtaaatcacctcctctccagttttctgttttaactgtgaggtgtagttcattctctggatagggatggcttctgtttgcctttgtaattcgttgcagaaaacctattatttgcatttcaagcttaggttcaggtgtctgcagtagatcaacagcataattctttgtactaaacttaagcattcaagcccagtctagaacacatttcacagaatgtcacagtgtcctagagccaaaaacacagccatagagtcaaccatgaacttggaaaatcctccagagtatgcagagctatcaagggcaacgtctcttaggaataaagcaattaattcagaaattaaattttctactttactctttctgcaagaccttagtcacatatatgactttcttcagggatccttaaaactatattagccatctgtgagtttgcaagtagctaaatacaccacctgtaattattagtttaattattataacatagtatcctcacaaagcattgctacatttgtcaaatgtgctgaaatcagttctaaccagagaaagtgttgaaaagacagtgagacaattcttctcaaaattggaggaacataaaagaggcccagctgactcacatcagtacatttgcatgactgaccccctctctcatatggtctccttatggtgagcgccgttcacaatgcaccctcctggcctcttgcttgccttagggctgagtgcacctgtgctgagaaccagggccattcaactcattattgtcatgatgcaacagtgaagaagtacttgaaacagtaaggatgcttctctggcttaaagaaaatattgagggattaatggtgttgattgcttctctgtttgcaacatgactgtatataaaataaaagaagtacgtgtttgattttacccaatggctgacaagcatttgggacatacttcttaagctgtttatataaaccaggttcagaatggtttagagacgtagttcatggacctatttcctatgaaaaggacataagagacttttgtgttttatttctcaccttctgaagtaatatatttcaaggcttttaatcagaaagaatgaattaaatgactaaaatgccagacccaaagtatggccaactgtatcttccaaagatggctgtcacatatttatcatttgaatgttcttctcacaatgtcaggttgacactccgccactgagtggtagggacaatgttgtctctccccaagctcaggcagaacactgtgagtgtctcaaccaacagggtacagtgacactatgtgactttgaaggctaaggtcataaacatgtcatgcacttccaccttgtttccttgacaggacccaacttggaagtcagccaccatgttgtgaggaagcccaagccacatggaagggtcgctgcaggtgtgccagcccagagtctcagctgaggcctcagaagacagccaacatctactgtgatgacgcccagatcataccagtccccagaggtcaagttatctcaacctacaggtcgttccagatgataacccagtaattttgcaacaaaggcaagccagctcctatgttctgcttatatgcctgacccacagagtccacgagcataatgcaatatttgtttatgtcagctgtggtatagttttttactaacttttctttatgagtttgtacagggagagagaattaagagactcagatgccagaccctaaagataaggtgctttgttacgataaggaattctctttccagacatttataatttaaggtatgttgatgtatttagtgcctaaatgtcttagcatggtatttccttgtgttttatacagtttgtctttctctactccccagcactacaacgaacatatgtacaaacttgtgtcaccagaaattgtaagtgacatctgcaaagagagagattgagagaaagagaaagagagagagagagaagacaaacagagacagggagagagaggcagagagaaatggagaccgagagagattgatttatcctgtaaacatccacatcactttacttaacctcttttggtactcggcctttcaattttgtaatacggccaatgaggaatttcggcaaatctcatatctaggagacctaggagcttgtgaagtccttgtccatcagtggctgtgcattcactggctcctggcatggtgtctggtcttgagtgtagacagtcagccttggagaatgtttactaaatgcacagtgaagggagcatgtgcatctcaccttcctggctaccttagttctcatgatatcctcagaggagctctttctaataatggttatttgtcatttccaagggtgtgctacattttgcatttatttaacatcctgaaattgttacataatacgtttattatattataatctcctttgtgtctctggtaatatgcacttttgttaaattttcatatgtatcattgctttatctaatagatcacatttaggacaagcaatggattaagactgccttatcagggaaatctaatgcttgtctttaagaagagaggtttagcttcaattaagacatatacatctaagatttatcactgcaagtagatacttaatgtctgtgtttggaatgtactaattaggttccaattagcagggtcaaaatatgtaaatcaaaagcacttcatcccctttggtgtctctttctctcccataactaattatctgtactcttcttggtcccagcaaacaccacggaccatgtctttaagtctctaatatggtttcttcaagtatgggccaggtgctgtcaacctgtatgttcctcctgaataagtccctgagggtgggagcagagggtctgcattttaccaagaagaccaagtaatctcactggaaaatatagcttgagaaatactattctttagccacttaggcattttcactatgatatctttagggtttatctgatggatacttaccaagtgtttctcatctctccaggggctgtgagtagcataagaaagcctaacccaccgccctatcctggaagtgtggtcaggttattaaggtattgcagatgacaatcatcatacagggcagctttttcagtgactcaaagaaaacccttagtattccataagctgatataccttttaaagttcatttctaaactaaacattgcaaaaagtttcttgtcaaaagagatttcagatgtctctatatactgtttcttgtataaatcacacacccttaccaagagccctgagctgggacccacaaatggaaatcaaaggtaatgtgttcctccattatataataggaatttcataaaacccatacaacagtcatctgtgttatacagaaaaacattcatcactgagcatttgaacattttgatgtttctgaagtacagaattcatgacactctgcaagtttttccaaccaatttacaaattattttcatccctcatcttattatcctacctagtgtcaacttgttctttcggcataatcaatctgaatgactggtaaggtttcatagtgcagcactttagtttatgcagacatctgcccaaaagcatctcaatcactcatagcaagaaacaggggcagcattagccatgaggaaatgctgttttgttacacatgtatatctaaagacagggctatttgtataaaagaaagtcagggtagtgatagacagaactaatgtatcaatgtcagcagaaaatgcaagtcaaggtatggcagcaaaaatcagcctcacagggtacctggaacaccattaatttaaatttaaagcccttgtggggaaacggatatgatataatcactaaattatcattcataaatgaaggtctatcaagtagactatagtattatatttatataagaaaatcttttcaccttgcattcacacataggggtttatgttgctttaagtatttttctagttttatcattacattcttaaactacagtccaatgtgtagcgataagggattactgacatttatagtaagttatttgttcttattattctaaaacaatagataattttgatatagaaattaagaaataacttatgtatgtagatataaagaagtaaaacatgatatatgattctaatggagaagataatgtgatactctctagctatttatgtgactttggaaattacttattgcatgctagaatacaaccaaaccagctattaaaagttaagaggaggtggcaaagcagaaaatactttaaaggaaacttccaaagagccccaggtgatgtaaagttataaaagctgaatttgcttttaataccaattcaacatagtttttcaaactgacgaaaagtacctagatggcattaaacccaaacataaaatctgtctgcaattaaccataaatccttcactatcccgtacacatcttgcttcatcggaatcaatgttgacttatcatgagcaatacctctgattctttagaagtatgtgctacataagatacaaattggctgggcgcggtggcttatgcctgtaatcccagcactttgggaggccgaggtgggtggatcacaaggtcaaagatcgagaccatcctggccaacatggtgaaaccccgtctctattaaaaatacaaaaaaaaatagctgggcgtggtggcgcatgcctgtagtcccagctactcagcaggctgaggcaggagaattgcttgaacccaggaggcggaggttgcagtgagccgagatcacgccactgcactccagcctggcaacagagtgagactgaatcttctcaaaaacaacaacaaaacaacaacaaagatgcaaatcaacagtgctgcatgaagaagtactcacccagaccctggctgggtactcatggcatgctccctcattgaaaaccgccatcatcagtattagcctctccacctcacacacatcataaaatgctcccagtaaatatcatccgggtgcgtgccatgaatttcatgtagttccctctaggaactttgttccactaactgcaacattctctctagccatttaggaataactagttcatacttcccactgtctgtcctccaccacagaatagagaagtacatcgtatatatactataaatacttcatttggtgattaaggtctgatgtatctgttgtatattgtgggtctttatagattttcttttgttaggagagcacatttaagggtaagattccaaagattggaaacattactggactgaagattctttgatgtaactgtgaagactcctaagaggaaaattctgcttgtaaactggccggccagccttcagggaaacatgtcacaggagcacgctggggtcacattgcctagcacaaaacagaactctattaaacatttgggatctgatagtctctaatgttatttagataactgaataaaatgcattttttttttaaagatggggatcttgccatgttgttgaggctggtctcgactcttggccacaagtgatcctctggcctcagcctcctgagtagctaggagcgcaggtgtgagccaccgcacttggctctaaaaggcatttttaaaaatgaaggtgaaaacaattaaaaaaaagtcgagtcaataaaaatttagccaattttcacatccagagaatcattttttataaacttaattatgttattttccttttgcatttggattggccctacctgaaaatgtatacatcatttggtttatgcttacccgtgtggctactgtgaaagatatcaaatcatgtaccccggaagcccttcatttattatggctccagggcaaaggggagcaaaggccacttccgggaggacgcactgatgacacagcaaagtctccagcagccatgaagaagcctggcccctgcaatgccgagagggaggaggatagaagacgatcaaggaagggccaggggcttggacccagatccctttcttggtctcctttctggtctgtcagtctggaaggtggcagtttcttagaaaacttctaacatctaaggtttaggaaatcccagggcagtggggcttttaaaaattgcttcggatgcagacaaagaaacctcaggcctactgtgtgcacctcccacgtgtgtatctacgtaggatgtagagaagacaaagggacacagtgagcatggtggtggcgaaaggtcacctgtctcccacggaggcatggcttcccatggagagaaggaggccagcaaaggccacaggggcataaccagcttaccacgccccctgggagggaccctttcagaagagacaagggtggatggcccactctaggagtgcagccttgcccagatcctggaagacagggtggtgtgactatggtgtgccactcagctccaaaggaacaagggtagaagctctggtctgagagctgacagggtgaggacagctgcagtcagagccagacgaggtgtcagcatgggcccagtccctcatcaccaccaaggtgcaccgtcacagaggcattcctgggcccacccaggctctcagcgtcattagcatgggcctggcccctcatcaccagcaaggtgcccagttacagaggcattcctgggcccacccaggctctcagcatcattagcatgggcctggcccctcatcaccagcaaggtgcccagttacagaggcattcctgggcccacccatgctctcagcgtcattagcatgggcctggcccctcatcaccaccaaggtgcactgtcacagaggcattcctgggcccacccaggctctcaccgtcattagcatgggcctggcccctcatcaccagcaaggtacccagttacagaggcgttcctgggcccacccaggctctcaccaccattggcacgggcctggcccctcatcaccaccaaggtgcactgtcacagaggcgttcctgggcccacccagcctctcacctccgtcagcacatggaagaagagaacagggaagagacccctctgcagacagtccactccatctggggctaagctttgccaaaccgagagagaaaggctttaaactgtgaacaatgtccacaataacgacaatactggaatcaactggatactgtcaaaaagagtctaggttttaaaccagaagtagctaaaaaatgattacactgattttactaggttggactaaatttagttctcctgctgctgagagaaattggcagcttgtcaaagaaaagttacagaaaataaaatgagttgacacatgttgattattgatttccagttcaaactcaccacacaggcatatcaacacacatgcacacacacacacacacatacacacacacacacacacacacacacacacacggtcatatgcataaatatttcagtcacattctttgattcacgtgtatggtataaatcagaaagcaactgagcatcttcctggctgcttccagaataaaccacgtttgttacagctttctagtctggggagacagccgaggtagcccgctgcctccaaaagctgactgtggcagctcgggtaactttggagcttgttttctccacttcagaatattaacttgcgggaagatgacattctgaaagaagacctgttctccaaaccattcggtcaaggagcgaaatcctcagcgatgggcgtgcagactgaaagtcagcgctcgggcccctgctgcatctttgagttgcttcaggagcctcccacctgactgctctgccatccatccgcgcctctcacacttctgttcctccccgtcttaggccccagtgttgcatgtccttggactgatgtcctgataggcttcactggctttgattttccacccgcctccagaacacagcattaggggttctgctaccagtcttcctaagctaaccccacaggacaggggcactctctgcagcaccccccactgctctgagctgttggagttgggaggaggcctgcagagaccttccagggactctgagatgccgtggaacatgcctactggttcctaaatccaatgaaacgtttcagtcctttaaccagcatctcaacgaggatgattccaaatctctgtctctagccccaacttttcatttgaattccagatcctgatgaggggcacagaggccttctctgaacttgatcaagtagctcccacccttggccccttggtcactctcaaccacagtgtcctaatttatcttctccaaaatactcaccagcatctaaaattatcttattgatttgttctcatgtttattgtatatccccctacctcttcccaaattcaccagacaggtgacgtgatattctaaggaaatcatataatactgctttagggtcaaataaaacacacgaatgtcaacgaagacggggactcgtaagttgtgtgtttctgaccctagaatggtacttggcgccaacagattctccaaaaaatatttggttactgactcaccaatctgtatcacagaagtcaacttgacacttccacctggacatctctcagacactaaaaattcagtccaaaattgagtgcacaacagttctttattatcattctgtctaatcataagccaagggcactactctctgttcagttccaaatccagacacccgagaatcaccttaactcttcgttctctttgacccccacatctcagcttgtcccagtgacctcacggctctggatcgcccatgccgccacttctcatgtagatttctgggacagtcttctctctggctggcttcctattaggcccttttagacataattagttttttaaaggcgaatatgaataagatgctcttttatttcaaatctcctcagtggcttgccactgctcctaggatcctgctccacatctctggaagagcattcaagaccctgtgtgagtggcctctccacccgcacccacaggctggcctttcctgatgctctagcttttcattagtaattttttaaaaatcctgcaaacacctgtcttattttcctaaggagatggaactcacttccaaaacattcaacgttgcaacaaccaaattgctaacagtccaccagtttaagggctgagaatatgaactctgcttctgtttcttgacacagcctcactcgacattaaaaataaattggttccccatctagatcaacttgaaacatgaattaaaaacgagtatactaggctgggcacggtggctcacacttgtaatcccagcactttgggaggccgtggtgggtgaatcactttaggccaggagttggagacgggcatggccaatatggtgaaaccttgtctctactaaaaatacaaaaaaaattagctggcatggtggcaggtgcccactcgggaggctgaggcaggagaatcgctggaacccgggaggaggaggttgcagtgagtgaagattgccccattgcactccagcctgatcaacagactgagactctgtctcaaaaaaaaaaaaaaaaaaagaaaagaaaagaaaaaaacggtgtgccagttgaaactactcacattttaaaaggatgtcacacaaatttcagccacattgtagagttttcttatttccatttaccttgcatgataagctccaccaacaaaaagcaacagaatttactatggcatgtatatattaaattgtatttttttttcagaaatgcaatttctttctgagattactttaatcaaaagaataattgcattattcatgagccatgctccgttaattggaagtgttggtcaattattacatgagatcgcatcacctttcaataaagagaaaagagttctcttgtgctggtctttcaaccacaattaccccctctcagtccagtgacttataacacagcagcaaagttaatcatttaaaactagaaatcatctttgaaaagtcaaccagtggaaacatgtttctaacaacaataacagcgggagagtgtactttagaggaattcataagtgcctctgcaacaggatctggataaaggtcatatttttaattactatgggtacaaattttacaaatcacatgctgtctttaccggtacaaaaaatttatcagaggtggagcttggggacatgcgaaataatagggctttgagtagttcctccaactttacaaatatttcatccttaagaagcagacatttaaaaaaattcactgaggaagggaatgcgatattctatgatactcacagcatactgtttagggatcaaatagaagaagtaaatattcaacagcaaggagctgttattacaatgggcttgatttttaaccccttatgttgtccaggtcctgcacattaaaagttctatgtgtgacaattcattgttttattcattaattctgtctgtctagaagattctgaacctgcttcagagggcatagaataagaaactgaggacgagaggaggcccagtgctgagtccctggaactcatgttgtgctgagcacagcgactaccatttagtacatgtttaactgccccataactgctggtctctccattgtccttgactgtgactgcctgacaaatctatgttctgtgcttcagctatgctgagcaccacattctcagttaggtatagaagatgtggtttatatagcacttcttacagtgcctctaagtcagtgacacttagtattccagggcattgagatgtaaatgtatcctgggcacatagagcatatacgctgtgtcacaattgttcaaaattaattatatataattcttttcttaatataggagtccagtggctacctctttgaggactcatttgagccttgcacagtgtagatgacactaaaaatgcatgatatgttgaatttcacacacatgtttaagcaggcctggtgatggtacagtggttgagactgtcctatttgtctatgttggcatgagattgaagcacagagctttctggaaggctagttcactgctgaggatacagagcagtgctaagtgtggggcagataaggccaggggctatgggctgggcataaggatggacagggcgggactctcactgggaaggggctatgggaaggtgcttggtgtcactcgagggactgggaggaaggctgacacaaaagcaggtgggcaacggccctggaggacatggtctccaggtcgggttttggagtcagacaggcctgaggtcagatctcggcttgtcgtcactggctgtgtgatcttggcaagttatgaatggtctttctaagcccctgggtatctgcagaaggaggcggtgactcaggactgcttactatccacacttattcaggttctacatgtggataatgagatgcttgatactgagtctggacagagatgtgttatctaaatcccattcattaccgagttcatacagtcagagttcaggtagggaggggtactggttataataactcttcttagagttgctgcaacaattaaatgagatgatgtatccgaatggcagcagctgggacttactaaggtctcaaaaagcattgtgactgctgttgctactactactactactacaactattactataatgattagaactattagtctgctatacaactatcacagataatattacttaattagaagggtagcggatggaggccatggctctgcttgaatgaagtggtttgaccttgattcacgtagtacgcattgctgagctgaagcaggagaatcacagaattatagcagtgctctgaaagcctggtatggctgcaggactcagatgagccagatggtcaaagtggaagagttggtaaatcaaggttattgcaataactcagttagtactaataagggccagggatgaatacggtagttacgaaacttgaaaggacaggcacaattctaaaaaccattcaaaggaaaaaacagggatggaataaaaactaaaaggtcatttctgtgaagatcaaagacacacagctgaagattcacaaggaaaaaatggtgagctggcaagagagatgatgagcatggcccattccttagaaaggagtctgattgtgaacaaaagaaaaaaccagacgtgaacagcggcagtggcctcacctctctgagctgccttcccatgtcctgggccgctctttcccctttgctgtctggtcctcctctcacaagtctggactctgttgctgcaggctcaggtttagaccctgcctttgctctgcgcacatgtccttcccgatctcatccattcttcttgcctttaaagaccacctatttgatgatgatggcacgtcctgactcagtttgaacatcccattggatgctgaatctcaaactattgatttttacccaaaacctgctcctcccactgccctccctatctcagtaagtggacacccagtcttccgtgactcaggccgagtcccacggtgccatctttcactctgctgcctgtctcatgccagtatctaacccacatacctctcgtatgtgcagagactggtggcttctcactgacctcagcacgcccactgctggtggaaacctccatcatctctgatctgggttagcacaagagacttctgtgtcatcatcttcactccagctacagaattctcccagcatggtagcccctaaagtaaggtctgactttctgcttagaactcttcaatcctttctcatcttatcctaaagaaaagtggagaccctcacggagtctgacagggccctctgaacacagggccctgctacttctctgcacccaccttgctcttctccacactcactgggccctggcaggttacatccactgctgtctactcaaccacacaggagccatctcagggcctgtgtgtctgcagctccatctgcctggaactcccctcccagatatctgtgtggctgcccatcccagttcctttggatctatcttcagatatcatgtaccacagaggccttccctgaccacctcctagaccgcaggaactcccttccccaccactacctgccccagcctctgtcacctgcttccattttttttttttctgtagcaagtgctgtctcatttctgtatatttgcttattaatttcttgtccattttcactaccaaagtacaggttctgtgaaggcagaggtgttgtactgtatacagccacatcatcaacatctagaacagtgcctgaaagatacgtattgaataaatgtgtggtacaagtacgctgggcacagtggctcccacgtgtaatcacagcactttgggaggccgacgtgggaggatcacctgaggtcaggagtttaagaccagcctggccaatatggtgaaaccccgtctctactaaaaatacaaaaattagccgggtgtggtggtgggcacctggaatcccagctactcgggaggctgaggcaggtgggtcatttgaactcaggaggcagaggttgcagtgagccaagattgcaccactgcactccagcctgggcaacagagcgagactctgtctcaaacaaacaaacaaaaaaaccatgtagtacaagtaaatacttaaaaaaaataagtatcccattctgtatggaaagatgaggaatgagctgcacagagggaaagttcgtaacgtgaatgttggctcaaaaaaaattcttcagtaagccatcaggggtggaataaaaagctttaaaaagtgcacgtagagggggttctaagaggaatgtgctattttgcgatgagatttagcctgactgcactctgcctgtgctgacctggatgcagacagtcgctgcctccaccgaggagggcgtgcatctcttcacccactcggctgaacttcagcagcttccacagtgacaggaacggatgggagaatggactttgttgtttcgagggatggtggtggtggtggtatttttatttgctcatttatcttggaagtatcgagtggtagacagtggcacatggcagtggcaggtgcagcagcctccagggagttaaatcctagccctgccactggacttctgactttggctaagggttgcctggtgaatggcagacagtggcacgtggcagtggcaagtgcagcagcttctggggagtgaaatcctagctctgccaccagacctccaactttagcaaagtctctgaccactttgtgtctttgtttccttctctgtaatatgagaatatgaatgtgggttcctaacctgtatctgaaacccaaggtttcagagcttttcagattttaggaaggtaatacagagtacaggctgtattttatggagcacccacagcagggtctaatcgaacacatgaggatatctgtggtgaaatacatgaacattcatacctagtgggataaatcgaggatattgatatggtttggatgtgtccccacccaaatttcatcttgaattgtagctcccataatccccacatgtcgtggaagaaatccggtaggaggtaagtgaatcataggggtgggtttttcccgtgctgttgtcatgataatgaataagtctcacaagagctgatggttttataaaggggagttcccctgaacatgctctctctcttgcctgccgccatggaagatgtgactttgctcctcctttgccttctgccaggaatgtgaggcttcccagtcacgtggaactgtgagtccattatgcctctttttctttataaattacccaatctcaggtatgtctttattagcagcatgagaatagactaatacatgtggcggtggcaagtgcagcagcctctggggagtgaaatcctagctctgacaccggaccttcgactttggcgaagtctctgaccactctgtgtctttgtttccttccctgtaatatgagaatatgaatgtgggttcctaactcgtatctgaaatctgaggttccagaacttttcagattttaggaaggtaatacagagtacaggccatattttatgtagacccacagcagggtctaatcgaacacatggatacaactgtggtgaaatatatgaatattcatacttagtgggataaatcaaggatataaacagcctcactgcagttcatgccaggatttgccaccaagagtgcatgtcaggcaagttttgtctccagatgagtcagaaatattagactttatctgtcaggttaatgtatttaacaacttggactttttattaaactgcaaaggatttcactttatgtatgattttaataacaatatttggcctaagttaaactctttccttctccctccattcttcccttgcctccttctttcctatgattctctaagctcccaacagccggccctgtggtgagagggtggctggtggaccacgaggagcagccgccgggagagaggctgggatgctgcacatgggggagtggcttgggttggctttggctccgcccctagctggccccagaatcaacagaaccctgaggtcaaaacagtgctcccgggagctccgctaatgcagcttctctctggggcccgcttccacactgatcttgcccctaaacccctttgatttatcaattctggccccatttctggtaagtcactccctgggaggcaagcttctccaatgcatggaagtcaggagcttatggaggagaagtgacctgggtcccttacatgccaggttatgtaaagcaaccccaaatatccagctgtgaggagtccgccagaaatgccaacagacgagcacttttcagggaaaaatagagacacagctccctctcacggtttaaatgtattgggtagagatgagcacagcaaaagaaatagagggtcttcctgttacgggaaaggggtgtacaaatggcacttaagtcaaggatgttcaatttgttctcactgtcaacatagggtaaagtggttctgttcagctttctaaatggccaggctattggctgagtacagcctatctgttcgagtaactgtcactttatttatagttacggcaacttcttagaaccggtatcctttaaaatacagcctaatactagagccagatgggaaaaaatcctagggtaaaatattaaattgtgactagtcatttaatagaacaaagttattcatgacagcttatatatgtcaaagcctatatgctggcttgtctataaactggcagatggatttttttccaaatactgagaagaatttcagtctggattttaaaacgagtaagttatttcaaaacaaaactgaccaataaaagaactgataaaaatttgtttaagcttattttattaaaaacaacaactgactttttctttttttttttttgagacagagtcttgctctgtcacccaggctggagtgtagtggtgcgatctcagctcactacaaactccagctcccaggttcaagcgattcttctgcctcagcctcccgagtagctgggattacaggtgtgcaccagcacacctggctaattttgtaattgtagtagagatggggtttcaccatattggccaggctggtctcgaactcctgacctcgtgatccacccatcttggcctcccaaagtgttgggattacaggcgtaagccaccacgcctggcccaacaactgactttaaaactcaaaaggctttatttaaattatactagtaaaaaaaccaatgaacattcttatttatcttctaaaccatgggaatatttaaataattttatattttattatttaatatagatttagtattatgttcctaaatctgggatatggctatttttttctgttgaaaaaccaaaaaaggccaactctatatgtggccagtatacaggtaactgaggctgacatagaagagagttacatgtatccaccaaacaaactcaacctatgaagatcttaaacattttttttctgttgattttcttgagttttcatgactattgcataatggtagatttatactatttccatgtggatgacaggagataatgtccaacatcttctacccctacaaatcagatctgaaatttctttatgatttcttaatactatcatcgagcattcaggtaggctccatgccggaaatttagactcttctttactgcttcttccttgctcccatcttctaataggtcacccaaccttgttcattctacatcaaaatctcctttggaagttggttcactcaccctacattagtatcaaacattttaggtcaaggtggcaattctgacttccagtagtgatttttaaactcaataatgacaacaataacaaaacacgtcatcggccttttcttcatattaagtcttatatgaacgcccattgtgtgaaacgctgaactgacagcctcccctttaccctctcagcagccccaaggcatcctcaccactgatgcggaatattagggccctctgtcttgtcttttccaacagcctggatgtctacccactccagcccatgcccagcatggacatcagagtctgctcctgcctcctggctcaggttcctgggggcagcgtgtggagctgagaagactgcatcgcctggattccatcccagctgggcggcttactagcccatcacacctgggcagtcccgtgagcctcttctatcctgtttcttcatcactaagatcgagaataaattacaatatctattttggggcatcctcagacaaacccactacagggcagggggtccccaacctcccgagccatggaccagtacctgtccgtagcctgttaggaaccaggccgcacagccagaggtgagtgggtgagcgagaattatcacccgagctccacctcttgtcagatcagtggtggcattaccttctcataggagcatgaaccttatcgtgaactacacatgcatgggatgtaagttgtgtgctccttatgaggatctaactaatgcctgatgatctgaggtggaacagtttcatctgcaaccactccactcaccctgtttgtggaaaaattttcttccacggaaactggtccctggtgccaaaaaggttagggaccactgccataggacctttggttcttccaacactcacacatagctgcccctcaccactacttattgattttaagtaagaaaaaagccagtgagtcattgcaacaaataaaaactacatgcaaggcaaatttactacaaaatgtctgactttcccagaaattatggttgctttttaaaacatattttattaaagaaaaggaaaaaataaaaacctctgcccctcactgtcctgaatgatataagactatctgattggatactagtataagtctgatgttgctgcctggaagaaagcagtgagaggcgtcagaacactccagcacactttggaatggccagggagttttgctggcagacactcagcagaagatgccttacactccctacctcaccagtccccacagtaggcggtggaccttcatgtaatgggagactcacaccttctgtgcaagagccaggcacatgggtaactccaggctttaccccatgctgcatttatgagaagaaataagacaatgaatgagcctgttaggccagtgtctgtcttctatgattaacacagccaaggaaagtctggcccacacagaaagagcagccctgcagaaacactagtccccctgagctttgtgcttcagcttttccaaacccaactcaatccaccatatagaaaactcagcaggagttttagccgtcatcattattaccctggatctcacaccactacaggataaactccacagttcctagcatgactacaaggccctccaccctgcagcccccaccttctgctagactttcttgctggtccattgctgacaggcagctgtgctctggcctcagggactccatccctggccccttcctagagcatcccctgatgcacatctgtggatcctgcaagcttcgcatggccaggcttatccccactctttccttctccagcccacaggtcaatctcctgcgatgctttctccaccccttcacgcagagtttattttcttctctaaactaccagaatcttttgttaatatccttgttagagggtttattgggtgctctcataattacagccaactataaactcctagaggtcaagagctggttttatcattcttcgtatctctagtatcttccctagtccctgatagatgctacataatcaataactatgtgttgaccaaatagatgattaagtcagcattatgttttaaattttatttaagttcacaaaaagacaacatattatgacacaaaactgttaatagttccttaaatccaggcagtgaaattacaggtaattcttattataatatttaaacttttcttcatttcctaaatttcataacacagcaataatcatagaaaataaaagagtgagaaaaacctgggagggtttatttatttaacatttcagataatcaaacaatgttaagtactaatattagtgttggcctctcctgctaaatattatgggaacttaccattgcttacatgaatgtatggattagtgcaataaaaattacattggaattctctagatcttgatgtatgttttcttaatttattctgacctaattcattagcttaagtggttcatacatttcacagctataagtcttgttcgctcatctgggaataaatctggtagtatatgctgacacttactaaaatgtaacaatatgattctatttttctgttagagacctttagcccagaaaaaactcccattaaaaaaaaaaagaagaaacaggtttttcatataaagaaaaaaaaaaaaaggcttcagtacaattggcatcttgaatgtcatggccaaaaactagagttccatgaaactgggtacagatctcattatgagcataaaaacaacacacgctcttaaatacaatgcaaaatttcctgctgattaaaaatacaaacaacaatgaacaaagcataatatgagtacaggaaaaacccatctatggattctatgctttagttatgtaacattttcacattagggcaggttctaatgttgatcaccatcatgaccagaaagagttgcaccaacatgaacaagaggtccctaagatattaagctccattaattcttctctgtgtaggcagttagggtcggacaagtacaggagggatggacttattataatgaggcctgggatggtttcttttataatagtctatattgtgcagaaaaaaatacattatacttacaaatatttggcacatagtagatggataatcaatattaactaattaacaatcctatggcgcaggaagatttttcataagcatgttgtggtgacagtgacttctcacatgaggccagctgtctatctcacccacatcctgtgacctgcttctaccccactggttctaccccactgaccttcttctaccccactgtgactaaggcactcctctccacatgctatatggtctgcatgtttgtgaccctccaaaattcatgttaaaacctaatttccattatggggatgttaagaagtgggcctttgggagatgattaggccacgagggtggagtgtggagccctcatcaatgggattagtgcccttatagaagaggcctgagagagctcatctgccactttcactatgggaagtcacagcaaaaagacacaatcctttacaaacaaggaagtgggccctcatcctacaccaaatctgccagcgtcttgatcttggacttcccagcaccttcccagcacccagaactgtgagaaatagatgttgttgtttgtaagatactgagtttattaagttttattatagcagcctgaagggaccaagacaccatcttcacagtgaccgcctccagctactttaatcatgggacagcttcctcctccccatccaatttgcacacaggggtcagccccagtcagtgcctcccctgcagccacagcaatgtttggctgggcttggaacaccacctgctaaaaaatgaccatcccttgggtttcactgtgaaatcttattaatgtcagcattgtatgtttccgatgttccaatgtaatggaagcaaaattcactaaggattgttcttcaagggtcagcatgcccaatatgtaacctgtcttaccacacagagagacaggttcatttacgtctctttaaaaatggttcttctgcttcaaccactagggattctcaactcccagaagaaagtgaaggactgatcatgcttttatctgctgcagtgttggtaacaacagctgactgtgggatgatcactgtttctacatgtggtgtgaggagcctccatctattaactcatatcatctggatgcagtgatgtcattagtcccgtttcaccatccaggtaactgaagtcacagagctggaaagcagcagcagtgggggtcacgtgagcccagcctgcagcgcacaggctctcagcccccagcatgctgcccctttgcagaacgggccctgagaaatgggaagcttttggttttcaagagtctctggatctcagtctggcatccagtgacataggaatgtgtgttagagatgactgaagatctgagagacataagcgatgtggcagaagtatttcacaattttgacctcataacttcttttctgttttgaagccctgggtgttggcaggtatagaacaatagagtggcttcaaagaagtgactctccgggtactatcctctgtgcgcttcccagagcccagctgtgttcaagccaggactttaggagaggaggtaggagataatgaagggacgtgattagctttgtgggacagccacaaactgggtggctagaaacaacagaaacgcatcctctcgcagttctggagcgggtgttggtggagctgcttccttctggaggctctgagggcaaatctgttccaccttctcttgtggtttcgggtggctgccaacaacccttggcattccttggtgtgtggactcatcattccgatctctgcctctgtatgcatgtgagtctcctctctgtgtctttgtgtcccttctcttcttataaaatacaccagtcaagctgggcgcagtggctcacgcctgtaatcccagcactttgggaggccgaggcgggtggatcatgaggtcaggagatcgagaccatcctggctaacatagtgaaaccccgtctctactaaaaaatacaaaaaattagccgggcgtggtggcgggtgcctgttgtcccagctactcgggaggctgaggcaggagaatggcatgaacccgggaggcagagcttgcagtgagctgaaataatgccactgcactccagcctagcaacagagcgagactctgtctcaaaaacaaacaaacaaacaaacaaaacccaccagtcacattgaattttgacccaccaaatccagtatgaccttatcttaccctgattacacctgcacagactctatttccaaataaaggcacattcatgggtgttggggattagcacttcaacattatctttttgggggacataattcgacccataacaggaaatgaagtgttttttcgtgtgttttcttcatgtttgtttttttccctcaagcactaaaaaataatgcaatttggctcctgacaacatgaatctaaaatctaattctgtgagcaggactctctgagcccgggcgcagatgggatacctgcatggggaggggcttgtgtcttgctctcagaaacataataaaccaagagattctgctgcattttcaacacatctctaagaataggcagcagtgcacctccttcttagtgttggcagtgaggctgacgtgacagtctgaatggtacatgcgtcccaggaacctcatgtcatggtaacagaggctacagcacctcacactgaaataagacgggctcagaccccccactgcaaccggctgcattgtcaccttctggggtacacatccgcggcatggagcttctttattctgttatcatccaggctatgagtcggagtattcaacattttaatgctccatatatcaataaattaagtgtgatgctggatggatgtgacattttcaatattccacagtatgactgacgggctaccgtagttcctcccctgtttgtaatttgagtaatctggatgggggacatgaactggccggccaataaaagtgaagactagtggaaagagcaaagtcataaagcaagcatggtccttcagagactgtattaaaagattatcgttttgtatatcattgttttttctttccagagcatgtaatcataaactgaaaagagaagagacaaaatgtaatgttgaccagaataaacaacgctgtgttcatcacttaatgttattacccagtcccttggttgtcttgtcctctgtttgttatcattttcgagggttttattctagacacattttttggtctcagtcagatttagtacagactaatataaagttctgctgctccacagtggtagccgacgcttctggaaactgcagtgaaatctcatgaactcgatagagttcactcttgcttggagcggtccacacacttcctttgtttaagcagcaatgatatgtcatgccaagctgagttcaactttcttggtaactcttgaagacaaatcaaccacactaataaattattcgacctgcaggttatatgagtaacaatggaccaccctaaactctaggcagcacagtctgatttccaacaaaagacaggagatgcagataacgtgtagatactaaatgtataaattgtattgtaattctgataggaaaataaaaccccaaaccctgaacaccattaattcaccatatgtcaacttaaaaaaatgtgaatgctagataataaaactttatgcccatgtaaatgtctaaacacaattttaataactataaataatgtagagatttatttcttattcattttaacaagcttttcactgaactatgatatggtattctaatattaatcttaaagatatcccagcatattctcaacttaaaatttaaaatatggctgggtgcagtggctcatgtctgtaatcccaacactttggcaggccaaagccagtggatcacctgaggtcaggagttcgagaccagcctggacaacatggtgaaaacccgtctctatgaaaaatacaaaaattagctgggtgtggtggcagatgtctgtaatcccagctatttgggaaggtgagacaggagaatcacttgaacccgggaggtggaggttgcagtaagccgagatcacaccactgcactccagcctgggtgacagagcaagactccattacacaaaacaaaacaaaacaaaaatttaaaatacgatgaaataaggcctttcctgtactaaactatgagcaatttatttcacaagaactcttgagtctctgacctattctagaatcatccaaaattgaaattattataaagtgttttctatgaatttcctacccaccaggcatcaaatgacagtatcaatggaacatgcacaaccgaaaaggatctcggccagcactgatgagatccttcataactataaagcaacaggactgatgaaccacacagtgaatccagccacataacttcataatcacccgtgcagaacacacttctggaatgctgtccactcggcccggcactcccctgaggactagggatagagagtgaatcgtagggagatggtctccaccctcacacacactcatccaagaaggcaagacagagcccaccatgcacaccgcaggagacaaacatggaaacccaagtcccatggggataagtgtgcggggtgggggctgggaatgcctggagaaggaggcaagtcctcagagaagaccactgatgataaagttgcttttcagcagagacctaaatgaagtcaggtgtgagccttctggaaactgggaaagggttccaggcagaaggaacaagggagcaagaccctgacgggaagcagattgaggtttgagagaaaggcttgaaaggatggcagtgactcagcaggggccagggcacattggccaggcacccattttaactactttggcttattccaagggagctgagaagccattggagtctgagcagagttgggacgttatttgacttcaattttaaaatgactgctctggcatctgtttggagaccaggctggaaggagaagcagcagagaagtggggaggtggaagatcagctgggggctgttgcagtaatccaggaaacagcccatggtggcttgggccacggtccaagccatggtcagattgtggaaggtgttttgaaggaattgtctgcaggatttgctgatgggtaggtagcatgtgtggtgtgagagcaagagaggagtcaagataacttggagatgatgcttgtgtccatttatggaggtgatgatgactgaagcaaaagaaggatcacacattcatatttggcattatgaagcaggagacaccattaggaactatggggaagtcagggtggcagctagaggtttaattttggggatcaagggtaaagttggagctaaagctatacattttggaattatcagcatatggtgagtatttaagtcaatgatgcaaggataagactacctacggagggaatacagactgggaaaaaagaaacaaagggggagaaggggtctaagactaagccccagggaatcacaacgtttagactgagttctgggctgggagttaaagaagaaccacaagatcatataatatcatgaagtatcctaagtatgaactgaaggcttatcagctgtcaacatagtagactggctgtcaaaggatggctttgctgtataattgttttatttttaatctagtatctcaaataaataaatttaaataaattgctctgtaaattttaaattaccacactcatctgcattatcattactgctcctatagtctctattaggttaaccacagttggtggctgttcaaggatttactccaataatgattatgtttcctttattttaaaatgcacatttttcccacattttaacatccctgaaatcacaatgtatcatacaattgacagcatcttagaactataattttttaaaaatttaaattttagattcaggaggtacacgtgcttgtttgtttcatggatattacatgcgtaattgtgggggttgggcttctaatgtacccatcaccctaacactgacatttatgatcagaactgatgctattttttccttcttagaggaatacacaaaaaagatacatcatataatctgtgacatctcagctctgatcaaataaaatatgtatttctaaagtcacagctctgttctattgtctttggttgatgtacaagtagaagagttggtctctgcacagctgccctctggggctagtgtctactgggatgatgaagagtcaagggtaggaaggaggcagcgccaaggagccccttgtgggcaagcctcttgacagtcaccgtattttgcccagggcttgctattgattagctctgggtgtcatacacctccagtgacttttgccttagcaagaagacagatacagttggaaacttacacaagggcttgctctggtttcattctccaggcattcttttcccctggagtcatacatccctgaagaatagaagccgtgtctctattaccttttaatccccagaactgagcacaatgcataaatatagctggtgctcaataaccattttatttaaattgaaacccaactccccagtatttggaaagacttgtggcctacaacctcagaggaaatgtacaacagattccctccctgggctgcggtagttgaagatcaccgactaactacggtcacataaggtatcatgtctgagtgcccagtactagatcctggtgtagtctccatggaaacatagagaggagcgcttgtatccttgcagagaaacaacaaatgcatcctttataatgataataaaatgcagcatttatagagaggataatcacctgtgttatgaaacaggcaatttaataactctgtctgataaaaacgcaaagacaactgtgatgctgtattttacttctgggggtgtcggcatctgagttcacgggcagtggtgtgagcagcaagaatgaatcttcttcatctccttgtcaacctgttatatgctctcttgctgcttactatgccgttttgtctttttctcctcattatattccccagctcatacatcctaacctactattccacttatttcttcctttacatcatgacctgtagtctatattcctcacaagaaggtcctcaaggaattacaaaggacttttagaaataaagacataaaatattttttacagttcctgcggaaggctttttgtgaagattgtgctttacatgtattaaaaacacctctgagagtagccataaaagtaaatttgaaaatgcatttgaaatgtaaatagtgtttgcagcactcaggtgaggctgcttcaggtcacatgtagcaagagctctgcttaagtcttgagttatcttttccttccagtttcctgaattatgtgacctctgagaggcactctgagtcctaaatgggtagtactcggcagtgactacgattcctaaacaattcctgtcctctctttcactccaggatcttccaagcctgcagcccctggctgcactctggtgccactagaaactgtgggccatgaaggagagatgctggcctgggttcgtacttggccacccaagagaagtaggatgtagtgctatctaacaatgtctctccaacaaggagttcttgagtctcttttaatcagggacccactacattaatttgcataatctgatctggagttcaatagatcaatgattcaaggtaaagaaagctcctgcagcagttcctagcccagccatttcctagccagctaaaatgccttggagctcaggtcagcaaactggctctgatctaagaatggtttttactttttcaaatggttgggaaaaaatttcaaagaatactatttcatgatgacagaaaataatataaaattcaaatgtcagtgtctgtaagtaaagtctgattggaactcagcagcctcactcattcgttcatggactgtctagggctccttttgtgctgcgacagcgtggttgagtagctgggacagagaccctatggcctgcaaaatccaaaatacataatattatctggctctctgcaggaaaagcctgcagacccttgccttagattggcaggcctagtcaaaggctggcctgttttggggactttccagcaatctggtttcatgtagggtgctgctgtgagacatgctgattgaattctgaaggacagggtgagacacaagcagggaataacattctgagaaaaaaagttggctctgtcagactacagggatgagaaaaaaacagctccttggtggtgtaattagtagtttaagtagctttgtctgcaatgatgctagagtaatctgcggtctttcatcatgttcaaggagaatgcacaaaaccactcagctcactataattgcaaatagcccttaatgaatatatatttgctttggctcctctgctctattttacatcaattcttgtgattttccaagtcataaaatgccccagatgcctttcactaaggcattttcacctggataaaaagatgtaaacagattagaccatttctaggtgagttatccaggaaacaggggtgatacaagtggattatctattttccgatctggaaaagtaggagtgatatagaagagaatcaatagttctctacaatgaaatcttagccttggagaagtgtttggtgaggggggtgaagatgggggaagtggcattgcgagagatgcagttactcactgatgccttgcatggtatcacatgatgtcacatgacactgtatgatatcacaaatagaaatgcggactctgatgagctagaactgagtgtcggcttctccgttgccatgcagcccaaggtaaaccactgactgctgcaagccttggtttccttgtctgtgaagtggtagcacgaagccagcactgctgtgacctcccaatgaggtagacggagcaagggtgccttctatgctggcagctggtgctcacctcggcagcacacacactgcactggtggatgggaacttctatgactgacgccaaatagcacactgaaatttgaacacagtgtttatgatcctgaggttgaaattttaaaaaatttctcaatggcaagcatcaacctcaggacactaagtggagaaagtgagatgttattaccaaatctcaagcttgactaacattaaggtgcttgacttgaatcagtgtttctaaaagaaaatgaaaacttctccttcactgtgactcacaaataaccagtaaacaagaataatatgttatagaggtgaaaccagctactcatggactcaaattttcagttgtactgaagtgaactgggcaaaaaatcttttaagaactgcctccaggagtgttggctattttgtaaatagtcaaggatgatggttttcagactgtctagataaccttaacctcaccatgaaatgcaaattatttgctttaaatggcaaaaagtagaaaagctctattttgaatggtattttgtttttaaaatactcttactctttaaagtaagagtcaagaaataaaagacatttatttgggcttagaacacaatttatctgagattttatggtaataacaatactgaatcacttttttttttttttttttttttttttttttttggtgaaccacaggcccataagatcctggctctaattctggctttaccattcctagctgtatgagaattggaaaattccttaatttctctgaggctcttcattttcttctatacaatggggacaagtgtaataatggtattaacaaagtggatgtaaacatgaaataagataataagtgtaaagctcttaccacaaattaagagcataaaaagttatcagaaatggtcatgtatccttggttataaatacaggtcatatatcaattctggcatttatttaagcaaaaaacctttaaattccactcttattttggtgcctgatttttttttttttttttttttgagacagagtcttgctctctcacccagactggagtgcagcagcacaatctcagctcactgcacctcccgggttcaagcaattctcctgcctcaacctcccgagtagctggggttacaggtgtgcaccaccatgcctggctaatttttttgtatttttaatagagatggggtttcaccacattgcccaggctagtcttgaactcctgagctcaggcaatccacgcaccttggcctcccaaagtgcggagattacaggcatgagccgctgtgcccagcctaggtgcctgattttatttttaaaaattaattttcaggcatggcaacaaataaagaaaaaacacacccatttcacgatgcttattggtgacccccaggagaagtgaattgagctatttgagggaaggacagacacacacacgcacatgcatgtgtgtgcaggtgcacatgtctctaaacatagtataaatagattatgccaaccagcacagctccagatgagagtgtctgatgccacagcggcacatcatgagcagtcacccttcactcaacttctagcttgaatagaggacagagatttcaggagcatcgccaagtgatgggtttgggcctggcagatgtgattctgagtagctactgcagcttcggtgcctataggactaatactgcagagatacagtgttttatctttcaaagccagtacattccagggaggctgtatcctggggctgctaaagacgcctgcaagactggcctggaagaaatcctgggagggtctgcttcaggccactgagctaggctggaaacacctgggacagcgcgcctctgacccctgagccacactcgggaggaaccccacactctggcaacaaggactgggaatgtcctagttaggcctccctccctccaccacagcctcggaaggtacttcccgcttgggctctttcttggcaagctggagtttcaagtctttttttttttttttttttttttaaacaccaacctagacatctctagacagtacaaaagtactggaaaatggggaagcaagttttaataataggtacctttggtttataatagaaccaccccccccccttttttttttttaagaaacaggatttaaagaaaaaatgttttcagttcagagccagctttttttttttttttttttttttttttttttgagatggagtctcactctgtcacccaggctggagtgcagtggcacgatctcagctcactgcaagctccgcctcctgggttaacaccattctcctgcctcagcccccccaggagctgggactacaggcgcctgccaccagcctggctaccttttttttatttttagtagagacggggtttcaccgtgttagccaggatggtctcgatctcctgacctcatgatctgcccgcctcagcgtcccaaagtgctgggattacaggcatgagccaccgtgccctggccagagccagccatttttaagtgggacaattccagtacaattggccttgttgctgggcaaagacactaggattcattgtgctattctaaataaacttttcgatcaagagatggaaatgcacaacacatcataaaggatgtgaaggaacatttccccctttctccttaattagagcacttggtatttgtgatgaattaggctgactcggtaacctacaggacataaatctgcagaacaattctattttccaattgctagctaggttaacacgccttaataaacaaataaatatctccatatggactattatccaaagcaattgtgaatccttgcagtacggggcagcgtgtggtggtgacatcctgtgaatggccgagttctgaggccgtcctcgagcgtccatttgagtagtggcctaaatgaggggtgcccttcacggatggaataaggtaacattttgattaatgcaatgagcatgctgctgaatgttacagtcagtattaaaatggcatgtgctaatttaaaatcttagttgtcattagattagagtgcaaaggagagccaccttttgagaagacttacttcatctcagggggcagaaacaagcctgtctctgtttgccactgcaggtgtctggccaacaatgcttgggctctgaaaacatcctgaaatacatatatatatatatatatatatatatatatatatatatatatatatatatttttttttttttttcttttcctaaaacaacatggaaaggtactaagcagcttacttgtggaaatgtataaaactaaatcaaagactttaatacaactgcaaaaagtcacaaagtggaaaaagggcagaattgaaaagcaatgtgattcatgtctggtaataggtttttgagtttttaaaattttttaaattttttattttttgagacagagtcttgctctgttgcccaggctagagtgcagtggcacagtctctgctcactgtaacctctaccgcctgggctcaagtgattctcctgcctcagcctccccagtagctggaattacaggcacctgccaccacgcccagtgaatttttgtattttgagtagagacagggtttttgccatgttggccaggctgatcttgaactcctgacctcaactgacctgcccacctgtgcctcccaaagtgctgggattacaggcctaagcgactgcacccagccttgttaataggtttttaaagatgggtatgcttttgtggccaaaatgcaaaagacgtatttttgtcagcaactaaatattatttggaatttcttctcatgatctctagaaaatacttgatcaggaaaaataacttaagttatcatttttacctttttccaattgcaactctttttaaagagtccaagtaaatcttttttttttttctcctgattgtctttggaagtattgatccagaaatacttcatttcaatggttacaagtaacaataaatttaaaatagcatctgatttcctacaatgctcatttctgtatttatttgaaaatgagacttgcagggagccattatccacactgtgctttgacgccaggtggcttcgctcctggttctgatgggcagctcaagtggcgctggagcttttgctggccacacactcactggaggaccctgtgtcagacagtgcatggccgatgacacagctgtggtcaggacctgccgctgccctttggagctcacagtcccaaggggtaggcagatatgtgtggccagataatgtactaagtcacactgtgttcacctgaagttctcgttcttcatgccaaagggcatagagccctttgtacctgtgcagaggacgtctgcaatgccaagagcaaagggctcctgcagatagaccagggaccgcctcctgggttctgtgaaagccgcagttccccaagtctcctggactcctgagaggaaagagagagtcagggacgagtggctgtgaggagaagagagaggacagggtaaagacggcagataccaaaagaggaagaaaggaccagcgctctgcacgcactgggctcagctccctggaagcccccatgggaggtggccaggtgtccacagggagggctgcccaatgggccccacgaggcagctccactgggcatggcagcagtggagcaaccacttgggaacacacaggtgtggaaaagggcaacatccagagatttttcggattccatagaggcctccctgaggcttgggtgatgccggggaggaaaagagagccgggaatgctgagatggaatttgctggtcagccaagagtcagatttaatttgattttaagaaactaaagaagtatggcatttcttgcacatttaagtttgtggtttaaattttgaactcaccaaaacatgtacagaaatggttagggtgcattgtgaggactgaggaacaagactaccctgggcagaggcaggagtgagatcggagctggggaaaggcctcctgtggaggggctgcggggagcaggctcttgagggtagagtgcaagggggttgggtggagaaagatggggggcattctcaggcactgcgttcaggagaagggccctggaggtgaaacaaacagcttctcttttgtcttctgtggtttctcagcctttcattcggaaacacttggcaacatgggagggagcagagggccgctctgcaagacgcgaggcctggtgggaagccaggcgagaggagcagaacatggccacagcatgaagaaccatccctgcaccacacagtagagggtgagcagatgcctggatgcaccccaatcccccagcaaagccctgagctgctttgagcctcagttacctcggtggcccaatggagactgcactgtctcccggcaaggctgctgggcagctcacggaaaggacaactgtaagatacaggtgttttctgcctggcggtggtgagggctcctcacatttttcttttatcctaaaagcaacaaggagcagcagcagtttttagggaggagcatgcatggcacgacctacgtgccctttactcatctggcaagggcccaagctgagtgaaatctgacatcgtagtagagcaggtcctttgggcctatgaggaggcagaagggaaggaagaaggacggcttccctggtgttgactcagcaataaagctttcacctgcagagaagggtcgggatgctgacagcagcccactgattgcaactcagtctctcttgttccagtttcccagacgcgtctgggtcctgggaaaagaggactggagtgtcaaaatggggaagaatcatttcattctaatctgcactcgatcttagccaaaagtctgagaagcaatttccattctaattgtaaaacaagtggcaagagctaggcatctctgggactcctttaacagaagacgaacaaaggggaagaccattgcctctttctctcaatccctttcctctcccctcagctcagagctccaggtggctccagcagctctgacatcacctgcacccatagcgcttgacagggcagcacctgaacgcttgtaagtcagacctgacaggagcacctgtgctgcttggcagggtggtgtggggcgaactggagtgaatctgtccttgggtacatggaaaacatactctaaggactcctgaaattgaagaaggcttactgctgtgaccatggccatattgatagctgtaggcaggctgttggggtgtggtgagacgggcattataagacagggatagcagtggcacagaaggattgatgtggacaaagagccacagcaaaaacaccagcgagaagacagctgccatgatttaaatgagagaatatagggctctgaaatttaaaaactgacaaaggtgacacaaattcttcacttaaatttcatatccctgaattatctgcataaaacaaagggtaaaagggagaaggtggattttaatcttagcatggaaacacccacatttaaatgtaaagatgtgaatatattctaagtattttaaaaagatatattcaaaataattaaaatgtttctcattttaaagaaataagatgtcagatgaaagatgttggacagttattcttgaaagtggtctaagattgtttacaaatcatgtctgcttggagaaaacatttttcaaaaaaatttatttaaaaaaaattttcattttaaggctgttaaaaaaatttatttattattacaacttttttttgtagagatgagggtcttaccatgttgcccaggctggtctcaagcaatcctcccaccttggcctctcaaagtgctgggattacacgtgtgagttacccaccgtgcccaatctcaaaaaaatatttaataagaggaaaatccatgtattggctcctatcaatcactgcccactattcagcctttctccccaattgactaagaaatttatgtcacatgatagaagtgaagaaaaattaagtatattcacgttatatctaaagctttgtataatatctaattattccaacaccaataaaatctgttatcacctattagagggaaaaaatgtccactatttagaaaatgtatagagaaatgacctggaaataatgaccattctaaagacacatgtaaatatctatagttttaaagcatattttaaaatgagataatttaacaaataagagttacaatgataaaacaacaattatttcactaaagtctatattttaggtcatagaaagtgcttttttaaaaggaaaaaaaaaaaaacattcctgtgcagcattttacagatttcaaagcatcattaaacaactgagaagtgaatttcttttcagaacaggagaggccatgcatctcttacaccacatctccatctatttcatcagcagttgtgttaaaattcctagatgagggatcagaaagctttggaacttgaaatcagtttgtcctcaagactggtggttaacatgatatcattgactattggaaacaactgaaaaactcttttttttcctattagaacatcgaatacttctacagaatatttctattctatgttctaatgtaaaaatattcattttttaaattttttaattcttttaaggctttaaattttgacaggtttgccagtactcttgctcggcagttttttctacttcatctgttagtctgccctcctccctgtctggaatgatctgcatagaaaggattgtgcaaattctcatcggccacaaacgttctgctcacatgtaccagatgaccctagtgccttgcaagaaacttgagacccatcgcatgatttctccagaatcagatccaacaggatgcactgctcctgctgaacaactaagaaacgttattttcaaccccagcttgaaaacttgatagatagtgttttcttattagtaatgacccactggctaagcccttttcagacatctaacaggtcatgagtatgtgattatcatgctcaaatttacacatatgaggggccctagtatggtttctctctttctatatagtgcaaaaacctaacgattaaatattgatttaaaagagtgtttggagctcagccagtaattgtgcagcccggttcctaacaggtcacagccaagtacgagcctgaggctcaggggctggggacccctgatgtataccactggcgagggactctaataatgggaaagactacacatgtatgatggatatgagggcaaagggtatatggggtatctctgtaccttcctctcaactttgctgtgaacccaaaactgctgtaacaaattaaggtcttaaaatacatatattacttctcttcatcactgaggtttctgatacccccttaaattttgtactccaggccaatgcctcagcaacctcaccccggtcccaggcctgtggctcatcatatgtttccaaatcaccgatgggttttgcttctagtgacttatgtaaatataagcattattttacaatgtttttaaatttaatgacaaaaatactgcacactcataaaaagtaaaaagtagaaaacagcaaaaaaaaaaaaaaaaaagagtgggtaaattgttgactggtcatgattttgtagaaaatagtaaatttgagagcataagaagtttgagatcagctttgaagttcctgagttcaggtcattagcatttaattatcaatgccacctttcagccatggttctccatttttataagtggatgcctagagcacttggtgggatttcagcaatactttcatagctctccaggtgatgtcaatggctagggtaaatggtgtgggtggcatgatacagaacatctgactttcccctcattcttcccatatgtttacatcctacttatctacatagatcaaccaataaaccctttgcgtaaaaattacatacacactataatgctcttataaatcttcacactttgttgacacttagtaaatattaaaaaccataaatcacagaaaaaatattattaagttttgttattatgggtccaatctacccagtggcttaccatgatctacggaataaatttcatactccttagatttgaattaaacatccccagagtctgttgccaagattttccagcttctttcaaactacttcctatccatacacagggctccagtgagttaggaattatattctccgagaggaccctggaatgtctgccttcgtatctttgctagttttgttcctttgacttcaaacacacttagcccagactccctattcaaagcaaaccacagccatctccttaggaaactttctccattccccacaagggcgtgcctccatggccccacactgcacacatccctacagtaccaggaaccacgcctgaccttggagctggagttgtttgttactggctagtttcctccaggacaaagtaaactcactgaagacagagaaggtttcttatagcttcttccttgctgtgcactttatagagaatgaaaaagtgttccattgaatggaatagaatcaagaagtcatgtttgggtagtagaaatggaatggacaatcctcttttttaaagaatacaacactggccagtcacggtggctcatgcctgtaatcccagcactttgggaggccaaggcgggcagactgcctgaggtcaggagttcgagactagtctggccaacatggtgaaactctgtctctactaaaaatacaaaaaaattggccaggcttggtggcatgtgcctgtaatcccagctactcgggaggctgagacaggggaattgcttgaaccagggaggtggaggttgcagtgagccgagatcgcaccactgcattccagcctgggagacagagagagactccatctcaaaaaaaaaaaaaaaaaaaaaaaaaaagaatacaacattaacaaaataagatatatctttttttttaaattaaaaaaaaatgtatgttttgagatagagtctctgtcacccaggctggagtgcagtggcaccatctcggctcactgcaacctctgcctcctgggttcaagcaatttttctgcctcagcttcctgagtagctgggactgcaggcgcgaaccaccacgcccggctaatttttgtatttttaatagagacggggtgtcaccatattggccaggctggtctcgaactgctagacctgatgatccgcctgcctcagcctctcaaagtgctgggattacaggtttgagccaccgcgccgggccaagatatatctattaaaaatatattaaacatgttttcctgtctttagagtcatatcctgttgtgtctgtcctttcaaatggaaaccttgacacagctgcagtacactctgctttaattacttacttaatttgaagaatgttaaaggtaaaattgtaataagaaattgtttcccaacatactttccttaggttccctgctacctctttagttttgtttttttcttttcattccatatctccaatccacacagaatgaattttatttccttccctcgtcagtctttcaacctcccccgcaattctcaaccctgcaattcaacactctgctcccaaaccagccttcttgtcacttccaactcatcttcttatttaagctgcattgcttttccgtgaattagactggatcttaagtgaaggagacacaaaccaactgcaaatgatgaataaataccatcagtggggacttagtgaatggctaggtcattttcacccccagtgccaggaccatcatgggaaagtcgtccttttggctgttccggaagaagtggcagcatagtgactttctcctttccctgtggatagcatgcaacaggaccaaagggagtattctgggctcccaaaacatggggaagagcctatgctctcatgtttggacattcctagcaacgggttccattaaaaagctgtcctaaactctaggcttatcaagacttttacataaaaagactattgcatttttaaaacataaatttcattcctttatgaacttcaaatttgctgctactaaaaacatgattgctcttgtttccatgggacttttcttctagtgagtctttgtggaatgcctgtgatggccaggtactagtatagcggcgcaaatacaacagcaactagtcagacacacctacactcaaggaatttacatttgtgttagtgaaacaggcaataaagaagggaatgacaagcccacctttttgctcttgttcaccactcagtgaaggtccatgggctgaggtgggctgtgggtctctttgtctggtgcaccttgttctgaagcaagggcatcccaacagacaacagctgcccttgtgtggcccaaggctcaatattgtccttgacgtggacatggaaggaaacacagaaatttcaacctctgcttccgagaaatgattgccaattcattcagaggttagtctgcagagctgactgagatcaccaagggaaactggaagcttattgccttccaactttatttctttgagtgcaaagcctatgaagataatctgttctcagtcaaagagaaatttaatatagcactccctgatttcttctatttaattcatagtctcctggcaatccctaaagtacattcactgtgtgttcaagttttgccttgttgtttgcttgcatcaaagagagaattaaattgtacacacacacacacacacacacacacacacacacacacacacacacacaaagtgaacccagatcccggttccctcaaggctggcctaaaagttattgttttcatatcaggtttaatcaacagcttctgtcatattccatatgccacctcgttctattgctaacacttttattttctaatgattaaccttaacacacacaattttgccttagcttagccattttagttatataatcattctgaaggaaaaggtcaaatttatgaatttctagactgttcagcaccctgtagggactgtcaaaaccttttaaaataaaagtgattattttccatgccaagaaatcgctgggtcattgggaacagtgggcgcatcttgcttcccatgccagcatgccctgagtgtccctggccaatgcatttctaggggtttccatgctagatgtcctctttagacataaacagttttcacgcccagcttaatcatttatccgagggttctttaaaatgtgaaagtcattctataaagaaaaatttttttttttgagacaagagttttgctgtttttgcccaggctggagtacagtggcgcgatcttggctcactgcaacctctgcctcccaggttcaagtgattctcctacctcaactgcccaagtagctgggattacatacaggtgccaccacacctggctaattttgtatttttagtagagatgggatttcaccatgttggccaggctggtctcgagctcctgacctcaagggatacacgcccgcctcggcctcccaaagtgctgggattacagacatgacacaccgcagctggccagaattttaaaatttaatttagaattaaatgattaagaaaaataaattttgcagctgaagatggaaattccatgctctaacttccccatgccaccagtgattacactgtaaggtggatcctaaaacatgaggtcattatagggagacaccactctgtgccttggtgtgagtcccccactctctctaccagactttttactgtcttgtctttgcctttccattcagtcagggctgtcctggcaatggaaggcactgctgcgcaccctccttacactctggccattgagagtttggtgtgtaaaggacagcagggatttacaatcccacagacacagagtttgaattggaactttcctctaatgtcagcaggctgagctccattatggacacatcccagagtccttacaagaggaagaatctggaagatgctggaatggcttggacttaaagagccttctaacctgactcactgttaacttcctgtgatggttaattttatacatccacttgacaaaatcatgggatgcccagatatctggctaaacattatttctggttgtgtccgtgagggtgtttctggattagcatttgagttgagaaaagcagatggcctccccagaatggatgggcagcatcccatcactaaggacccgaacagaacaaaaaggcagaggaactctgaattttccctccgcctgacctcttgagctgggacatcaatcctctcctgccctcagcactcctagttcttaggcctcagactctgactggaatgcacaccattggctctccagctcccaggccttcaaacggcatcagcagctttcgtatgactccagcttgcagatggcagattgtgggacttttcagcctccataaacgcaagaaccaatttctcataataaatttctattaatctatctatctgtgtatcgatcgattgaacaatccatccatccatccatccatccatccatccatccatccatccatccaaccatccgtccatccatccgtcctcctttcctttccatccatccatccatccatccatccatccatccacccacccctatcctattcctatctatccatctatccacctattcctcaatccatctatctttcctattggttctgtttctccagagagccttaacatactgctttagaaacctccatctcttccacatactgcagtctaccagttggatcttttgtaggcttcaaccctaacctctcacttcctgagttcagtgcctggaaaaacagcctcttgggtctaatcttttcttccgaagcaaggcccctgcaggcagctctcacccgggtttgccaggcttcatggcaggttcagttctacttttactatatctctaacccataagttctgctttccaagactttttctaaaattggggatcaagaagtgctggggctgaaagcctaacaaatatctaggaaggagaatctacttaacatggggaataggactttctgcatctctgtttttgaatagagattatctggagcctgtctaggttatctgctcatgctgaaaaaggcttctctaacacatgtattttctccacaaggcacatcatagccttcttgcacttaggaatactagacagcactatgcttggggggcattttaaacagtaagatcaccaacaaaaagcacaaaaatgtaaaaaccacggtactaaataggccatgaaaaggacatccttgttcatagcatgagagctgaaacaagaaggcagagcattgctctttcatccacagcagacagcaagagtgttgggtgagtcaaactttgttgctctgcaaatgtcgatgaagatcttaaaggcgtctggaatactgattttggggttacaaataagacttagcgagtgggcaaacagcaaagacagaaactgtgatgacactgtcatcacacactttgaatacaatgttttctgagtttgccgatttgtggactatcctgaatttgtgctcaatttttatctctctccaactgcttatgttttgcctctctctccatgtcaacagattacactctataagggaaaatggaaataaagatgcaggcgaaacttgaatatcggtgtgggttttgcatggcaaacactgacgccaaatttgcctctactctgaatgctcaagttgtgggagcgctactttaagatggaaatatgtgctctaagggaaataataaccagaataactttagttttaaaattatataccaagaggaaaaaaaatagtaaaaacccaactccttcttactaagtttttaaagaaacactcaaaaaagtaaaattaaacccccagagtataattcccattctaatgaccactgagcacgtcattgcttttggttgataaaataagcacatgttcttctctttacctcgaaaacttgaatgatttcaaagacaacaagtaggcagtaatttaaagtctttttttgtgagcttgccattctgctcttcgtggggatctttgtgatgggaaactgtaaatacagttttagaagtaaaagctttcatcttaatgactataggattagaaaaagataagaagctactataggaaaagtgggtgggctgggcacagtggcttacgcctgcaatcccagcactgggaggctgaggggggcggatcatttgaggtcgagaatttgagaccagcctggccaacatgttgaaagtgtgtctgctataaaaacaaacaaaacaaacaaacaaacgaacaaacaaaaccaacccccccacaaaaattagctggcatggtagcgcacacctgtaatcccagctacttgggaggctgaggcatgaggattgcttgaacctgagaggctgaggttgcagtgagcagagatcataccactgcactctaacctgggcaacagagtgagactctgtctcaaaaaaaaaaaaaaaaaagaaaaaagtggatggatattaccacatatttttaaataaaatttagcaatcctggtaattttgggttcttgattttaaacacaatatatttctgattataaaaatatttttctgatcataaaaatagatgtctttagaattaaaaaaacacataaacataaaaaggagataatttaaaaagcttataaaacatagaagaaaaactagccctaaatatttctgaaaaccaatataatgtcattttaaatggcacacagggcaataccaacatagatctctttgttcgaaagatagattttttctgtcttttaatttatctaaaaataaatcatggtgtatttttttccctccattctttacaggagtatgggtgttttatcttatcagatttccttcatggggaaaatgtatgtgacttagtcacccagccaggtgatggttgactacaggtggaccaaggaatgaaagttggcaagtttgggcactttttttatattcaattctcaggaaagagatacccaaaattatgtgtctctgctgaacaatacatacaattatgaccagcaataggagttgtggaggccatagctctggggttcaaaatgatcctgaaataaagtattagaaaccctctcatttctttctaatattggaaaagtcacatgtcttttaaaattaacaaccacattatcatgagcaattctaattttccccaatgtaatcatcacgaaaacatttgtgattgacaggttttctaccccagatgtaaatttttggaaatactaatatacaattacttttcataatgggtgcacagctactaaatgatgtatggccaattcccaaagtttcaaatggataaatattagtctaatgtgctcaatcaatgcagagaaatagctctaagcccttttcctgcaagggaaaatatttaccgtatatcacagatagattggccacaggcactaagcagtgatggagaagcctagaaatccttgtaaatgtccttgtacttcagtgaaggacatcctcaaaagacagaaaggaaaaagaaaagaaaactctgaatggtgttacctcaagcattctctaaaacacagcacttagaatcagacctgcatcagcacgttgctgcttgacacacgaaagcccctttgcatttaacaacaacacaacaaaggttacagagaacttttgatatccttcatttaccagattatttcttccatccatagtttacagcactgaattagagattgttaatagtaataataataagaaaaaaagattttgaccatggactatgatgtaacccatcatagtggatcaactgtatactgagtctgactagaaaaaaatcaaaacagtaaaataccaatcagatgcacttcacataatgttgtccttttaaattttgaattgtggtacaatatacataacgtaaataccctttggggtttttttttaagcaattaggcacacagtgtgcaatttataactgctatgaaataaccctacccctctttatttgggcaaaggtcactatggattttttttttaatttttaactgtagaaaaggatggaatttcccacctttccttaaataagaaattccagacaatcacatcatgtccattacatcccaatactcggttttgactaagaactggatgcacatctatctaactgtccaaatccctttttggattctcaaatagtgaatcttcttggaatcagtggttaaagttcccactttttcacctggaccgtatgggtgacagactccctgtttgctaacatgaggatgacagttacagatttcaatgcaaactaaggaagaattctcagctgagttgtgctgtgtagaaaacagaattggcagctttgtgaagtgggggctcccagtacttagaagtcccgaactgtggcttgacactcactgcgggatcagaatctcctggtgggcattcactaaactcagatgcccagacctcatcattaattgtcctcggtgggacccaggcatcggcatttcttaaaaacctccccaggcaattccaatctacattgaagcctgccaatccctgtgtagtcacaggctacaggctcccaggtcaacccaggtggcctctgacatccctaccagccccaggactgtggactaggacacggttttgcctaatgactgattatatcctgccttggttaagggcaatagaattgagaagattagcactgcccccaactggctacaaaaggaatggaaaagctcaaaggaagaaccatggaggtagaatataccgggagccaagaaaattgttttcaactacctgaaatgagagaggttcctctataatgatgaacaaatgacagagaaagcagttttgatctaataatgtccagtccaggggtaaatggggttcttccgctcctaacacttttgttgctctttgcccacttcttggtgtactagtaaccaccctattgggcactcagtgtcttcccaaatccacatgtgttctcagcaaaggcctgatctcagttatttacaccagcaaagtgaatgcaagtttacctggtaacctcactcaaaagtgttgcattttgagccttaactccacaaaatgaagagtctgaaccattttgaaaggaacctaaagacaactgagaaggcaaggacatctttgtagagcagaagtcttttcctgtaagtctgagatctttccatagaagcggctgctagagggaaagatgagagacagggtgaggattaatggggacaaaaccctggaagagaaagttggaaacggtacagtcaatcatgagagcacaggacatttacagagaaaagagtgaggaggtgtttttcaattccataaaatagaaaataggaagagtgagcttagatcatagcgtgatcaattttaagcaaatagacgatgagaaatacttttctgattacatagtggactgggtggcggacagaggctgaagaagtgtttaaaaacaggccatgcattctcatatctgcatagaacatccaagcattacatacgtctctcattattccaaagcattacatacatctctccttagaagagcgatgaagctataggacacaagacccagtccaggatacagcatgaaagagaagatattaaatagctagcagagagtcagatgacaatcagtagataaaaagggcttggaaatggtaagcattatagaattttggaaaaccatttttttcccatagttaagagaccccattcttcaaggccttgatcctgaataaatgtcctttcagggttgacaccctatttttatgacttaaaatatttggacgggatatttggaagtttctaaactctgctgaactaaaatctgctgaacaaataaagggaagaactctgttttgtaccatgtaatttacttaaatgccccactacagtgtaaaagtagactagaccattcacttcatgccctcaggttttcaacatgccagatgtccagttgaggaacgtatctaaatctaaggatattcctaaattcttctgcaaagtttcaaggctattggtaataacatatatttagtggtcaacttggaggctaacgttggtctttctatttctgtaacagcttgcacagtatcatgcaggcatacatgtgagtctagatgtagatctagacatatataacccaatcagtgcatttcaagtatctaattctaccctcttacaaagttttatttattgttaagattatttcagaagcaccatagataggaatatgtatgttaaatttagctaattcatgctattcacacaaatgcactactactttgtgattttattgtaaaaaatgatatttgcatgctcagtcagcctcagtactaagcatccaacttcccgatttgctgattttttgtaggtagaactgtgcatgactcagaaactaaagagaacatgtaagccctacattctttcattgaaatggtgattgcctggatcacatgcacagagccagtattcattgcacataatgtagcttccctgttctcagtgttccctggatctggcagcacctcagggtcatttaaactacacaaacttttcaaggatcctgcactttctgtctgtgtggctccgtgtgaagtagcctgttagtcccttagcagcaaagtatgagtggatcataatatagtatctgaaataaggaaactataagtgattctccacttgggatgacacctttcttgaaactcatcctctggtaatgtggaatttgaagagctgatatttgtaatctctaacttttaggagagaaggaaagacaatgatatcatggaatgcacacattataatatttgctgtgaattacgtgcttcctatgaaaagctacaaagatgaaggcatctctttctctatgtagcaactgtgctctagcaggctgttgcttcagtaagagcactctttactcacagcccctgtacaacctgggctcctacaataaaatattccaaatgtaagcttgccctctcataaagtccaacaaattcagtctctagtctcaacgttctttatctttgttgttggttaatttgctcctctgaactgatagtatgtaaaacagtattctttctctccccaggactgaatagcagaattagaatgtctccctgcctctcttctctaatcttgtaagccattggtaagttcaatatctgtttcaaacacattgtcattgaccattatccaggaaaactcaattcaccatgacctttaagttgaaaatactctttaattaaacatcaaggagggacaattactgaaaatcaatccctggcattttctaattgtggaacaattttttaaatgtcagggtccatgttcatgtaggccattttacatttttatttttcatttttattagttttccctcaattctgtatttatagattcattactcccaacaattacccttataaaaggttccaagtgtttcttttcatgtcttggattaatgggccataatttcacacctaacactttagtaaagaaacatgcttacttataaaacatacaacatgggtcaaaatccaacaaaagcttctaatatgagactaattaaattaaattgtgattagattgaaggagtgaatcaattaaataacaatggcctaaacttcaagttacacttaaagatctatatatttaaaatgtcaacaacatgcaaaaaaaatcacaccaaatacaaatatgcagacaggctacatgtagccagaaggatatagtaggataatgggccttacagatcaacaaattggagaatttacaatggagaaaataacaccaacacataaaaatactatacaagtcaagcaaaggtaaattattcatccattgaaacaaatatttattcaggataatgcctagagtctaaatttgtctaagaaaccacagtagttagaataaatcctaatttggagaaattgatcaactgattctaaagtttatgtggaagggcaaatgacttagaatatgtaaactgtttttttaaaaggacaaatctgaacaactaacactatctgcttttaagacttattagaaatgtacaattatcagaataatgtggtattggtacaaacagaatagatcaagacaaaaggatagagagttcatagatagaacctcacatatatggacaattgattttttgacagaagtacaaaggcaattctgtcaggagaaaacagtatatttaacaagtaatgctaacataatttgatattcatatgcaaataaactttgattcccactgatttgcacaaaatgaataatagatataaaggtaaaacactaaactataaaagttctagcagaaaacagaagagaaaagcatgatccataaaagaacaaactgacaaactggacttcatcaaagtgaaaagatctgctctttgaaagacactattaaaagactgaaacagcaacctttaccttgggagaaaatattttcatgtatctgataaaggacatgtaactagagtatagaaatcactctaaaaactcaataataaaagtgtaattaagtagtggcaaaagagttgaatggatgcctcacaaaagaagatacaagggtggcaaatgagcacatgaaaagaggctcaacatcgttagtcattaagagaatgcaaattaaaaccacacctattagaataaaaccaaaatttaaaacatgaagcatatcaagtgttgagaatgaggtggaggaaatggaaccctgattcactgctagtgggaaggtacaatggtacaaccactttggaaaatagaaacatacactatccaaatggcccagttattccactcctaagtatttacccaatagaaattaaaccatatgttcataaagttgtaaatagtcataacagttttatttttaatagttccaaagtggaatgacccaaacgtccaccaacaggtaaacggataacaaactgtgaaatgtctccaaaagaatgaataaaaaggaatgaactattccattgataagttacaacatggataaccttaatataatctataatctcaataccgtgtatctcaatataattaggctgagtataaaaagccagacctaataagagtacaggttgtattattctatttatataataaaaatttcaggaaatgcaaagtaatctgcattgacaacaagcacagtggttgcctatggatggggaaagacagggttgtgtcagaggaagggattacaaaggatgaggaaactcttgggggtgatagagaagttcaccgtcctgatggtgagggtggtttcaccgatgtgtacatacaacaacatgtatcagactgtacactttcaacatgtgcagttacttcaactatttccaaattacataatcctttgtttttccctcctgtccattatctacaactttgaattggttggagagctttagaagcctttgttggacactattagtggcctgcagggtctgcagtcatgggtatttctaatcttccttgacctgctttgtcttcctttggttcccacctttgttgctgttataagccctttaatcactgcactactagatgccatctagtaggacaccatgttccccatctttgaacatcttttccatcttcttttccaattgcagtgcctgtttggccctcgtttacctccccagctctccttggctatactaattcctcttaattccttcaacataccctacttcaccttgatttggggtcttcttattagaagttctctatttctggaaaactttccttctaacctctttgatcctggctaattcctacttattctttaggcctcagctgcatgttgttttcttgggaaagtccaattatttctcccaccaaagtttggcttcagtggccctgatagaagaccctgaacttcccatcagcacttctccactcaattacattgccctgtttacttaccagtattcctccagggcacagggtcacctcaattcagatctgattagggacctgatgtatatcaggtaatggggttagctgttggaggctacaacttccccatttcctggagtaaatttaaggatatgtccaactaaaaccaaaccaaacatttgtttcctgcctgtgagcacaacataagaaattcaaactaggtgaccaactgtcttattaaacttccatttgtaccaaaagcaacttcttactgagaggacattttggtcctgagaaattcttccctgtagtgttttaggataaggacatttggaatttgaaattgcagtctactgtgtcattttctcaaacctggtcttattacactctagccaaagaaatatgaaatgaagatctgatccaatttgggacccccaaaaggaattgtaatgaaggttatatttcaaattatgtaggctggttacatggtcagtatgtagcagctgactgcctggtgttttattttgtttgtctgtatagatatagcatatctaagaaagacaacttcattttatagagttagaaaaacaacccttgagatttattaggaaagtcttgtgccagtccatcattcctgtaaatatacacgttgatcactaaatggtaagaaaggtgataggaactgaaataaccaaagtaggaaaatgtcacaacaaactcttcttgatcttctgcctgtccctgtacttggctcactgtgcaggaaagagttcttccttgggttaaacaggagcatgctcagcctgaagcagagatgatatgcctttcaattttgaaacacagtttccattgtgtgtgacccattatgtgtgacctcatttgtgggtgattaaaatgtgagtgattagaatgtgatgtcctcatagttactctctcactccctttgaatttcttggaataagtaaaacaataatgtaaaatgaaagttgctgattttttatacctcagatatgaattgctgataaacattttatttagggcacaaccaattcatataaatttaaaagtaaccataagaaatggatttttcagttacatcatctgtagtttttacatttaacctattacaaaataataaatcattgaaccatattcttttcagtgtcataatcaatgccagacaatcaattaaaaatttaggcatatgtattaactagtatagatcaatgtggcttgaatacacaaaatacgtccaaattctgtccaaggtaaataattatgatgctacatggttgttgtgtatatatttcacataaatttagaaattagtatttcaagagacattacaagtcattatgttcattctacgtctcaaacatattatgggaacagaaatacctttatttataaatagcatgtatcccaaaaaaatctatgggaatttgaatggcgggcatccagaaacttcatgtggtcgccagtgggaagtatatttttgacaagccgcatacacttagggccagccacggaagtagtgccaaaccaatgatgctactgcacttttacttagcttattgtgatttattgcaacagttaattctggctttctgtttcagaatgatctagtcatctatatttataatcattttaaatgaatatgtatttcatgttttcagttattcatgatcccttaaaaaatataaatgccttactgctagacacataagaagattaggttctataatagtaaaaatgccatcggaagatgagagaagagaaattctaccaaaattaggtaaaaagataaatttttaggacttcaaaaataaatgcaaggtggaagcaacaagccaagtgttcactgatgaatgactggatctgcagcagcccatccatacaatggaatactgtccagccttgaaaagagggaaattctgacccagcctatgacacaaatggaccttaaagactatgctaagtgaaataagccagtcaccaaaggtcaaataggtatgattgtatgattccacctatataaggtccttggagtagtcaaatgcatagaggaagaaagtaggatggtgaccatgagagaatggggggagggggaggagaggggaattggtgtctaatgggtactgagtgtcagtctgggaagatggaaaatgttctagagatgggtggtggtgatggttgccaacaatgtgaatttactcagtgccactgaactgtacatttgaagtggttaaaatggtaattttaggctatgtatattttaccacaataaaacaataattagaagatataagtgtaaaatgtaaaacatgtaaaagtgttaaaagaaaacacaggagaaaaatcttcatgacctggagttaggcaaataattctgaggcctgataccaaaagcatgagccatagaaataatttgataaattgtattttattataataaaccaattttgatctgcaagaggcactattaaaagaattaaaagactaactgtaggctggaagaaaatatgtacaaatcatgtacctaccaaagaatttaaatatataaacaatgaaaacctctgaagattcaacagtaaaaaaaaaaaaaaaagaaaacaatttaaaaatggataaaaagcaggaggatagcttgaggacaggagtttgagaccagccttggcaaactagtgagacctattgctacaaaaataatttttaaaaaattagccaggcatggtagcacctgtaattctagttacatgggaggctgaggcaggaggatttcttgagcctaggagtttgaggctacagtgagccatgatcactccagccagggcaatggacagagcaagaccttgtctctaacaaacaaaaaacaaacaaaggataaaacagacattttgccaaaggagatatataaatggcaaataagcccatggaaagacaatcaacatcactagtcattagtgaaacataagttaaagtcctgaccaggtatcactacatgcccattagaatggataaaataaaggccagataacaccagggctggcaaagatgcagagcactaaagactccaaatgacaagattgtatacatagaaaatccaaaatcatacaaagcattagagtgattccctgacagccacacgattcccacctcacctctgccaggcttagctctcatgttgacttttcagggaaatctccaaccaccaccttgtttaataaacattgtaatgcctctccaatccattctctcaatcctaggtactttatctcccctctacaaccttagcatatgaaactaaagtcctatttacataatttgtatgtgtctagtcagtttctaccagctggaatgtaaaccacatgaggacacacatctctctctctctctctctctttttttttttttttttttttttttttttttttttttacagagtcttgctctgtcactcaggctagagtgcagtggcacaatctcagctcactgcaacctccaccttccaggttcaagtgaatctgctgcctcagcctcccacgaatctaggattacaggcatgcaccaccacacctggctaatttttgtgtttttagttaagacagggtttcaccatgttggccaggctggtcttgagctcctggcctcaagtgatccaccagccttggcctcccaaagtgctgggattgcaggtgttagccaccacgcccggccgaggacatgcatctttgtttagttcagggatggaaagcagagcctgtgtggcatctagaagacggaacactcccagtacatacttgctgagtgcatgaaggcagtctcaggttgtattctctccagctgttggactattttccccccatgaatcagactaaaataccccaccactggtttggtcatccgctcagctaactaacctaatttcccctcatactctgactcgtgctgccatctttcgtcagtttacctgtgttctctacttaaacctcaccttagattttatccactccctgaaaattagctttcttggtttttcttctttatctcacccgctgaatctggttactctgggattcgtttcgtgccctttttacagtcttgtcccacaggtctcatctaaatcaagggctttacaaactgtcaaatataagcagaaaatctgcacacccaggtcctccggttccccacctaggttagagctgcctcatggtcatctccctgagcctgtgcagtaccacaccaagcccaaaagtgcctcatccggtcatttctgaccagtcctctggtctgacttcccgactgtatccctttctctgtatccaaatgattcttcccatcacccagggctcaaacgttgcaatgatctatgcttcctcctccatcatacttcacatctgctcagctataaagagggttgttcagggtccctcagcagtaccacgtttctcagttacatatgtgctttagaatctacaggggacttttcaaagaatgtggatgattgggctccatcccaaatatcctgatttaattggtttggggttgagaataggcactggcgtttcttaaaggttctctgggtgatgccagcatgcaacacaggatggaattcactggtgatgactatgagctttggagtcatgcatccccttatccaaattattgtgggcatgactgtttgatatgctggagcctcagatcctcaactatatatagaggctcctcgacttacaatgggattacctcccaataagcccattgtaacttgaaaatatcataagtcaaaaatgcgtttaatacacctaacccaccgaacatcacagcttagcctagcctaccttaaatgtgctcagaacacttactctgccttgaagttgggcaaaacaatctgacatgaaacaagttttataataacgtgttgattatcttatgcaatttattgaatactgtacaaaaagtgaaaaacaaggttggattggtacttgaagtatggtttcaaccattgtgtatcacttttgcaccatcataaagtcaaataatcatatattggggactgtctgtgtagggattctaacatcagcctcaaagggttactatgtagattaatagagataaatatttgaaatttctaatgataaacggtaggtccttgatatataataattctctgtctcttcagttttcccatctgtaaaatgggaataaaagtactaagttcactggctgcattgaatgaaagtaaagttcccagtgaggcacctgtccctaactataccgtaccaagctaaagggacagatggaagacgctttaccaggttagacaaaggtttctttgtaaaccttgcttctttgtccattctcattctctgcatttctgtggttctactggtgcatacccctatgttgttgtaccttcttagcttctactccattgtcagattcacattactaatgcagagctccaaccgtgtcattattaaaactcttcaatggctcttcactgaccaccacactaatcatatgctcctcctgctgtcactggaatggaacaaatcagtccttctagccttgcttccagtagccccactctttcccctgcataccagataatgtggcccttcgctgttccacacattgcagcccactttcattcccctcctttccccccacatcctcaattctacctaacaaatctctacccatttcgattcatcctgtcctaatgcactcaacatcaactggatgctgtcatggctttcacgggatccctgggggatatcatctgaagaagccccacagaccaattcacacctctgtgccctctctcaccagcatagctttgcccatgcaagatcccacccgcttttcaggacctagctcaggagtcacctttctgaaggaaactgtcgctgactggcctcagtgggtcttgtgcccaccaaggtgctcccataacaccccgggttcacgcctctcaaaatgcatctcggacacactgtcaagctttgcttcactgtcatttgcttcttgacagcagcaagggtgccttactcatctgttctaggatgcaactggcacgcaggaaggaatcgataaacgaaagacaaggagagaaaagcagcattggaacctgtgcttgcagtattccaggtgactttttttttacagtctctctctgtcacgcaggctggagtgcggtggcgcaatctcggttgaagcaattctcctgtctcagcctcctgaggagctgggattacaggcgtgtaccaccacacacagctaatttttgtatttttagtagggatggggttttgccatgttggccaggctggtctcgaactcctggcctcaggtgatctaaccgcctcggcctcctaaagtgctgggattacaggcgtgagccaccacacccggactgactcatttattctgttcttaaacattaaagaaatattaaacagccagaaagagaaatttttaatgctgtttaacaataattaggaaaggcaagaaaactgtatttttaggaaaagcgatatcgaaaaactttatagaatttttcatggtccaaattctgatagtcacatatttctcataaagctttcaatttttcctgtctcattgtcggttttatacatgtgtttggtagatttgaagcaatgctagttcagtttaaaaaatattgacttcaacattatagctaatttccaaggggatattataccatctagttaaaaataacccttggaaatgtggttacttgtgttatttacacattttaatgttagcaataaaatggaaggttggttacatttaatgaatctgtacagttataagagaaagacagagattaattctgagtaggtcgttgctgctataatcaatagagtacatcataattgtgcgttgaggaaacgccggtatgctaaggcaaaagaacaatagtcatcaaatgagtggtcccttgggagttaatgaagaatctctttctccaataggaaagaaatgctttctaaaatttataataccatatggacacccacacatatggatggctcataaatgctctacatcaaagtgttatttttacattttcgacacaacaaacacactaaacaggtgttttaaatgtcacactttgaacagcagtaatttaatcagcataaaaaattcttagtagtatcattgaaatattagtgggatagagatgttttatttgggatatgcttcaactatatattcaaaggcagttttcgattttaacaaatttaatttttgtactctaagatcagactttccaattcagtgctctaattcctgtgcaatttgacagcagaccagtcctcatcctacacctccgtcactgcctgctgctttttttatccaggcaaggaagcttcctagggcttcaaacatacaatgaatccaaaaggactctgttggttactggctcttaacatttatagattagaaattctccttaataatgcccttctctgaaagtctaaaaatgatctaaatattcaaaaacaagaaaatgactatctcaaaactcacatttcatttttggagtatgttgccctcatttaatgatataatagttttagtgtctagaatcatacctagcatctggaattaagtgtctgattctaactatgaatatgattcttctcaataatataaaaaattataatgatagaattagtgaatactaagtttagtgagaagaccagaatatgaaattgtgcatacggcattgaaacactatgtttttagaagcttgtgaattttttaaaaaatccttaaaaatgactgtctgatggttgaacttagggaacatttattttataatgtctactctagtgtttcaataattttcttttatggaattataaaactttaatgtgaatttaaacatccaaaatattgtaaatattactactctttctctttgcattttaccactgccccaattacctttttcttttctttaaggttctgtagatttggttgatttcagaaaaaaaaaaaaaaaaaggagaaacattatagaaaattggaggattctgtgtatgggggggaggtatttctggacttagtgacattgcaacaggaacgtcattcacttaaccgttctttcaacagatacttactatattttcaaaataattaaacaagcaacagtaacagctagtatataaagagctccttctatgttctgcattttatgccctagattatctcatatatcattagagcaactttgtgaggaaaatattaattttattataaaagagaaaatcaagcctagaacgatgcagcgacgtgccccaggttgcctgtaagcagtggagctggtttctagagcccacatggctacgaataatgttgcccgatgcaacgagggaagctggaaatcccaggtgaagaaaacccagtctctgtcctcaagaaagtgaagaatctaagcaaagctttgcagcaacacttttagtgaaggaaaggttacacatctgtgctgtacagcatgacagccactagccacctatgacaactgagcacttgaaacgtgaattttaaattgtgtttaattttaattaatttctacttaactttaaagagttaaatatgactagtggataaatgattggacatcttagttttaaaggttgaggaagatataaagaggcatttataaaacactgcaggagctaatatgttttaaaaataaaatagtaatccaaatactcttgggaaaggagatctctgctacaattgcaatgtatatatgctgctttctgagaataatttaaagtttctcacttcaactgaaaatacaattttaattactttaaatgaaaataactggcattcaacttgttagatggcatatatttttatttctactctaacatgaatttatcagactcaattaattttatatgattgtgcatgagagctcttttttcagagaaaaagtagaaacatttcttgcttttctctcataacacatactttgtaaagtaccaaagtctgaacaaataattcacgtggaaattttgatattaatttaacctctaggagtacaattctaacctttgttctaagcatacaaatactacattttgaaagaagaattgtgggccaactgggtatgtatttagtttggttaatagcagatcatgagactcaataatctgaataaagagcagagactgttaaaagccaaacacttcacctgttatttccctttatttattgtatttgatttgctgtctccattaaatctcaaatcccaaataacctcagagtttccatgtattaagctttaagcattatataagaattctatatgtaaaacatctaagacaaagtttaaggatgaataaaattaccccaaaacatacaaattaccaagataccttaaatgtctttggaatatagcacaatataaataaatatttttgtagaaacgcaaatatattagaaaagttattcctcataagcaaaattatcactcttcctcaacagtcagtgcttcatggagatttcagtgagctttctgggtgaacttctaattaaatggcttccatgattaagtgtaactcagctcagaaaattggtatttgcatatatttgacaaccaaaaatgacaagcattggaataattccaattaaaaaaaaaaacctacagaaaagagagggaaaaattccccatgaagctttgtcaattgttcaattccttcatccttaaaaaaaaagaacctagataatcttatgtcatccttaaaacaatagctatatagatggtccctgacttactatggtatgcctcaggatggttcagccttatgatggtgtaatgctttcagcacgctcattcacttcccatggggttacatccacgtaaacccgtcctaagttgaaaataccatttgtgacttaatgatattttcaatttaggatgggtttactggaacatgacaccatcataagtcaaggagtatctgttgtatgttttttcttcttcttcttcttcatatcctcagttttaagctaagaacataggcatggagtgtgtgcatatctgtgtgcatgtgtatatgactgctcactgttctacaggcatttaaacatcataagaatgatttgatgatccagtcttctgttagaggtctagacatattccacttctacacttctagagaactgttctaggccatctgccaacaagccaaagctagctgctcaccaccgggctctgtccgcaggagtcacagcaagaaataagacattttcttgcttcttgaatcttgaatgtgcctgcctgcttaacttccttccttcttttctttcttccttccttccctccctccctctttccttccttccttccccctttccttcttcccttcccttccctttccttccttccttccttctctccctccctttccttcctcctccctttccttccttcctcaccccttccttccttccttccccactccctccctcccttctccctcctaccctcttttcccctttccttcctttcttccatttgattgtagacatggagaaaggatatttcttattcccgttgatctgaaagacaaactagataagaaatctaaaaacctatcttttcagacacttaaaaaaataggcacaaggagaggggtcatatcatctgatcattttcattatgtatcattgtttgggttgaaaaacatgaaaagcattccaaggacaaaagacattacaggtctggttcctgcctttgatagttttactgttagaatggaagaaagggaaatacatataacgatgagaaagcagcacgatggtaatgcaaatggaggaagcattgttactacagtaaaaatacacactgatgcatgtatacattatacatgaattaatacatatagaaaggtacatatatgcattgtatgtctatgactgtgtgtatacagaatgtgtcagaagagaagtcgtcatatgtggaaaagaggtttaactgcttcagaattcaagatttgtctaaatttgaataataataaatacatttagattggcagaaaggagaaatttagaagaacaaagttgagaggagtgatggttaatactgagtgttaatttgattggattgaaggatgcaaagtatttttcctgggtgtttctgtgagggtgttgccaaaggagattaacatttgagtcagtgagctgggagaagcagacaccctcaacctgggtgggcaccatctaatcagctgccagcacagctagaataaggcagcagcagaagatggaaagagcagactggctgagtcttccagccttcatctttctcccatgctggatgccttttgccctcaaacatcaggctcctagttcttcagcttttgactcttggacttaaaccagtggtttgccaggggctattgggccttcagccacagactgaaggttgcactatcggctttcctacttttgaggttttgggacttggcctgatcaccactggcttttttgctcctcaacttgcagaaggcctaccgtgggactttatcttgtgatcatgtgagtcaattatctttaataaactccctttcatatatacaacacctatcctattagttctgtccctctagagaaccctgactaatacatgaggtgaggtaacaactcagttagcattatggtaacagagaccagatattgaaagtgggaaatcacttgggagaatattcaaatgtgggcctcaagtaaatgaatttcacataacaagcagtaatggagtcactactgacacttaaaatggcttaaagttaggttattagcaaataggttattctaatagaaacaatggggtcaactggatgaaatgtgggcaggaagctgggttaggatgttgctatactgactctgtaacacataaggatacattccgtatcttagctcttaatactcctcaaagaacatctatgacacctttccatccagtattagaatccattttacgatacttctgaaactagtccattcagactctcaaaaaaaccttccaatacctgggagcttatgatttctctaggagtctcattccatttttcaatagcactaattctaaaatttgtttttattttgaatataaatctgttccttattaaatttacttccatatggatctaagttcttctgtaagaaacaacacagatgaactctactctctttttcacttgataggactcaaatatctaaaaacatatacgtatataaatgtcatgactatctcacagattctccccaatctccaccatatctgttctggaataaggaaaacaaaaacaaaaacaaaaacaaactgtttttgtccttgcactcagacactcaacacagaacacttctatgaccagatggtggtgggggggacttgccacatataccaagcagttctccagtggacaccaactgggtatcctataattcaactcgattctgattctacctacctggaaatagcatcagatcccacagattgagggctcagccccacaagactagagacctcaatcacaagttggggccacctgtacctcagaccgatgggctacaaaccaaggttcccacaatttcctcaatgggtaagattaatttgctggaacagttcacagaactcacagaactcatgaaaacacttatatttattggtttattctaaggcattataaaggatgctgatgaacaccagacgaagagatgaatagggtgaggtggggggatgcagcttccatgcccttgctggagctgccacccttgcagcatctctacatgttcagtaccccagaagctcatcaaatcttgttgttcaagagtttatagggagcttggtctctagtacccccttcccagaggtcaatgggtggggctgaaagttccagccctctaatcttcaaattacttggtctttctgggccaatctggaggctctctagggggtgcaccctgagtaaatgcattagcataaacataagagttatccaaggggctaattatgaataacaaaatatactactatcactccaaaatttccagaggtttttaggacctctatgacagtaactggggacaaagaccaaatatagttcctattacaccacagctcttcttcagactagactcacacatttttcaactgttccttgtacgacctcactgtccatcactctggctcatactcacttgttcacatttatgctgctctaaaaagggtgctccaggtttgtaacaccgtggtatggtttgactctgtccccacccaaatctcatcttgaattgtagctccataatccccacctgctgtaggaggaacctggcgggaggtaattgaatcatggggccgggtttttgccatgctgttctcgtgggagtgaataagtctcatgagatctgatggttctataaagggcagttcccctgcacacgctctcttgcctgtcaccatgaaagatatgtctttgctcctccttccccttctgccatgattgtgaggcctccccagccatgtggaactgtcagtccattaaacttctttttctttataaattatccagcctcaggtatgtctttattggcaacgtgagaacgacggatacacacggtgattcacagtggcttgatctgagcaaaatacactgtaattcaatattagcaatagatgacaagcaactatggccatggtgaatctcagatgctgaaaagaggggaagaaagagagccccagccctcaccataaggcttagaagggagtgctatggtttgaatgtgtcccctccaaaaatcaggtgttgccaatgcagtattattaagaaatggcttctttaagatgtgattaggccacgagggctcctcccccatgaatgggatttagatacttataaaagaggctttactccgcattaggctctcttgccttttgccatgtgaagacacagcaaggaggtgtcatcgtgcaagcagagagcagccctcaccagacaccagtgctgaagtctttatcttggacttcccggcctccagagctcagggtgataaatttctgttctttataaatgacccagtctgtggcattttgttgtagcagcacaaacagactaagacagggagtgtccatgtactccatgtaaaacactttttttaaatggccatttaagaccgtaaacacagaaaagagaaaaacaaagacaactttctcatttactttcacacttacaaaacagttctcaaatgaacacacagagattagtgaatgcattatgaaagaatgaagatggtaagacacttgttcttattcccaggacagaaccggtgagagatgtgttcgcttttgttccccaccgccaccccacaaagacacatatcagtgtttacttccttgaaattggcattttcaggattggaatatccccacaataaacttccagatgcctgcacatctttcaaatacggcatcttaaggatgccatatttgaacggtattcttaccattatccttcccgcctgcttcctaaaacactttcataaccagagataataacattcctcgtctacaaggcagctgcatgccaaagacacaagcagctgcacctccgctcagtccacattgctgggtttttataacgaaaatgtgcacattagacttttttatggttttgccttcctggaggcggagtagctctgaggtccatcattcactgatattagaaggctgcctgtggtaacacagaacccaatgtagcagataacaaaaggcaaatataatttgaatcagagaatggcaggactggaagactcaacagaaaaaatcccgttgtcttcctgactttcggtgatgatctgaattacctctgaatatctggaacgccatagcagccttttcttggtggtgggattatgcgtatttcttagttctcttatttttgtttatctgtatgttatttttactcagtgaatatgtatccctcttcaagacaaatatatgtgttcattaaaaataaaggagattaggttagtcatgatagttttatgttcatttaaagatgtgtcctcctaacagcttttatagatttagggtggctggctagttctaaataaaaactgacattgttccttcttaaacatgcggtgaaaactagaggttcaccactgttgcccaggccccagtttccatccagttgagttaggatgttgctcagttaaatctcagctgacagaggacgttacatagccagctgtggctgagaggatccagtgtttctagagctgatgcagaaccccagtcactggggggaatgacgggaagcttctcagtcctcacaagctcccctaccatccactaggaccctctgctctgctgtttgccagagcagtagctctcagggactccacaccagcaccatcagcaacatctatgaatttgttagaaactcaaattatgatactccaccctagacagactgggtgagaagcgctggggtggggccctgtgatctatatttaacaagctcttctggggaattggatctggtttagcgacacagccaccatgctgtgctgggcccatcttaccgactcctctcctgaatccccccagagctcctctaagcaccactgtgtctccagttcctggtcaaatagaatacagaggagactgggttaatttgatgctcacagcaaccttgtatctgatgctcttttcatattattgctgttggagtaatattctattgccagatgtcagtgctgataaagaattcagaaatgaggaggaactagaggcattttctgggcctctgctgtttctctttatttccaacatgccactggcatgaaatatagctggctgcattgaaagtagcagtgcttttttccccctaaatgtatagaaatctgttttccttatgcgtgggtggcaatttgctgctggtagcttcaaaaccatggctgcactatgaacaaaaaaaatgctcttaccgtctcagccctgttaacctctttctcccaaacaaacaaataaacctaaacgctatgtctaagcccatctgtcaacaggcatttactgagtacctattgtgtttaagggattttatgtgcaaggtgtctcaagagggggggaaaagaaacaaaggctatgtacttaagatattttcactgaggttgggcagacaaggcttgagaacaattatcaggaaatctattagaccaacaatggtgaaacaaaacagtgccaagtggacgctggaaggcagcggcaatgcagtgggggcagcgtgggaggtgaagtggcccccaaggtggcatggccagagcagaatgtgatgagagaccaggcggctgggaagaggccttcagcttagaaacaataagcaacagggaaccacttggagttcttgagcgagggaaagacaagatgagcctggtaaccataattagagaagcatcacactgaagtgtgggctggttatcggagggtaacacgggcatgtgttctaattgctgtgtgcagagcatgtcatgtaggctgggctggccaacacccagctgtcagaggtcttatgttctactagggacagatgtgaaacaaccatggcaagaaacacacaggatgtgttagtccatttgtggtcctgtaacaggctaactgagatggataatttataaagaacagacatttctttcttacagttctagactgggaagtccaacatcgagaggaggccatccagtgcgggccttcttgctgtaccagcccatgatggaatgcggacgggcaagaggactgagaatggcatgaatcccccttcacctcccaaaggtcccacccacctcccaacactggtgcatttccacacttgaactttgaggagcacattcaaaccatagcacaggataactttacaccataataagtgctgtgaagacactagaacaccatgagagagtcaaagggtgggggtcctgcttcaagacacatctgtgttctgacatcgcaccaagggctggtctgtctacgagactgtggggagcaggaatatgaggaggaagaagcagattgcggagatggtggggcggtagagggaaatgtcttccggtgttcctaattcgtgaatactttgattcttattcatatcttctggtcagcaaatcaatattagtatttgtatcaatcataacatctcacatttgaattatactttgtagtagccatgataactctgtgaagtagacacagaaactctttacacaagaccttctaagagaggaagggggtgcctgtgtgtcacgcccgcgaggggtgggacttggatcctgcctgagagttttggcccaggcccgcttccatcccgctgtgctcatgcaggcagctttccccttccatggtgagtggagcctgctcaggtcctcagtgtcattgtgcatgagagtgaagaggatgcccagagggaaaagcgctcagctgtgtgtgtttccagcaaaacagacgcatggcagaacgtggggagaaacacatcgaccagagctagctactacgtatcactaaaattgagccgttttataaatattttatattcatacaatgtgccttgcgatggttggaagatacatttttcaagatggtcttttttcactgcccttagttgagcctattaataattaaggtaactttcttaaatgagaaaacggatttgaaagccaggcaaagtgttgtgtactgggaagagaggtttcacacattctcaaggagcgtccatagcaatcaccaagaggcacctcaaaccctggcatccagggtgcaactgcaggaagactgagatgggcactaaacatcattcgcctaataattcccatatgactcagtttccctactgagactgatccagtgtggaggacatgggtgctacttctttatatcccacactagagagtgcatgtagaaggtaattgacaaatattctttggaggcatgaatgatggtgccttgggaaccaaggaaactagtcaatgaaaaaaataaatgagtccacccaatttcagggggctagagatgtgctgggcaaaggtgtggccttctcagggtcattctcattccctagggtgggcaccccgagagaaacagcccagtggcctcgggactatccctagcaggcacctgccagtaaggctgcacccataatagacaaaccctctgatggcctgatacctgttgtaaacaggttattagatattgtaaatatcactctttctggaaatgatgggtgcaactggcttttaaatcttcctcccgttcagtgactcaagaggtcttctatccttcaagtgtgttatcctgcagaaaaaaaatttaagaataactgctccagaacatcttctgagtctcatgattagagggccagtgaaggggctttagcggcatctcacaattatagataatctcatggagcaggctaattacattccaatcccttcactcataactaagactgttatcaataagcctgacattattgctgattacaaagactttcttatttgctcgctgtttaattactcagcttttaaatgttccttgaagaaaaactagaaaatggagataaacaaaataagaaaggggaaaaaaatcacccctcatcgcctagcgaagggtacggattgccaacattctcgagtctctccttccagagatttccctgttgtgctgacagtcttcattaatggagttttttttttttaagtatttttaagtatttctcaagagttgcaggagaaataaagaaagtaaagagagaagagaggaaggaaaaaggagaagagagggcaagcaaagtttcagaagactaccttgccaggcatctagtgtagggtgggcaaatgttttctgtgaaggaccagctaaccaacattacaggctttgtggggcttgcagtctctatagcaactacccaacaacacctttgtaccacaaaagctttcttgtctgcaacactgctttcagatatgtgactagggctatcatgtgtgattatggacatcatgatataatttaagtcatctctgtgtgcacatttaaaaatcaggaataaaatgaattgaatataatactatttagcctgtatctttcatagggtgtccctcttatataagtcttttgttctcctatcatgataagagaagctcatgtaatactgcctgatgacccttgctaatccaactcctgcgttcaagccatcctcctgccttagcctgctgagtacctgggactacagacatgcaccaccatgtatggctattttgttttttaaatattttgtagagacggtttctcgctatggtgcccaagctggtcttgaactcctggcctcaagcgatcctccagccttggcctcccaaagtgctgggattataggcataggccactgcacccagcccgctgttctaacccacttcactgagtccgtggctctgcagtctttctcgtgtaactccagttttgcctccccgtttgcactatgctccagttttccgtggttctgcttcctggtcttactaggattacagcacaacaaaccaacagagaaaaccattggattccactggaaagtcgaaaaaaataattaaggctaaagtataagaataatcacaagcctgaagtgctgccacctgataattattaaccatactaacaataataaaaaacattatcaacaattaaaaagttcaaaagagtagcagcagtcattaagagctaatcacccaccaggtatgacgtgaaggtcttcatgtgcattatctcatagcagccctaccacaggtaactactatctccctaccttatgcaggagggtaactcacagctggtacctggagaaatctgaacttatgcatcctgaattgggactcaatgctgtcaatcctcctgtgccccgacactgcagggtctgctctggaagcacatctggaggcaccgcaaactcatctgccccacatttcagagggcactgatgggcacaggtgggggggggcaggtgggcagaagaaagtcaccccctgcagagaggaggcctggcattcatctgagaaggggctctccatcctacagacaatgtgcaactgtcttcatcaataatattgaaggtttaaatgtacagtttcctaaccaggatgattaagaaaaatatctgtcatcaatgaaaatgccctttgctttcaaaatagaaaattctacaagaagttagtatattctcataggtacttttaaaactatttttttttttttaactatttttaagtcctgtatatttcttcattcatcctgcaaataaagatatcttgaccttacaaattagcaaatgttgttctcaatcagttctactccaaaagagtaaagagagattaagtgaaccttatcatttcagaagtatgcattacttcccgttcataatgcagacagactgtttttaattaaagcttttggacttaggctggattttctagaggaatatcatggaaaaactttcccaatggttggtaatcacatttgatatgaataagatgaaggtgcgacataacatccgatccatgggcagaggtccctcaagtttataaagtttgtcgtttgggaaagataaattgttattgttgttatttttaactaaacagaaaagtcaaattaaaatgtgattttgatccaactgtgtatgtataaaatgtataaaagtataaaataaagctgtcccttgaaatatgaccaactgatttgtaaaagtcaatttcattagaatatgcagaatagagagaacatttgagcatttttatttcaaaattcactttgctagtgcatttaggaccgatgtgagggtgggatacatagtttctctagcagggcagcatccctgccttgcccatggctttcctcgtgcctgcatctgctcaagggccagccctcctgactaaaaacggagatgccagatctacatagaggacactagagctttaaggctaagtagtgattatttacttcttgataaaataataaaaagtaataaaaaataaaatttaaaaaggcttctaaggccagttgtttatgcagtcccatcacaccagaaaacataaatggattttatggacgcacctgttcagggccctctttggtgggctctgggtcccccccgtgctggggctgcgtggatggcccgtcagccacgccacccaccgtgatctgctgccttcagagggctgctgcctccctgggtcatggtgtcacccctactcggtgaacagaaaaaagttcaaacacttaaaaatcactgctcccaaacacagttctgcttgggtaagtggcagattccatgtgaatctcagtttttacagattaagtggaactgtttgaccccagctttcaggtccggataaaatgagaagtttttgaaaaggggattagaaaaagaccttagaagcacttggtttggaagctaattttttccactcagactcacagggagggaatccattgaaagcaccaattactccttctttcatagtctgggaaactggcctctaaatctccgcctttactggtaagtcaggctcagcaaccctccttaggcttgagttaaacaccttaacacctgcctctgctcccaacatgcacacaaaccacaaccaaaccaaaaaactattttctgagtatatagaaaattcggggggaaaagcaggaaagcacaaatccccataatgcccccagcatacaaatatcataatatttttgtgtgcattgatttttacgtaactggattcataatgtatacattattttacaatatcattgtacttagtatatttcatattagtaaatacttatctacaagaagggttttggtagcacagagttctcctcctaacactgtattataatttagttagctcagcacctgttgttgaactctgacttgtttccactttgtcacagctataagcaacgctctacagaacaatgaacataaccctggctacatatctggtaattttcttaggataaatttctaacagtctattttctggtccaaacgtgtaaacattttcaatattttgatatatcagcaaatttctgccccacgaagttgatccaatttatactcctgtcagtattttttgtgattccatgaatccagggcaaaatggaacattgaatgcatttaaaaatattttataatgagataaaaatggtgttttattcttcttttaatttgacattaatttgtctatgcctcttatttaaggaattgtttggtcttgcatttttacaatttttctttaaaaattctctaagaagtttttctttttgaggtcattgggttttctctcctgactttaacctttaaagatttccctctacttttagctcttgaaacatctcccttagacctttaagttctcccattctcctaaaaagagtcctcatttaggagttaaacagtgcacgctggctgggcacggtggctcatgcctgtaatcccagcactttgggaggccaaggcgggtggatcacttgaggtcaagagttcgagaccagcttgacctacatagtgaaaccccatctctactaaaatacaaaaattagctgagtgtggaggtgagtgcctgtaatcccagcttcttgagaaggtgaggcaggagaatcgcttgaaccccaggaggcagagtttgcagtgagccgagattgcaccactgcactccagcctgggcaacagagcaagactccctctcaaaaaaaaaaaaaagtgcatgtctacatgattaaagtgacacacaacagatcactgtttattacaaatcctcatgtcttttaaagttcatggtaatatgtttatgttttaacccaaagtctctgttcctctcctattcccaccactacttagagcaaggatctttgcattggaaagcattggtgtgggaggggaaacctacagtttctgctggggtccccatcttgcatattttggctttctggctcctgttgttggcggctgggagaaatgacctatgcagggtccatgggcagccctagaggttgaagttcaaactcagggatgaaagaaagaaagacagacactttctttcacgactgtagacatgatcaatggcctgcacaaaaatgagtctatcactttacacccagggccactagtcaccttggaaactgaatcacacactctctgaaaaaagaaagtggagccacagatctgggcacagtcctccccatgctctgagaatccacgcaggctgcctttgccgctcccttctttctcctctcatgggtgtttcctgtggatgcttccctcaagctggttcagcagacctgttctgccctcacggcctcaacagggaagacagagaacagtagggggctcggtcttcaagacacctgtctccaccaccctctccactgcgcactcacctacagctccttccactgtgagtgcgtggaagcagctccttccattgtgagtgtgttttagaaaatgtgggaaggtagatgtttcagcaacatttctccattcagtgatgctgggggaagtagagcttcttgcctggtgagtctgcaatgtctagatttaagggtccccatctactgtccctgaaaggacgggcacatggaataagagtccttatctgccaagtcctagtaatgctactgcagaggggaacggctgaagagctaatagctccctttcatgttaaatgattcaaagtgatcgtgaatagcatattttgatacaaggatattgcaactttctaaatttgaaaggatatacatgtgctaatgcagaaaagcttatgtatggacatactacaagtgacagtcatattctgcatttgtaaaagagacctggttgaaaaatatggtaagcgttcatactttcaggaattgcttctctctcagggatggtgcctctgatgatagtgtgaattggaaagctgaaaaattatactctcagtactgctggttacatttgcaatttctgctcaaattttgatttgtccaaagcctgatacattttatctagccatctaatatcatttagtttctggatgctgaggctgtaataattttcatagcctctgtactaaaatgctacattttgtttttctttgtattttatcatgcagggtgaaaaatatgaacacatttttataattctgggaccagttatatacccggaggtctggcaattactagaattccccaccaattattagaatgataatatcaataactaaagtttaattgtgggtgatataatttggatatatgtccctaaccaaatctcatgttgaattgtaatccccaatgctggagatggggcctggtaggaggtgtttgggtcataggggtgaaaccctcatggcttggtgctgtcttcacaaatagtgagtgagttctcataagatctggttatttcaaagtgtgtggcacctccccttcgccccactgtcttgctcttgctctcccatgtgagataccacttttgcttttcctcctgccatgagtcaaagttccttgaggcctccgtaggagcctagcagacgctggcgccatgcttcctgtacaacctgcagaaccatgagccaatgaaacctctttcctttataaatgacccagcctcaggtatttctttatagtaatgcaggacggcctaacacggtggataaatgttcaaatgattaaaaattttgtttaatgcaaacatttaaataattcaacaaaccaggtctctggaattataaagacaatgggtagggtaacctcagaccagttcactagatcataaattgattgaaggcagtagactcaggacaaataaaagtaagaactacattacttggtgcctgatgaagtggggaatcatttatcttcaaagatagtaccacctaaatatttcattagattccagaagggttcatggatgatagatgcagaagtgatttgctaaaggcacaggcagggaagagcctgaatcttttaaggtacaaatttcaaagacagcacaggtattcacaaagcatcccttctagtcactggctaaccgcatggctcaccctacccatttccgcagtttgtggcagtcattattgccaacactaaaaagagcctgctgggttttggaggtacctggagccctgagccccaaagtctcaggaagatcaattaactttaatacttagcttcctcatccacaaaataaagaaaattctttgtttgcagggttgaaatgagcattaaatgagatgattttggcaaagatcccagtaccatgcctggcacatgctgtgattctcagggaccagtccctcttctcccatcctcggtcattgctcttgagtttttgatcttccatatactgtcagagcaggaggttaactacagcagctctgagttttgtcccttcaaatgaaatatgtcccacatttatttcagcacattcaatgaccattataccaggagaaggcagtgtcgtatgcagctggaaatgagggcactgacttcacttcacaaatcaaaaggcataaagttagtctgaggctctcgtcaatgtgcaccttgtaaatctgcggccctgctatgagacactcattcctgcagagagggactgaaataaaatttagttcactttctgtagtagaaatgacagtttttctatgtaaaaatagcattccagtggattcaaagatgtgtcatatcattcaatgtgtttctggaaactctgttactgttaagaattctgaggaccacttgctgtagtaaaaatggcatttattctatgtaaacagagtaaatctataacaagacagatcattcagttgttgcacgtggaaaaaaaatctgccaaagtaacctatgtcgtgaaagcacttaatgtgttatccggcacatggcaggtgcttagtaagtgtgggtttccctttcatttccttttcctaaggagtgatccatggagtcatcttgatcttgaatccaagaatgtccctctaggaccatcatttgaatacagttggtaagaagaaaaataaattcatcatttatgagtaattgatttgctaaatgatcctctacttagtagatttacataagtgacatttacaaaatgaaaatatgccaaaactgaaaaaccatgacatacaaatttgatgagagaggcaaaaacaaagataatgataataaacatggaagaaaaaaagagatagatgcctgataggtcagatagagagatgccctagaggaccctataggccctcccaatcaggaatcacaactcattttctgaaactatgaaaataaaatctaggcttgtattctttcaatttaaggaagttcttcttgttctagatctttgtttggctcttccaaaatagtgatactggccagtcacatctgaaagtaggctgcttctgtcctggatgttgtcactaggtcagaaacaggggaaagaccctgacttctcggttcccctcttcccctgcctgtagtgtctggacgaggcggatcttttcattcacaaggatcttgtcatggatcctaagagaacaggagacacacacaggagaaaccaagggtggcgatgggctccataactcccagggagctgctggctagctgtcgtttcttcacaatgggagtcctattttcttgtcctggacaaaggcagtggggaggaacaatctcacacctctcagccgtccaaccaacccctgcagggcaaatgcattagttcccgctgttatcctgaggactgtttctctgcagagggacagaagagggagtgctcagagcacacagtgagccgggtccccaaccttcctcctctcctgcaactcacagtgcaactcagtgatggatccttcccataaataacagggcctaatgtgctcatgagaggggattgcttttagataacaaggatgtaatggaagcagcctcaaatgaagaaacttgcaaatgattaattatggatcaataaaagatgatccaattgattgtagagaaagtctgcagcatgacttcctggattcgctcaatgtatggtctttttaaaatgcttgctgtgatcatcctgtgttgatggatctacttcacagggagggacagtctaagtccccctttaagccttctgtgtctgcctttagcaacttaacacacaggcatcagaacacaggacattgcattagctgttattcctaccagacttcatgatgtcaataaaggaggccagtaaaggctgtcactatgcaacttacaaaaaggttttgcttttttgttctgtttcagtaagactggcttatttattgccgtgtattcctacttacttttctctgaataacaagattaatttaatgaaaagaaaacccaattccataccccagaaaatgatcctgaacatatcatcttattaaaaacagattttaaaaattaataaattaattgagaactggggcctctggtattccagtggaagatgcccgtcatcacccattttcgcttcactgatgggaatttccaagagcgaaaggtttgtctcatcatttcagtgtaaaaattagcgctttgacaatactttgcatgggctaaaagatgctgggaaagtttttgacaatttgaaaagatgtctatctgtttaaagttctctcagttctcagcaggtggagctaggagaatgattgtttttctcctaccaaaatgtgagaaaaaaaaaaacattccacacctatagaaattttaatcacagaaaatgagtgattctcaaaatgaaaccaataatagtgtcttctttagctagcaaatcttgcctctctattttgcttttaattttcaagaacaaccagtcacattagcctacactgccctccaaaaccccgtgtgagggatcccaccagactcgcactgcacctgccaaggttgagaggaagaggggcttgtcaccgccccccacctgattgaaagtagaatatatagcaggagaaccaggctgcacacgtactgtacaaatttggggggaaaatattgttttacacaatcacataatagatgctcatggttaaaaacaaacacaggaaaaaaaggagaggctttcttcaagtgtgtatttatttatcttctgatggaatattctttttgggcttttgaacccagcaatgccctcaggagcgaggggtgaggggcattttgctccccatgatgatggcatgtaggctcctggggcacaaggcaaaaccaccgtatgagttcccagctccactattcttcaaaacataaacaggccaaaccaggcaggagcctaatagcaggaacatattttgtattataaaaatacacagtagcatatacttaacaaatcttcttacgcagtgacccctctcctgcaggaaaagtaatcatggcattctagagtttgcctgcattcaaccaacataaaatcaaactcaaatgtgcctagatgtacatctaaagcctctgaaataattctaacagttgaaaaagatgaatgagataaacagaaggaattaacatacaacaattattcttcctttgttcaactcttcccatgaagtataatttcttttactattgtaattctcaaattcagcttaggcagctgagaatgtgtatcactgctctttaatgaagaaggtttaatattattcacattgactattatactctcctatatgcttagacacttcaactctaataacaccactaggtaacactaaaaggacaccaagctttacataaaacccaaggtcaaaaataattaaggggaaaaaagtcaactttttaagaaattctttggatggaattcttaaaaattaaaaatgacagtttttttttgcgcatgtgtgtaaagtaacagttaagtcaactctatttttaagtgaagatattattacatttgattattataggttggaaaaatgtcttcaggtagaggaataatcaattcaaaaaatgtcttccaactttacatttgtagaccattttacagttcaaggcaatttctcattccttatttcacttaagccagttaaaaaacccagttttacctgactcattgagatgtctgactcagatgtgatgtgtgtcaaaaggagtctgtgattactgagggagcactaaaattggcaaattaaaaatatatagttcaagaatatgttcaagatgaaacttgtgaggacttcattctaaggcttttgctttctgatgtgttacattctgaggtgttgcattctgacatgctgcattcttcctgatatgttgcatattctgacatgttgcattctttctgatgtgctgcattctgacatgttgcattctttctgatgtgttgcatattctggcatgttgcattctttctgatgtgctgcattctgacatgttgcattctttctgatgtgttgcattctgatgtgttgcattcttgctgatgtgttgcattctgatatgttgcattctttctgatgtgttgcattctgatgtgttgtattctttctggtgtgttgcattctgatgtgttgcattctttctgatatgttgcactctgatgtgttgcattctttctgatgtgttgcattctgatgtgttggattctttctgatgtgttgcattctttctgatgtgttgcattctgatgtgttgcattctttctgtgttgcattctgatgtgttgcattctttctgatatgttgcagtctgatgtgttgccctctgatatgttgcattctttcagatatgttgcattctgatgtgttgtattctttctggtgtgttgcattctgaagtgttgcattctttctgatatgttgcattctgatgtgttgcattctttcagatatgttgcattctgacgtgctgcattctttctgatatgttgcattctgatgtgttgcattctttttgatgtgttccattctgatgtgttgcattctttctgatatgttgcagtctgatgtgttgcattctgaagtgttgcattctttctgatgtgttgcattctgatatgttgcattctttctgatgtgttgcattctgatgtgttgcattctttctgatacatcacattctgatgtgttgcattctttctgatgtgttgccctccgatatgttgcattctttcagatatgtggcattctgatgtgttgtattctttctggtgtgttgcattctgaagtgttgcattctttctgatatattgcattctgatgtgttgtattctttctggtgtgttgcattctgaagtgttgcattctttcagatatgttgcattctgatgtgttgcattctttctggtgtgttgcattctgaagtgttgcattctttctgatatgttgcattctggcgtgttgcattctttcagatatgttgcattctgacgtgttgcattctttctgatgtgttgcattctgatgtgttgcattctttctgatatgttgcagcctgatgtgttgcattctgaagtgctgcattcgttctgatatcttgcagtctgatatgttgcattctgaagtgttgcattctttctgatatgttgcattctttctgatgtgttgcattctttctgttatgttgtattctgatgtgttgaatcctgatatgttgcactctgatgtgttgcattctgatatgttttcttgttgagtttaaaagatggagctgtatgcagggttacaggaataaggcacaaacaatggacccatccatgggtgtgaagcacatgtgcggccagaacccacctggtgggtcatgactgaaaaaacactgtgaactattgcctaggcccatctcatggttgatatctttcctgctactctgaactctctgtgactgtctataataactgtaggcatttctacacaaccaatagttttttggaagcaggctaagattttttacatgtatcattaaataaatttacttattttgaatttaacataaagcataaaagatttaaaagtaaaagtatgtattttgagtaggtatttccttacattgtgtacaccgtgtatgcattttgaatgtttgtttatctaataaaagttgtaaaggcttttggaaatataaaactgaatgatcccccacatttctgaagaaatgtgaatggcaaattataggatgaatgggatggattacaagtcagaaattaaactctataaagataaacagagactgaagaagacagagaaatgcaattggaaatgaaggctaattaaacaaaagcactaaatatgtctaagcagcaagctacaattaacatggaagacaaattgtgagcacaactgcattgtgaatatacacacaccaaatataaatattatgttaataactgtgacgacttggtagaaaggtgtatgtttcagtaggtatagccattacatttactttttttggtatttttttttaacttttgttttagattcagaagtacatgtgcaggtttgttacacaggtaaactgcatgtcacgggggtttggtgtacagataatttcatcacccaagtactaagcctaatacccaacaggtactttttcttgttctatttttttttttttgagatggagtcttgctctgtcacccacgctggagtgtaatggtgcaatctcagcacgctggaacctccgcctcctgggttcaagcgattctcctgcctcagctccctgagtagctgggattacaggtgtgtgccaccatgcctggctaatttttgtatgtttagtacagacagggtttcaccatgttggccaggctggtcttaaactcctgacctcaggtgatccatccacctcagcctcctaaactaacaggtactttttctggtcctctccctcatcccaccctccatgctcaggtaggctccagtgtctgctgttcctgtctttgtgtcaatgtgttctcattgttcagcttgcatttcttcagaggttttttttttttgtgtgtgtgtgtgtgtggagataattcacttttatatttccgaaagcctttaaaacttttattagataaacaaacattcaagatgcatacagtgtacacgatgcaaagaaatacctactcaaaatatatactcttattttaaaagtgagaacatgcaacatttggttttctgttgctgtgttagtttgcttaggataatggccgtcacctccatccatgctgctgcaaaggccatgatctcattctttttaatcagccattacattaaagatgtcagagttttatggggctatttgagcttcagttagcatccagggttctttgcattgtctcgatgacctggtctcatgcaaacaatgtctggactcaccctcacttgttagcagtgagcagattgagtttgcctcaggagaattttctagggacaaatggagatctctaatgttgccctcatattccccctttggagcaacagcaccataatgagggcgtaggaacctctcagtaaagattgcctttctacttcagaaaatgctgctaacagaaaaaaacaaaaacaaaaagaaaaacggatttttatcaaattggtaatgaaacacttatttcatgctactgggtatatgaggtattattatcagaaagatatcaaacagttaaacttcacctctactagctacctaggaaaaatatgtccaaattttatctaatttaggacaatatggatttttaagtcttaaaactgatgggaaagtctatggaatctccttatatggaaaagtatgaaaataagccagaattaaaagaactgagtaagataatctcatgaaaccctttgcaggtttataatttaattttttattgttaaaatgcccatggtttatgaaccttaacttagaatcctcctgtaatagccctgttgaataaacaacacccgggtataatcatcttcagatacgaaaggcaactgcattcgcatttcttgggataacagccagaatactacaggtagtaaactttgggagtgattaccaaaccacctaggagataaaactcccttagcttccagctgatgccttattctcaagatttgtcatgacataattgcccagaatataagactcgaggtaattcactttgcttaactgaaacaaagcttgatcccaaagagagaaaattttcagtccttgccaagactgctgaccatttctttccaaaaatagtgacttggggtcagtggatcatttaatatccctgcttagtattgttgaaaattcccagggggtgaaaaaaaaaaaaaatatatatatatatgtatatatatatatatatatatatgtattccaaagtgaatgacacagaatgtgtaagtgcttatatttttaaactacaagtctgtctccaaaaaataactttcatcttttctcttctaataaatactttttaaatgacctctcttttattgaaaattcatttacacacacacacacacacacacacacacacacacacacacacacacatatttgctaatggaaaaaagaacacaacacaacaaagaagtgtatcataaggaaagtttccctaaagttcatctggatgtggttttacatcatccttccagccagtgaacacacagatgtgaagacatgtgcaagccatgtttgttaatttataaagtactgtacctcggttttcctgcaaattttaaagcaactgaaaatgaactgcagcttacattgctaacattttccagcccatacaaagtcataagataaccaaaaatcatgtttcaacccacggtattccatacaatgaatgctttcactccaggcctgcgaattaggctgacatcttccctagctgtaatatctccatcccaaaatacgttcattcaatatgttcatcaaacacagtgagaatttctgttttcatactgagattagtattgtgtggagccacctgtacaggattatgaaaggcagatcgcaaagtcttgtgatggtcaagaccctctctgatcagcagaggaccttggtactcaggcctggacttgtggaaactgaggggtaatacatttgtgttaagtgtgtggtaatttgttgagctgcggcaatagaaaatgaatacagtgactaatttccctaaacatttagaggaaatttcttggcataggtgagtttttaatgctaaaatttaaaacagttgcttttttcacttgatgttttacaaattccagtgaattgaataaatcttccaagccaatgctattgagtgggacctgagtgaataaggtatgtacactctgtactgaactgaatatttttcatagttttaccaagtttcatgtgtccctttcccatttgcctatatcacaatgatgacgcacctaacagaaataaatattaatagtctgaatgtggatatcaccactaataatttccttttaattaaacacatgcttacaaacacaatttccttagaaaaatattttctttttccaacacaagagaattttagggattataaacaagcaaaaaaaaaaaaaaaagcacatgccccctccagtgttagttgctgccttcctgttaggtgtcttctccagcctctgttccccttgtagagagaggctgaggagggtggatcacaaggtcaagagtttgagaccagtctggccaacatggtgaagggtacagttgacccttggatgacacaagtttgagctgtacacacaagtccccctcatgtggattttcttccacctctgccacccctgagacagcaagactaacctctccccttcttcctcctcagcctacccaacataaagacgataaggatgaagacctttatgatgatccacttccacttaatgaagagtaaatatattttctcttccctatgattttcttaacattttcctttctctagcttacttgaggatatttatataatacaaatagcatccacaataggtgttagtcgactattttcgtcatcagtaaggttttcaatgaagaatcaactattagttgttaagttttttggagagtcaaaagttgtacacagatttgcaactgtgcaggggctcagaacacctaacgcctgtgttgctcaaggatcaactgtatttttaaaagtgagactgtaaggccaggcatggtggctcacgcctgtaatcccagcacctcgggagactgaggagggtggatcacgaggtcaggaattcgagaccagtctggccaacatggtgaaactccatctctactaaaaatacaaaaattagctgggtgtgatggagggcgcctgtagtcccagctactcgggaggctgaggcaggagaattgcttgaacccgggaggcagaggttgtggtgagccgagattgctccattgtactccagcctgggcaacagagcgagactctgtctcagaaaaaacaaaaaaaaaagtgagactataaaaatctattttgcatccttcttcttaaaaaattcttccttttacagaaaataagtcccaatcaatacctgttacctgctatgtataacacagcacatccttccctggaatcacgggaagaaaacaaatgtctctgttcattcattctttcactcattcatccattcattcatttgctgttcactgaagtctaagcctgtacaatgtgtaagggacgtacaaaacaccacctgtcaaagaactcaaaatctcatggcaaggctgatgttcacatgaattatcaaagagaaagggcttttgaataacacagacttctgtggagatcctccctgtcctgcttgcagctgtttatactcttggcaaattatgtaacctctctgtactcctttaattgtctgtaaaatgtagaaaatcatatctacctttctgagcagcagtaaaggtgagaagagatcatacatgtagaacacatacttaggactgcagttgttcagtggctaatcggttgtggaagccctggataaacactgtgacaacacatgtctgagaagagggagttgcaaccagcctgccattcactccctccccttaccgggggccatccccagggcaaagaaaaggaggctgagacctggtctaatctccttgtcaaccaggattgttggaaggaagaagccttgtctctgaagtccttagcaggacatccagctaggaataatctgttagtaaacagaacccaagattcctaagacatgacttcccagagaatgtcatgtaagatatacaactttctgggggtacaaattagaaatgttttatattttgaatgttccctgctgtctgagaaaccccaagacctcatctattctgggtcagaagggtaagcccaaagtgggaagaaaggtcctgttctcacagctccaaatttgtgttttgtctgaggcttcaatggcctgagtctctgacatggtttagtgaagctcaacactgtgtaaagtctctggtttgtgtgagtcggagctcacagtctgaccaagcatagctcagcgttctgctcatgcaggaaggagtacagtgaaggggaggcggaggcattcacaggcagaagaaagagatgcagagatgagagagggcatggtgcaatcaggcaatgggatgtgtcaattctgcaagagcatactggaaatgggagacaaaggcccgagtgcaggtgcacaggaagaggaggggctgacggcgaggtccaggcacacctggtgaagtcatctggccttcaccaggaaggcaaggggaatccacttaaaggggaatgaactaaatcaggggactgcttgaccagaacaatgtcccttaagagggaattaggatggagcgatgaggacagcgggcgcccttgcgaaggctgaggttcacatgagggacagaacatgaatgaagagcagaggcagggatggagaggggagaacaatctgaaaactatctaaggatatataagactttaaagcagctttaacaagggaaataaagtgtggatagaaataagtacgaaaagaattataagatctaatatgatcacatttttgagcttcacattatggcattcaatgctgtatgtgcctgaaatatattaactcaataaaaccttacactaaccctttgaagtaggctctgttattattcccatttgaaaactgtggtaagtgaagcccagcaagattacagagctactgagtggcagggccttggactgtaaagcaaaactgcctagaacaaagccatgaccataccagatgactccataaacatggcaggaaacacagaagccagggcgagatggcactcaaaaagcaatcgctgttcagggcaggatgcgatttctggctagttacataaggctgatcaagaagaagtgggctcaagtttcagaacactctgcattacatccagcgtatcacatattacatcccgtttaactcactgaaccactattaccatttggaaagattctatctgcattcctccaaaataatagtttggaaaagttcatttaacgagccctcctatttgaacctggcctgccttgattgataagacttcaatatcaaatgtagcagccttgagttttgactctcgttcaaaagtgagtttcaaaagtagatttttcttaaaaatgcagatgatttcctcttctttattttactatttttctataaatagtaaaatatactttcatttctctgaaaagtaacaccaaagcttcacctataagaataacttattactgaattggtgtctttctcaggaatttaatccaggggaaaacacctttgtcactcgaaggtgtattcaagccaacagacgattctagcatcggatgtcaggaaggaccaggggtgctcccgtcatctttaaaatcttccattctgccctccatcttctgaattcacatttcatgtcctctatcttagtggtgagaggcttagcttttataaacgtgaaaagtcactgaaatggacctaatattgaaggaaaggaagtaacatgacattattgtctttaaggtaacatagcaaagggtaaaatgtgtccctgagtaatcaaagcacaggcaccacaggctccccgtgccaccagctcccacacacgcagatgctggagaggcatggctttgaacctggtaccaagtagggtagatgacaactagtgtgtgtggtcaccaggtgtagaggctgctccccgaaaccctgggtgcagtcaccactgatgggttctacatccgtcttagacctgcaggtgggggtccagcatcaggctggctggagcctgcaaccacctacttaaatcagaagtcaaatgtgagtgctggccacagtgatattctattgaccataaatctgcctgaggttcatcctgctgaggcctacacaggcatctacactagagcatctaataatttcactaagtgttagagaactgacaaaaaataataataaggcaaactgtgggaaacaggtatacagtttttgtgagataagatgatgtgggttactggtcaaagcccctactggaaataagaagatattgatatgccaggatcctcttaacgtgatttaagctaactcatttgacttcactggatccgtattttctccattgtatattaagtggagaggggcagggcggccaggtgcagtggctcacacctgtaatcccagcacttggggaggccaaggtgggaggatcacttgaggtcaggagttcaagaccagtctggccaacatggcaagatcccatctctaccaaaaacataaaaattcaccaggtatggtggcgtatgcatgtaatcccagctaccagggtggctgaggtgggagaatcgctggaacctgggagatggaggttgcggtgagctgaaattgcaccactgcactccagcctgggcgacagcgagactatgcctaaaaataaataaattaattaaattaaaacaagcaggagatgcactattttaagtgccttttattcataaaatttaaaaaacgtatttgcaatataaaaactgaagaggtgtaatagctattcatacttacgtgtataatcggattagtcgggaagagtcggcatgaggtgtttaaattctctcaccatcaacatttcctttcactacttttccaaactgctacacttgaaagatgtttgccaaataaaccgtatttcagcaattttctttttcttccttttttcctttcctttctctctgtacctctgtctttttttaactcaaagacacatgtaacaattttttttcttgtttcttttcttttttttgagacggagtcttgctctgtcctgcaggctggagtgcagtggcacgatttctactcactccaacctccacctcccgggttcaagcgattttcctacctcagcctcctgagtagctgagattacaggtgcacaccaccacgcccagctagtttttgtatttttagtaaagacagggtttctccatgttggcccggctggtctcgaactcctgacctcaggtgatctgcccagctcgtcctcccaaagtgctgggattacaggcctgagccactgcgcccggccaacacatgtaactattaatgaggacttcagatcagcctgagttaaccaatgttatcaaacgagttgatacaatttctgcccaaagcgacttgacatttcaattaaattgtgcagccttttcaaaggaaaagatatactttcctttaagtgcttttgaaatattaaaaatagcacctggatgcccatgattaattttatggatcctcgaatgggagctatgcatacgcactttgtccctttgaacctaaggatgttattgtcctcgtctatatcaactacgtacacaaaggttcacccctgcatttcctgaggcctggaccccatttccacagctcgttactgctacttgccctacctgtttcactgggactgcagggctcttttacctgtgacttcctgcctcagtttaccccaggcagtctctaatcacttgatccagacagatatgcctctgggccagcactgctcccatgtaggtggcctccctcggtcccacgtcctccagtgataattctgaatgggccgtttgcaacattgatgaacacatttagaaaccggatgtggtagttgaatcaagttcgggttttacaactgtaatgaacggctgacacttgggcaggcagctttgccatagacaggtgtggaacaggcagtgagcccaagctttgcagctgattcagtgcagagtctcacatcaagacctttgacttgttggtcattaaggaatttatcagggcaataacttttagtaaaacagtgaagaagaaagtctatcaaaaaacaaacagtaggcccgtgtggtggagaaaccacaagctaggtttcattctgatccaaggaacaggtgggctttccctatgcacaaaattgtctcactccctggactgaattgatggtccagaggctttaaaatactcacggacctagcttaagaataactgggtaaatttacaaataattgacaactactctgtaagggccagaattaacccaaagaaacacatttgctagtgtgtccacagccatacatttgcattcttaattcagcctattctcctgggttcacgctgagtccaacttttgacatcgtccttgcagtcattcatgcaactctgtctatctactctaaaaagctgaagggcatctgtcagctaatgagacaatttctccaacagctggtactcatgtgagggtaattccgtggatttattcagtggtcatgccatctaatagtttctccgaggacctgattcaaagccctcaaaattgaagtgtgggaacagaagcataagagtaacaagacactcgatgagacaaatctcagaggcagggcaaggaaactgaacggagttgacaccaaggccgaaggtggctgccttgtaccggacggggaatccgaggatcaaagtatcttgtggcaaagtctccctggggatagtgtctgtgtgccctagagcatcacatcagggggcctctgtctttccagaaaggcagtcaggttcttcatccttcagacacgatccccactgacctgggagaaatgcttgtcccagtatcagccccatggatgaggcctgggcagtaaacacaccacgagggttcaaactggtctggggtgatcctctgttgaatacacaagcagattgattgcattcaacctctttgtctcgggaaggacgttacttacaccatcccaaattaataagaactatcctccaaataactcccatgtgatatggtttggctgtgtccccacccaaatctcattgtgaattgtaataatccccacatgttaagggcgggcccagtggagataattgaatcatgggggtggtttcccccatactgttctcatggtagtgaataagtctcatgagatctgatgggatttatttatttatttatttatttatttatttatttatttattttgagacggagtcttgctcttgtcaccgaggctggagtgcagtggcacgatcttggcacgctgcaacctccgcctccgaggctcaagtgattctcctgcctcagcctcctgagtacccgggattacaggcgtgcaccaccattcccagctaatttttgtatttttagtagagacgggattttaccatgttggccaggctggtctcgaactcctgacctcaggtgattcacccatctcagcctcccaaagtgctgggattacaggcatgagccactgcgcccagccctgatggttttgggagttcccctgcacaagctctctcttgccagctgtcatgtaagatgcgtcttgcttcccctttgctttctgccatgattgtgaggcttctccagccatgtggaacggtgagtcaattaaacctctttcctttataaataagggaaaatcctgggtatgtctttattagcagcatgagaacagactaatacactggaatatttgagaatcttcatgacgctttcaaaacaatattttagtcatctgccctgaaacacctccagggtcttcccatgtgcattgtggaaagcaagaactggttgctctccttgatgaagctctcacatatgcaaggacatttcaggctcaaagtgtccacagttattgccttgctcatccccttcacttttttgaagagaaaacagaagtgataaagaaagctagtttttatggagcctctctaatcacgccaggcattttcacaagttagctcattggattctcacagccgcgcagagtagcaccatggcattttgacagaggaggaggcaaaacctggaccacacagctggtgaatgcccacagaggggtggcgccccctcatctgacaaccaggcccaccctttctctgaaggccgcagaggttgagagagaagagtccaggtttccaatccaacctggttcctggtctttcctgcttctgatagagaatatttagtttaagattctctaagctatatctgaagactgtaatactctaagaagcatcagtccctcattgccttcataataaaacttgttttccctaagtttcaacttattggctgaaatgaatttttttttccccacagattagatttggaatgaatattttacaatgtggaaattattcttcctgctgttctgccctggcactcccaacctctccttgcctgtctatactggtttctaccttttttttttttttttttttttttttgagacggagtctctctgtcgcccaggctggagtgcagtggtgcaatctcggctcactgcaagctccgcctcccgggttcatgccattctcctgcctcagcctcccgagcagctgggactacaggcgcccgccaccacatccagcttttttatttatttatttatttatttatttatttattttgtatttttagtagagatggggtttcaccacgttagccagaatggtctcgatctcctgaccttgtgatccgcctgcctcggcctcccaaagtgctgggattacaggcacgagccactgcgcctggacttggtttctatcttatctcacaatgatcaccaccctccaacccaacatataattcacgtccatccctttgtcctccgcccccacttgcgtaagtccctgcaaggccgggagtgagctctccctagaacactgccgggcacaccgtgagccccgaggaaggcctcactctgataacttacaacaaagggaacttttgaggggaagtacatgcatatgttaatgagtatagccaacagtatcattctatattgtatacattctgggcaccaattctgacaaaataaatcatcgagaagtctggtcaattctgttggaggcttgccctatggtccctgaatataattcttacgtgcctgtgcttttcagggctgcgtctttgctagaaacaagtgattaccaaactgttccacggagccctggggtttttctcgtgacttcgggggcctctgagagggacagctagggcagcacctgattcatccacttgggtatatgtggtttctgcttcagagatcatagaagagtagagctcatggatttttatatgtatgaatatgttttttaaaagccaactataaatattcactctataactcagcttaacaaaagtctattttgctaattatttactgtttttttttcttttttttttcaaactgggtataatgctcctcaaattgggaaactttcagatctccaaattacagtttccaaataaccatacatgcagcacagatgtgaacagtgggtccaaaataagcaccttagattaagccacacgatgaatcacttcgctttcaaaaacaataaaagccagaggccatgttgcacatggcacagagaagcaacagagtccatttctgtaataagcatgacccctcactgaatgcttgctatgggagatgtgtgcctcctgctgtgcgggctggttcccaacaggccatgaaccagcaccggttgctccatggcccagggcttcgagatccctgccctagagactatattaatgaattaggaataacattaacattcctaataataggagatgatgactaggaggtggattaacatggtcaaggacccaaagctggaagatcccccaggcagcattgactcgtggtctattccttcactgtactgacgctcctagcttcgagaatgatgcatgggcaggcctgttccattaacgttttgtcaagtgactaaatgaaacataagttcaagaaggcaccttccaccagagatgctggctcagagattaacaaaagccacatcaacggcatttggaatcactcatttaattacggtgatagatgccagcagcagctcccattattaccacatgcttaccattgccagacactactcgaagcactcaattgtcttaaatggctctaaaaggtcaatattagcgttatgtccacttggtagatgagaaagcagaggtacagaaaagctttaaaatgtgcctatgttttcacagctgtaagcaatggagcaggattggaacgtaggcagttttactctagagctcagatttttaatgctgagctctgattttaaaacttacaggactatgaagccattacctataatatagaagttacattagatctggttcttcccttaaaagagtttctgatctaatcagggaggcatgaaataataacataaaataaaataagatattactctgtacatgtttccagagggggccctcagtgtggacaggtgaagtcagggcaggcttcctggaggtggtggccttgccagagccttggagtagttctgagcaaggctgaaagcatttcctaacaggggaacccaggagtcatggggtcatggaaagggagtcttttcagaggatgctgacctaaccaggcgacaaggagagatgcaagaagaaaagcaggatacaaagtgttcagctttatggccaagagcaagcatgccacacctgcgaccaggggcaccaagcaacctggggtcaggatgcatgctttctcttgctgttggaacgtgaatatcttgtaggcagtttgtatactctccagttgacccctaaggacagcaaacaattaacaccctatttaaaggctagaatataggaaaaggaggatctgaaatccagtagactttccagataagagaggagaccctgggaaggcagacggcaaggggaggattccaggtgggatcaaagctgagcaaatgtctgatgtctctaacagcccgactggaagaacaagtgaccagtattttccagtcaattagacacaaagcatgattgttgcagcctggtgtgtattcaattaggactgtaatatgatgaagctaagaacagattattttgcagactttcttgtgtctgtgcctgagagcttgctcagaggatcctgggtgacagctctctgtgggggcctgtggccaggaggggagacgaggcctcatcgtggcattttcagggctgaaatgccaaaacaaaatgctcacattcgttaggaacctcctatgatccaggcaggtttgtgggtacagcacaagtctctccatgaattaggcaaaattatcccccttgcactaatgaaataagggcctgggtgcccgagtaatttcctaaagtgaaactaagatgtaaatacaagtctctctgttgccaaaacccaggaccttttcattgtgccacactgccttctgtgtgtgctctgatgaagagcttttgtaggtgttcttcaagatggaactgaaaattgagtaagacttcccagagacccagctgtgggggactatccgcagatggagaccctgggctaaagaggcaaactcttattttataagtaggggctaattggctgggtctaagtccagaatccccccagctgttatccccaagcctaatgctcaaacagacacatacaaaaaaagacaagtcaacaagaacggagaaaaatcaacccagaaaacaaaaaaagctgtaatagttgggtaaggtacatttatctatttttttatatatatatatttatatatatatatatacacacacacattatacacacacatacatagatatatacacatatatgtatatatgtatatatctatatagatatatatgtatatctatagatatatctatataggtatatgtatatatgtatatatagatatatatgtctatatctagattctagatatgcacatatatatctatatagatatatatgtctatatctagaatctagatatgcacagacatatatatctatgtatatgtctatatatgtatatatctatatgtatgtatctatatatctacgtatatatctatatctatatatctatgtatgtatgtataatactgaagctgtcatgtgactaccctagcaaagatcttatccacaaatataattataattataaatgcccaattatctgttgagatatcagctcatgatcatcttattgtagaaacgttttcgattgattttcaagcattcataagcattggctgagagactgcggtctgtaaagcactggcagaatacaaatgcttgttgagtcaacgggcatttattgagcatgtattatgtgctggtctttgaagactgaaaatttaaaaaacaaggcccctgtcctataatataacctattgcttggaatggagttttaaaaaccatgccaaggagaaattgtcatcaatgcctccttcctctctttggagatttctgtgacagggtaatgaaaattataatcactttagatatcaacctacttgcctaaagagaaactaaagagaaattgtcctgaattcacataaaccaaggtaatggaagtgatatgtttctcttttttttttttctcatcagaaaactgattattttaaacaaattgcagagaaagagagagagaggatgagatgaaggaaatgtattgacttcagagttgactcatgaactgtcatagtataagaaactgcatgaaattctgtagtgcagccaaatattaattgaaacaattaactgtagaaaacacgtgggcacgacaatattagcagtgcataatcatttgtagttaagaggtccttaccggattactgcagaaaagctctggagttctaattacttgtggaagtcccacaaggttactgcaaaacatggtaattagacggttgtaatataaggtgttagcaggggattgaggatttgctctaagcaccttggtgttttcgtggctatttactgagcagagtaccagaatttaatggaatttggtagaattctccaatgactcctatgagcacgtagttaacaaacgtatcttaatgtgagttccatggttttcttgaaagtgatgaacatcgccatctttaactactataaggagaaaatataacctaaatgaggtggattatgtggatttatttttgggatttattgctcttgtctttcggtggcatttgagtcaggtgtattacacagctttgagatcttggcttcactaggcataacccagcattagaaaggaagtagcttggtgcttctctgcaactccagctcagacttctgtgtgacagtccttttttacaacagaattgggacatcgctgcatacgtttttctcagctttgaggatgcttctacaacccatgcatgcacaatgaaagaaatattatacatttagtgatgggcacaatgtacttattcaaaaatgtcagtaaatataaaagatttatcaggtgagtgaaggagacacgtcttttttttttctttctcctttttgctgatcccgaatcactctcttacgttttttttttgtctgtgtaccacaaatgtgtacctaaaaatgaaactcagactataaactgccctaagctcccagagtagaaagcatgaaactaatctaaagaaaatattggcagaactcccacccgcgctttgattttggctcagaaaatcacctcctccttctatagggtctggttcgcctccgacagcagaatcaggggcagattccatcagtccatggaaatggggttcctggaagtaacactggctttctcatcttggtccaggcaaggggcacttgtcgggtcactgacaaaggcattcattaagagtcagttattttctgcaggtgcctttagtgagacaacagtgagaaggggcacttgggaagacgcggggagtgtatggagagccataccccactgcttctttggggttccaaacctctaagagaatttcccttatgctttagctgttgagaattgaaagtctcctttcaaacatttaagcagagcaagaggggatagctgctttgctacagttacctgttagtcaaaagcttaaaggagaaattcccttgcctgtcatgtgtattccacaacgcatgaaaagaccagacaaagcgaaacaaaacaaaccaacccgccgccagggggcagctgggaaacatttcgaagggctgggagagatggaaggttggcaaaaccaaggggagggggtccttgtacttggtgaacagatgactctctatagtaaggattcagggccgggaggcgggcaagcaggtacgcctaagcttcttgtgttgctaaccccctccgggtctaccccagttagcaatgtctactgggacctagaggggcgcagcttcgcctatttctctgacaagactgtaacatcttggaagggagaagctgtgtcacatctatctttgtaagccacagagcaacgagcaaagtgctgagtacatatatatacatgcatgcatatatgtgcatatgtacgcacatacacatgtatgtgtataatcgtataccttacatataaatctataattatgcatcatctgtatctgttaagttatacatcattttagtgcttttatggaggaaggaaagtaatttgcaggatcaatttctatgcagaagtgattcctggtacagattttaatgcattaaattttcacaaagtcttcaactccagcaatttaagttttatcaagggccctgggttttgctggctctcttcacctgtacctcttatcattaagagggaaaaagaaaaatatcctttcctgtagccccatggtacactgcaaacccctctgagaagctgtaatgagctggggaagctgtagtggggaggaggggaaaggctctgtaatccctcggcctcggggctgacatggggcacatcaggactcccctggcgaggctctgtcacttgacaaacttgtgtagttggagccataaattctccttgtactccgttgctccccacccacattcaccctgcacctctcacctacaagaagtgacagtcagagtactttaaaaaacaacaaaaactcaacagattttatcctttgtaaaagcctaccatttccacatttgtctaaaatgctgattttatagtcctctgtgtttgcattgcgtttgttatgagaactaactcctttatataggaatagcccagttgaagcaataccacttgactggatattttcaattcataggatattaatggatatagcacacataggacatatatatatatatatatatacacacacacacacacacacacacatatataaattagtacaaaattgttttgcctcctaacttgcaaggcctgtaaacccattcttttttctttttacatagatatgttgagatttttacatcttggcaaaatataggctgtaatttaattgacttagcaacactaccaaataaaacacttattcccaagggaaatttctttccacactttctgctggaacttctaattgacatctatttctgaataattgttgaaactaatgtgttggaagggctggtgatctcaaatagctataaatgaggcatcatggcatgtttttttcttcctgacaaatccataagtgaataaatattttaagtcagtattggccaggtgtggtggctcatacttgtaatcccagcacttggggaggccgaggcgggtggatcacttgagatcaggaggttgagaccggcctgaccaacatggtgaaaacccgtctctactaaaagtacaaaagtagacaggcatggtggcacatgcctgtaatcccagctactagggaggctgaggcaggagaattgcttgaacccaggaggcagaggttgcagtgagccgagatcacaccactgcactccagcctgggcaacaagtgtgaaactcttgtctcaaaaaaaaaaaaaaaagtattaaaaattctgtccacggaattgatttaatagatgaatcaataagtctggtatgaccatcatagagcaagcagataaggctctaggtacaacaaatatataattgtattagtcatcgaaaaggaatgcaatatatttcactagtcagagaaatagcaatgtggaatagaaagaaaatatgtaaaaactgatggacttttatttgaaatttggttgaacattaactgtggttctccctaaatatcatatacattttctttcacttcattggtgatgagccattaatatcataaataatacatactggtagaatgagtaaaaaaaagttcagtagaaccaattaacaaacaatgtaaaacatgtagatttagaatacctgtcatttactcaggtctacctttttgcccaaatttcataattctcctatcttggtcaacatctacaaggacaagatgaataaatctctctctgtgtgtagaacatcgtctgtttggtttcctccaagtagaaagccaggaatgattcttccttcacatttcctatcaatcataattctatcagccagctgaatagcttggtacactcagcgcctatcaaatattaaagccttcccattcttgaaattcacataatagcttggtttgttatcttgcactaaatctgtactacattacacatttatgattacctgtaaatttcacactgatatttaagttgtaaaatatgttgatgcctttaaaagtgtgtgagaacataaaattacacaatcataaagtaagttaaaaattacggcagcataaatactaaagtccaaattcttgtcttacataatccaagtgataattgttgtgctcttactctgtggctgaggacactgtgacaagcatggagaattcagctgtgagccagattacacgatccctgccttctgggagatgataccaaataaactcaccaatgaataagtatcgcaaattattacgtggggtataaagaaaacaaagaggaagctgtgaccaggtaccaggcttatggtatgggacttttcaaagccaagccttgaaggatgagaaggagctatgcacacagcaggtgaaggagaaggggcagtgaactggctggagaagagcaggtgcaaaggccctgcacgggaaggtggttcagcatctgcaggattagcgaggaggcctgtacaactgccacagggcaggcaagggaaggagagatatgaaaggaacctgcggaacattatggagaatattatgaagaatttgtatttttcctaaggaatccgttttgggacagggaactgatttaatttacatttttgaaaaaccctctcaggaggctgaggtgggtggatcacgaggtcaagagatcgagaccatcctggccaacgtggtgaaaccctgtctctactaaaaatacaaaaactagctgggtgtgatagcacgtgcctgtagtcccagctactcgagaggctgaggcaggagaattgcttgaactcagggcagaggctgcagtgagccgagatcgcgccactgcactctagcctggtgacagagcgagactctgtctcaaacaaacaaaaaaacaaaacaaaacaaacaaaaaactcgctcaaggttgggtgcagcagctcatgccagtaatcccagcactttgggaggctgaggctggctaatgacctgagcccaaaagttcaagaccagctgaggcaatatggggaaaccccgtctgcataaaaatataacaattagctgggtgcattggtgcgcacctgtagtcccagatactcaggaggctgaggtgggaggactgctcaagcctggaaggtcaaggctgcagtgagctatgatcatgccactatattccagcctgggtaacacagcaagaccccgtctcaaacaaacaaacaaaaaacatgctggcttttgtgtcgcaaatggattgtagtatatccaagaaaggaagtagagagatcatttagtagacttttacgcaagttcagtaaacagatactagaggcttggactagagtggtggcccaaagacagagggtaatgaaaatattccaggtactttgggagcaggaatcaacagaaattggtgatgggttatcaggggcatcaggaagggagggacagagaatggcatcagtatgggcagtggtaacgcttgtgtgaggaacagtgtcagaggaacaggtgtaaagggtgtgtgggttatggtgcggttagaatcaagaccgacttggaaacaagctaagtttgagatgcctttgagaatccaagtggagttttcaaggagtcagtttaccatgaaattcagaagttctgcagagagttcaggagataagacataaatttagaagtcatgagtaggtaaatgatattaaagtaatgctgatgaagagttgcatgatagttgtctgggagtgagaagtctggttggggaggagaagctaataaaggagacagaaggagccaccaccgagggagaaggaacacagagagggcatggagatctggaagcccatagtaagcacgcagtgaggattagtgttactatcatttggcattaaattgtcttatccagtggaatatcccagtgggatggaggggaaaaaagccaggttggaaagagagaagaaggaatgggaggcaagtcagtggggacaacatatggcaaccactcttagaagcagtacgaagaaggataaaaaattctgcggagggggataagaggtttatgggtggacttttgtttgctgttcagttattgactggctgagcatgggagaggagagcatgtttgtaggatgtaggagatgaagcagggagggagggcccatgaaacctagagtgcagatgactcaagagccaaccccgagtgggggagcccaagcccaatgggggcgggggggctcggcttggagcaaggccaattctctcctggtaatgggaacacaagtgccagagaaggatgcaaatggcaaggaggttgagactgggttgtgaggcaatgagaaaggtcccttctgatagtttctactttatcattttacattttaaaaagatgtgtgcagtgcagccatggagtaagggagggagagcagaggagaggttaggaaaggtcagagggtaagctatgaagagctgcataggagcacgggaaatccagcagccagagaagaggaggacgatcccagacggtgcccagtgtgtatctgcggaggaatttaaagtaaaatgggtgagcccagttgtgtaattatctccagctctgcaaagtggacattcatgtggggttcagattggccactggaatggaggcaggatttctaggggagagaaagcctcaacagcttacagggaaggcctggcagacccaatgttgcatgacaaggaggaagagtaggcgggtgagacaaatgacctgaagctcacagcaggccatgctcaggaggaacgtgctgatctcaaagagaaaagtgtgggctgagaggacaccagcttgactccgagggcctaggagatgtggagagggaggggcaagcagaggaaggggtttccttgagagacgacctggttccggagaagttcctgcagcaaaaacacgcggggcatccagggaagtgcacgggccatggcggaggctgtccgaggggtggggacacgagggccatgaggtgggtgcttgtgggaggctgcggtgcgtgattagcagcaggtgagagtagagaagacagcggaattgaagacaactgggagctaagactggagggtccctgcggcctctcagagggatgggggctgagccctcccatggtcaggtcacaggccctgcaggtgctgggggccaactcacatcccttttcttccctctcccttagggtctcaccacttccgtgcaaagatgacaaatattgtgtaaacgaatattcaatatccctaacattcacaatattcctcatatctagctcacatactttagatcctcaaattcctattttaaacaaaaatgcaactgtcgtggtgccagatgatggcatttagcctctttagtgtgttacagaatcttttcctgagacacttaggaaagcacaaactttttcacccaaacaatgttgaagatggcagagcctggtttgagaatccccactcagggggagaaatagtcccagggtgccagtatccagagagctgacctaccagggaaagtgcttatgtttctttcaggataggcagtatggcaaacaaagtcccaaacacatcaatatgtcattgatcacttgacccaacttaaattttttattcctttgttcattgataacattgcatacccatagcgtgtgacagttttctcaggggctgaggatgcagccacagacaagcccagcttcttgccagtaggggaggtgcatgacagaaagcgttttgattctttttatcatccatactctctgcaatgattctcacagacaacgcactctcccaacatactgcacccacgtgacagtgggagcagcctccctacactatctccataactctgcttggtgacctctcagatgacagtaaacatcatcactcccagatagttctgaaattgtcatgttggaaagtacttgataactgttaacacaaaagggactcagtaatatcgaagggttatggatatatattcctattatgtgaaaaatacatatcttgcattcctagcagacagtagtaggttattgctggtactttcatatgttggggggaaaaacatgtacttaaaacagtgcctcgactacggcaagcagaattgaaattatgatgatgataatgatgaaaataacattactttcattatgaaacagtgcaaaatggatagtagacaaacactatccgtaattcaatgtggataattcaacgtgaagacactggaagtaaaacaatactttgaggatccagaacttcctcatttcacattctgttaatcagggttgacgtgtgctgttggctggctgtcttcatgtcagccagatcatcaagaatgtcttatcaagcaggtgagtgggaaacagactctcccctacaggccagcacaagtggctactgccctctgttgccaatagacagtgggcaataggtgttggaaaaaacgccaaggatattaaaatgtgagccttgaaaaaggactcatgagcaattgacaattagcaatcagctgggttgaaattgatcaatgagggattcaaagtaataaaaaataatgagtccgattaaaggcaaagcagcaaaaaaaagctagtagcttctacttagaacacatagttcatgaaaattactataactaaacattgtatttaagaacactttctcggccagacgcggtggctcatgcctgtaactccagcactttgggaggccaaggcaggcagattacttgatgtcaggagttcgagatcaccgtggccaaaacggtgaaaccctgtctctgctacgagtacaaaaatcagccaggcatggtcgtgcacacccgtaatcccagctatttggaaggctgaggagggagaatcgcttgaacctgggaggtggaggctgcagtgagctgagatcacaccactgcactccagccagggtgacagagtgaaaccttgtctcgaaaaaaaaaaaaaaaaaaaaaaaaaaaacactttctctcagcttttaatttttattgctgtttcccaaattattctttctttagaactgtttatcacatgacaagaccaaaagatttttctttccttttcttctttccttctctctctctctccccctacctcctcttttttctttcttgctgtctttatgtctttcttttttttaaatagagattcatggcctgtgtgggctagtgaaatacccactgggttaggggttgaaagatatggaggcaagtcccagcaacctcacttcaaactctgagtcataagataataacatgaacctagaatagctaagataactttgaaaaggaagaacaaagttaaaggataaatgcttcatgatttcaacactaaatgtaaatctacagaaatcaagacagtacgctattggcatacagatacccagatagatcagtgacacagagcgcagagaacagaaatagaccctccagtacatggccaactgactttcaacaaaggtgcaagatcagttcagtagcaaaaggatactctcttcagtggatgctgtttgaaaaaaataaataccaataatataaaagaaactttgattcctaacttgtatcatacacaaaagataattcaaaatagatcagatatcttaatataaaacataaagcttctagaagaaaacataggggaaaaccttcatgacattttgttaggcaaagatttcttaggtatgctacataaagcacaatccataaaagaacaagctggcaaattggatttaactgaaattaaaaacttctgctctttgaaagacactgttaagaaaatgaaataataagccacacacagagagaaaacatttgcaaatcatacatctgataaaatacttgcatgtagaatatataaagaattcttacatttttatagtaagaatgcaactcatattttaaaatatgagcaaccactgcactccagcctgaacgacagagactccgtgtcaccataaaaataataataaaatatgtgcaaaagattttaacaggcacttcaccaaagaaagtaagagaatggcaaataaacacataaaaagatagtcaggccaggcgcagtggcttatgcctgtaatcccagcactttgggaggctgaggtgggtggatcacctgaggtcaggtgttcaagaccagcctgaccaacatggcaaaatcccatctctactaaaaatacaaaaattagctgggcatggtggcgtgtgcctgtaatcccagctactcggggggctgaggcaagagaatcgcttgaacccgggatgcagaggttgcagtttgctgagatcgcaccattgcactccagcctgggcaatagagcaaaactccatctctctctctctctctctctctctctctctctctctctgtgtatatatatatacacacacacacacacacacacacacacacacacatctctctctctgtatatatatgtatatatatatacagttaaatatatatatatatatttaacatcattagtcattaggaaatgcaacataattccatagtgagacaccactacacacttaatggaatgtgaaaacttaaaagattgatgataccaagtgttgagtaggaactggagcaactagaactctcgtacattctgggtgggcatgtaaaatggaaatggtacaaccaccacggaaagtagtttggcagttccttaaaaagaaactctaaaatatgatttagtcaccccacttctaggtatttacacaagataaaaagaaacatatctacatgtacaaagacttgcataaaatttcatagatgcttgttggtaatgcctggcaactggaaacaagcccagcattcatcagcagtggaaaggataagcaaattgtggttgtatacataaaatatacacaattcagcagtagaaaggagtaaacttttcttatacacaacaatgataaatttcaaaataattttgctgtatcaaagaaatcctacaaaaagagagtacatactctacggtagcatttatatacaattctagaaaatgtaaacaaataaataattgcttggcagggacacatgggaggggtcaatggctatgttccttacattgattgttttactggcatatacgtgtgtaaaacttatcaaatggtacattttaaatatgggcctcttgtatgtcaataaagctgttaaaaacaatataaaccaacattagccatttaattaacacaggcccacttaaagatgatagatcaggaagtcaaagctcagagaaataaaaggactggcctgaagtcacaaagctgaagagacttgaaattcagtctcaggtctgtctgagtatacaacctgtctcttccgtcctataccacacaaacacatcttaacctcttttgttttgaaaatctctcatttcaggccgggcgcagtggctcatgcctgtaatcctagcactttgggaggccgaggcaggtggatcacgaggccaggagttcaagaccagcctggccaagatggtgaaaccccgtctctactaaaaatacacaaattagccaggcgtggtggtgggcacctgtagtcccagctactcaggaggctgaggcaggagaatagcttgaactccagaggcagaggttgcagtgagctgagattgcaccactgcattccagcctggcgacagagtgagactgtttaaaaaaaaaaaaaacaaaattaaaacaagagataatctctcatttcaaagacatcaaaattccttcaagttgtgtaatcaggatggcaagcattttaatgtatgagttcatggcacgcctgcatcttccccctcagtaactaggatctaggggcttcctaggtcagttggtagaatgcattggattggaaaggttggccagtcactgtaaatttaaaggtgtttttctgaatgcttcagaaagtaccaaaaagccattaaaaatgaaagactaatggaacaattatgtcccattttgacttgtaaaaaccaggattctttgtgtcttcagtatttctagtatttctaagatgttaatcattccaataaagctgaatggcatgacagattttcggcacctatcagagtggcagccatttccaacttcttttttattctatatactgtcaatgtcactaacatagattacatttcaattacctttttctattcactgactcacatacatttcacttaattgctagatccttccacgcagttttcccattgtctggcttccacaaccttatttctgtcacaggttgtacagccaatggtcaccacattgcagagtatatatctggtgtttcaagtgggttttagggttccccagatttagaaatatgtacacctgaacataaaactgggttcagttttctgaagtctgaccaatgagctgacatactgatagctcactgaggtaaaagaagctttgtgatacaactgaaggatgtttatactttcagtgaacgaggcatagcagcctaaatgcaaccgattgaaccacaaataatacttctcaatcaaatggccttttatctttcttgtctctaaatatacccttttaccacacagctcgttcttaaaaaaaaaaaaaatccggtggtcacaatgtcaattgctaactttattttctatttatatcgtccactttatgaatacccttttcctcaatttaattagttagtgtcactcacactttaactgggaacattgtaagactgagctgaatttgaaaacaatgccacgatgtcagactgagtcacatcaattttctaactgcccaccacagccacagcgcaactcaacgacacccacacgggtatctgcgtcctggaattggacttttacatttttattttaatgaaaatgatgtattacatataagtaaaacaacacctttaaagatggaaaagaccctttttttcaagcctcaatttcagttctagtgggacagccaggtgggagggggtccctggagaaactccaaccagcctgccctctgcagtggggaggagcctggcccctcctcctcctgtgtggaacccgagattcaggctgagcgccggaagccgtctagcagggactctggcctagcgagagtccctgtttcccccttttcttccttttcacctaataaaaccctgtcttacccaccctttaaattgtcttgcaagcctgaatttttgtggtcgtgggacacagaaccccgtccatggctgaactaaggaaaagtcctgcaacatcagaaccttcagttccgcataattaaagctcaatgcaaaagaatcatgagcataagtcctctaagagcataaataatcaagtgttgctgatgttccctaatatttgtgcgttttcagcctacacccgcacatatctaaactgttatcaatggcatgaatgagtcaagacttcagtgaggcagcacatatttcaatacaatgcaacttcgctggccacaatcaatagagtgtttttcactatgccatgctttgagtattcagcaatcacttcagaatggcagactgccgtaaaatagaggccaaatcctacccagagaaattttatggtttaaacagatgttctagagaattactgaaaattaatgtcccagtcctaaggtattatggccagttaataagtgacatggtgaaccattgtgttgcaacaaaacatagtaggtacttgccttgaataaatcaattctttattgtcatatttttgtgtctttctccagataagacgggctgctctttgaaagtaaaaagtacgtctttttgctttgtatttctatgactagcactgtggccgagctacggtgtgcagtggatggatggatggatgatggatgaatggatggatagacaaatgcatggatcaatatgtgcatgtatgcctttgtgccacatggtacaatgtaacaggagacctcggccaatggttgcaaatgctcacatgacaaatgacaatcatcagatttaccagatgcacaagttacagtcagaaataggtagtatctgataatatcaagatatataatgggacccaagaaatagattaaagactgactttataaaaatacagaactgtaagcatcagcatctgaccagcccaatctcctggcttccaagtaagaaaaccattctgaaatgttaaaggaaaggccaatcatacatagagagctagaagcagagctataatcagaaaacagaggtaccaacttcagtccaaggcttgtatcaccttaggaattctatcaagtacacactcatgaagtgacatttcctgaggaggttggcactgggaaaaacggaatcccaaggaagaacaagatttgaaggtttttcccaaaatggttataatttaagtggatttatcaagaacaatttgtatctggtaattaggtagtgattccagaatggaacaggacatgagcaccttggaggacaggacatttggcctagggaggtctgggttggtggaggacaggacatatctggagctacagagcgagagtgggcaggcagttcaggcattctccagttggcatagacgggacagaattcctacgggtgagggctgaaaaaacaacaggcacacatgaagtcgtgctctgggagttaatgagaggaatttaggtagccaagaaagaaaactaggctgatgtgaggcaacagtaagaaaaaatacgaagccacagtaggctggaccagaacactgttgtggtaaaaatggaatctcaattagcataagacagtgagcgaatggacagcagtgggagaacctgacaatgaggaattttgaggttcttgtagattcaggagtagaataaagtctgaatgctaatagtgaccaagttagaacagaaagcaaaccaaaaagacagatgcactagaaacgtgattgaaaaagacccagaagggttaagtcagggtcttttaatgcagaagttactttcaagctattaatgaacaaattaaagactacttgatgtcaggctgtgcaatggacatttctatgacggtggaaatactctatgcctgaactaatattgtatccactgaacgtatttacattgttttgtaatcatgagaaactgaaatttaatttcatataatctatataaatttagatttaaataactacaaaaaccggtggccacatgtgaagtttggcacacaatgcattcagtgtactatagagctatgaaatgcctaaggaaaaggaataaaattctacacataataagttttatactgttatattcttgatgcataattgctacattctaggccaccattgctctcaaatatactggcaccaagaaattctattgccattttcaagttgaagttttcaattatctttcctttcctgtaacattctagaaaggatctgagacaattatacaaatgtataccaataacatttaagtagacaaaaaatggagagaacatgaaatactgagagactactgaggacaaaagataaagagagcatatagaaataaaacccagaatagatgacagtttcttaagataagtcctgaccttcctagtggcctaaggagagtcaacattgtactctgtaaccgttgtattacctatagcatagaaaacttatgtgtcattcaggagaactaatatttttcctggactgaagtttgaatcacgcaaatgtctttgaatcgcacaaatcatttgcccaaatcgtgcgactctctgtaagcttgtgagccgtgagttggcacgttcctgccggaattggagaagcaaaggctgaaagaagcaggcagattgacaggtgatgtagatgcatggagacaaagaaggggtctttggaccaatggttctgttgcccccgagacccacccctgtccctgggaaacaggagacacccccatccttgatagtaaccccctcctctcttcttatattagctttagttggttctgttcctgtcaaccagatgagccttagtgcagaggggaacatcttgcaggagttgacgaagagcggagcagtgttagtgggtgatttcctcagcgaccacgttgtaagaggagattgtgcatctgtttctgtctctgtttcttgcactgcccgttgctgtgagttgagagtttaaggctgaggcacattcagcaagggtcatttacagaacttcaacagcacactcaccagcccctttcccccccacaacgtgcaaagtgcaatatcacccatattaaattgattgaaagttaaatttttgtcatggattccatgataccactcacgagcatttgtgagctacaagctgaagacctacccgtcctgagctgaatcgagaaacctaagcattaccttcaacgcctgcctgcccttcctccacacgaggcccatcacgagtcccactgaatttggtctttcacctctcctcttgcccctttgcaaccattttcctccctccagcaggagtattcttttaaaaatgcagatctgatcatgccacttctcttatatgaagcttccagcatctgacttccaggactgcatcctccagggtgggcttgctgggccctgcccatttgctggtctctttcactctcctccagccactctggtctctccatgctacagacatgctttgctctctcctgtctcaaggttttacctcaagttgttcctttcttcccctgtcctgcctcacttcctccgtttcttccatctcttatctaatctgtaattatatagctgcatggtttttcataaatatctgaaacccccactgaattgcaagctccttgaggggaagaagcttatctattctgcaaaccgttgcttctccctgtgacgcagagcctgcagtgtagtagatactgcctataaaatggacaggatgcttggatttgctttatctgacattttaaggacacactttataaattgtagaggcctatgcaaccgtctttgtttttacttagaggatacaaattatatcattcaacaggatgccacagttccatatatttctcaaaatgtgaccagatgcaccatttttaatgaaaattaagctctacttccaagttaagggaaaattattttaagctattgatacaagttttaagaattcagtaatttaattgtgcatttctatgtgaaataaaaacaggaaacttattagggtgttttctgtaatatgaataattaatatttgcaatttagaaatctatctccctacaatgtagctgtagtctcagaaggaaagtgtattaaaacaatagctaaatgctttcaattcaaagtacttggtattaaatccctcaggcatcaaaatagctctgtagtcttttctagaatagtatgccaagcagtcttaaacacatattttattggcatcagaaaagcaactgcaaatgttttctcttgtattcaaactcctttaaaaaaaagattccattgctgagctctgacaaatatgcctcctactaccacaccaggttcctttgcaaacacacaattcacaattaaaagcaattttgtaaaatgccttggagtggttaaatatgtaattgggtaattttctgaaatgcttattacttacttcagcctcatttcagtctcactggtaaacagtatattcctgttaagtgttattatccccaaaaacgcttccataatcttcagtgttcctttaacattcctataaacacatcatatattacttggggacgtggatcatgaaacacagaagctacccgtgccagtcccttatttaaatggcaaagtggtcttccttgtctctgaacccgggttttctaaatcattcgcatagtggaaaatgaacaataggacttttaaacctccttatgatttagattatatcttagctggttgcaaatctcattatcagctttacagcttgatttatttttatttttggatcagaaggaagaatggcaaaattacagcctagacgtttgctttggaaaataaagtttgaagttagctgttgttgatttatacccagtatgctatacttagcatgagtgtacagttaagcatactttataggtaattactccttctattgatatgatgatagctacagaagctgtgtacaaccgagaacaacacccaattcttgaaacagtaccttctaaagtggtatattaggcaaataaagtgtgatgatggtggtggtatttcatccaacaagagatattagataaataaattgtgatgatgatggtggcatttcatccaacaagaggtcttactccctctgaaaccaacatcttttactacttgcttagttatatatgaacaataaaaactcaccaagatcactgattttgttgaaatgaagagaaagtaaacagtctctaactgaaacgagcatgttcaaattaaaatagggagtaacaaatcaaaaacaaaataaaacaaaatgctttgaattgtttttgaaggcaaagtgtcccaaatacttttacttctatgctctattattttaggtcctacttttctacaccataacacagtattttaatattaataaactagtttccctctatgttaataacagagatcaattaaaatttggtctttgtcattttgcagttaggttattttaactcacaatacaacatgtacagttcttttattctacaaaaatatatagtattaagaaaccaaaaccattttaatcaaaatttctgctatgacttgaagactacagaagcccctatttttgcctgttgttcccttgataaagtattgatatggaagtctcaattactaaaacagaaaaaacttatgcctgctgtcattgaccacatttttttttttttagacagagtctcgatctgtcaccaggctggagtgcagtggctcaatcttggctcactgcaacctccacctcccgggttcaagtaattcttctgcctcagcctcctgagtagctgggactacaggtgcacgccaccatgcccagctaatttttctgtattttcagtagagacggggtttcaccatgttggccaggatggtctcgatttcttgaccttgtgatcctcccaccttttttgttgtaaaataatccttgatatgctttatggacaacccctccccacggttccacagaacacagtttgataaacatcaatctaaaggtactgcagagaggctgagatgctagtgtgtcttgcagagccattaggaggcactgtctccacgtactgatttgattgtattttttcatgctgagtctgaccaatttcatggattcagtaaatagtaagacttggtttaggggccagcagacaaggatcataacatctttgaggtggaagaagtcctagacatgaaagaggttttgtgaataaaaggtggagagggaaaatgaactttacagtcaggcagacctatgtttacatttagcttctgagagccttagtttcctcatctgcagaaggagattattagtatcaaccacagagaatcactgtgaggcttatatatggtaatgtacgcaaaaggcctgccctagtatccagtagctagaaagtaacgtgaccaaaataaccaggttaagttggggtagagtcaggattagcctcacgacttatagttcagtactatttctaccatagtgatctaatttgaagaacaagttagctaatgagtgcatcttgctgtaggtccaaaaacaacctccaagacaaactcagcatttcccttacaacaatcagcatgggccgggcacggtggctcatgcctgtaatcccagcactttgggaggctgaggcgggcggatcactaggtcaggagatcgagaccatcctggctaacacggtgaaacgccatctctactaaaaatacaaaaacaaaattagtcgggtgtggtggcgggcgcctgtagtcccagctactcaggaggctgaagcaggagaatggcgtgagcccgggaggcggagcttgcagtgagccaagatcaggccactgcactcccgcctgggcgacagagcaaaactccttctcaaaaaaaaaaaaacaaaaaccaatcagcatggcagaaaaaagaacgctccgaagcaaagctgcaagcattaactattgtacttctgatgcccatctaaagacacacaggaaatttgcttagaaattataacacggtggagaagtaaacagttagaagtcactctcaactgaggctgtttaggtatttgtaactatgttaccttaaaggttactgttctaataataaagttgtcctgtcctggctgggggtggggggctgggggtgtggggatgggagtgcagggaggtaggggtcttccggacactgcatcaggggaggtagcagcccctcactcaggtgtgactaggctgggataacatggatactgtggtatccctagagtatccatgttatctggctttagtgatggcattcctgaaaatgaaatgtgtatctgaaatgtgctttctgttaagatgtatcaaaaatttatgttttcctgaattttaaaactgactggtttagaaaaatgaatggatgacttcattttttctactttgttcaaatctagtctaattaagttttttttttttctgcagcgtaagacatgagttatgtcagaaacaagaggttctgatatttgaaatgactaaacacgaagggggctcccaagggaagttagggtattccttctgaaagtccttcaagacagggttgatttttaagtgtttgggatggctcaaatgcatctgaaatagattaaaactgaaaatattagtgcatcacatatagtaggaaagtattattttgtgaaagggttttcaattacatgcgtgtgtacattttatatgtttatagctcttgatgtaaaatgtatctctttccataggtagcagcaacgtaactttgaaatccactggcctagatcagtgctctccaaaattttggtggaaaacccctattagtaaaaataaagaattgattatgaataccaatactgattcaatgcaaatactgcttctattttatatacatttaaacacatggaaaacaaaagatagaaaaacaaaaaaaatttaaaggaggatataaaaagtaaatcaaacacagaaattataaagttttcttcctgtagcccaatgaaccatagtctggagtccacttcttttagtgtagctcccaattccattagaataccgtgaccccaatttcaaactacatatctgtttaatatcatacttgatttcagtccacaagcacataaatgagttttattcattactcatctgcagcctattcagaatacaaaattttctggaaaggacttagaagttatactaacaacccagttaaagcagcctaccaatgctatcagtgagaagagaaaaataatacagagtggtagcctcagtaatgccgctatttatactcctacatatacctctttctgaaaaagattagtttagaaaatctggttttgtgcaatagatctaatataagaattttataaagaactatcaataactttccaagttatttgttttcacaagcacgtatttatggaacgttttacatttcttataatgttaatccctgattcaaaggaattaattattcctatatcaaagtattaatgtagaaaatgtcaaaaagaaaataagatttttacttttcaactatacaacttcaattaaacctacatcgcagcttcaggtttcccgtgtgagtcacgcgtttctagaatgcattctaaaactggtgcataggtttggtggtgactgggtaccaggtactgtgccagtcatttttatataccatctgatttatgacctctgagttcagaattctcttcattttaaaacgaggaaatcagctcgacatccagttgagtgggctggtcaatgaattggcaccatctgagtacagggtcctcactttgcccaaggttcctgaagcatgaacataaccaagcctactccttggaagctgggctcccagtacccctagaggaatatctttttgacagaggctgccagatgtccgcctaaattcctcttttctctggttcctaggcctctactcaagggtccattactgagactccctcgaaggtatatatagccaaatgactaaggcctagcttaaggatcttaggggtgtgtgctatttctgggctgggattatatgaaagatgcatgcctagtttataatttcattcccctctgccagctggatcttggatgtggggattaagcttgaccatggagatatggaccaggcccagtgggataataaaggcaaaagatacaaatgcccctcagaagataaccaccacccacctgaaacgcccaccccaggcaagaattatgctgcggttgtgtgtgagccactgattacattgttggctttactgtaactgttggcagtttagtccacaataactggacgcctcaggtcctgacaatccatcctgggagagccagggactgagacatgaccacaaatgctgtcctagccacctgcacccccaagaagatgcttgaatctttacatttacaaagcacaggaaagttaggaggatccatcctgaaacgtctgctagtgagtctagattttcaaatcagaaaattggcagaaagagccctgcattccccagggacactgcgttgaagctcaggaaaccagcccacatggagcatggggaagggcttttgggaaggctggaggacaaggcgtgtcttaggaacacccagtagcttaaccgcagggagcagaacttacatacagagggctcacgttcaataggccttttctgaacttgggggtgctgagtatttaaaaactatttcagaattgagaaactgattgttataggataaaatgtgtacccccaaattcatacattgaagttctaaccccagttcctcaggatgtgactctatttggcaatagagcctttatttatttatttatttatttattcatttatgagacagagtttcattctgtcacccaggctggagtgcaatggtgccgtctcagctcactgtaacctccgcttcccaggtgcaagtgattctcctgcctcagcctcccgagtagctgggattacaggcgtgcaccaccacgcccaactaatttttgtatttttagtaaagacgggatttcaccatgttggtcagtctggtcttgaactcctgacctcaggagatccacccgcctcagcctcccaaaatggtggcattacaggcgggagtcactgtgcctggccggcaacagggcctttaaagaggtaacatgaggctattggtgtagatcttcacccaatctgactggtgtccttagaagacgaggagatgaggacagaggcacagagggaaaatagaccacaggaggacacaggcaggacgatatctaccagccaaggagagaggcttcaggagaaatcaaccctgctgacaccttcatctcagacttccagcctccagaactgtgggaaaattaattcctgccgtttaagccacccgggctgcggtattttgtaatagaagcctgggcaaactgagacagtagttgatggccgggcgcagtggctcatgcctgtaatcccagcactttgggaggccgaggtgggcggattacgaggtcaggagatcgagaccatcctggctaacacggtgaaaccctgtctctactaaaaatataaaaaattagcctggcatcatggcgggcacctgtggtcccagctactcaggaggctgaggcaggagaatggtgtgaaattgggaggcagagcttgcagtgagccgagatcgcgccactgcgctccagcttgggcgacagaacaagactccacctcaaaaaaaaaaaaaaaataaaataaaataaaataaaataaaataaaagcactgctgtgcttgagccacaagaaagagctgtcacaggtagcagcttgggggagggatcaggagtgatgctgaggaagtaaataagattacttctttgaatgctgttcttattcctccttccttgtgtttcaccactgccttttgtacagtgttttcctctataaatatataattccaagactggtgatgtctagtaatggttcaaaaagcagaaaatataagaaatattattttttccaaacactcgagtagaatcagtgatggaacatgtgagatcacctggagggcattcagactttactgcaaataaataatacaattacttggtttgggtattagatatttatgttcatcttgacattagaatattaagccactcctcctcttgctaacttggtatgcattgaaaacatgaaattctctcagtctcctgctttggaaccaaacagtataaaccctcataaatatgtaaatcaacccctctaagcacattattaattatttcaaagatagtaggaggtcactagctcatagcaatttctatgcatgaagtctcagtaacacaagacatcgcacagggaggaagaataaagttttatcacagttaccgaatgtgtgtgtgtatgtgtgtgtgtgtttgtatgtaagtggccaaagcaacatacagtattgaatgcagcaccactaggctctgaatagacgcctgtgggtgatgatgatggcggtagtgatgaaggaacggaatctacagctagaacagtatttttttttgaacctgtctgcaccaggaataatatttttaaaatccaaagggattccagcctcagatacacttaaattgttcttgacccacatggccctgctttcttctggaataaagttctgactagttgcaaaaatccatagctcaggaagatatagcaggcatctcatttcctgtgacactgcagagatcacagactgtgttgctcaatgtgtctctaatgttgcatattgccgagcggctctctggctgctgtaagtcagcttcgtttaggtgattctcagcaatcgacatgttctgatataggccgtggggctcgctgaggtggaaccacccaaaacaccaaatctgaagcagttgaggacgttggatacaacactgacagatgatggaggatatttaacacaggcaatgaactctgctttttacaattcatcaaacaaatataagacgcactctcaccaaagtgcaataaactgatcttgtcatccaagcaattcttcccagtcactagtccagtttgcttttaaatctctgattgtaagcttaaaatttatctgatgaaaaagataataaactattttcacacccaataacacacatccctcaacccaatgaggaagacagccattatctagtgtaattaacaaaatatatataacaaaaataagaatgaaaaaaccttgaatggaataatttgcacatatattcagaggttcaggactaggagtattactggaatttagatggttctggagagggacatttggcaaaacctttcaagcactactagtttgaaagttaaaagcaggcaaaaacttgcattatttagggttgtatatataggtggtagtgctacaaagaaaagcagggaatgataattattaagatcagatagtagttatatctagacaggcagaggaagcggctatggaggagatcacacggaggcttctgggctgctggctcacattgtgtgatccaggtggtggttacagaggttttctataactatgcaaatctataactatacaagtgctataagcactcttgtgtatgcataatatggctcataataaatttaagaatacatcaaaccatttaaaatgatatatttaaaggtcaattagtattttattgactacgttagaatcctcccagcctcaggaggtgcccactctgatgacaatgcagaatgcatacattcaaaaattgtgccaactgctgacgaggcagggggaaagaattcaggccattctactatctgtttatctatctatcatctatctatctattatcaatcaatcaacccatccatccattcatctatccatttatctatctgcacatacacactacacaaacacacactaaaaagaagaagaaatcctaaagacagctgttttgagcaacttttgtagctaccttaagtactgacagacatctttccacatttctttgcataagtaataaatttatagctaaaaattgtttgtgtttgccctcataaaacaaaggtagaatgtgctttttaagagtttttggcagaaatgggtggaaaaaattatttttattctctctgctattcagaacattcccaccttatttttgctttctcaaatgttattttatctttaaacacttaataagatgcagaaaaagaagaagaagaaggggaaagaagtcagtttggagagtcgaaattcaaggaaagtaagaactgggcaaagttgtcttggcgttcctcccagagaggaagggagtgatgctgctggagctgtttcaaacggacggacggaatcacttcatctgtaatccagacacatgcatgcatcaggcaaacataaaattctgttgtcttctctgaagtagaattctataaaggcagcatttccaaggccaaaaagatgaccgaacagacagtgccctgttgatccagctagaatgagctctgcaacaccatcaattttgtcctacagctctttttctggtccttgtccgtgtaccagtcactccttataatgaagtcacttgattgagtgttgttcctgttgcaagcagggagaggaaagctgagaagccattcaataaatgttatgtttcgccctcctctccaccagcgttagagactgctgtgtgttgacagcccgtttgctttttctccttggcacagggccagatcctgtttcctcccccatcctttctactccctgagcacacacacacacacacacacacacacacacacacacacacacacacacacggcgtggctaggcagggccatgtggctgagttctggtacaaggaacgtggaaataagtgacatgctccatttgcaggcctgggatctaaacctgagtctccagtgtggtgtgctgcttgctcttcctccgccagctggccccatgaagaggatcgagctgagacacaggggctgctgtgggtgacagaaccagaagatggcaggattcgggtctgggtccctggataacggagtggagcagaggccccttggccaacccacactggaccatgacatgaagggaaatcaatcttgaccctgttcagccactgcgattccagtgttgctttggttagagaagttagactattaccctgactttacaccgcctcatgcatccaaatcaaaggaaaactgtcaaaattgctaaatcattcccaaaaataaaacaggaaggagtttaaactccgaagcttaggaagtttgatttaatttcaatcaatttggaggcagaaggaactttgaacttggactacaagcacatcaggagttagtttcaatgtggcttcaatcctggtgccaccattttcacagtggcaattataattatacaaggtccaggagctagaaagagaatggactgtctgtttcagcgaggcaggcaaacagacaggcagacacatggagattgcatgtggataggctctgggtagtttaacattttaaagcttataatacggattgccaaattgctttatggaaatatatgaatttatattcttacctcttttgaatgtgtgtccatcattttatattttatgctttaagttagcaattcttttttttttaagacagggtctcactcagtcactcaggctggagtgaaatggcacaatcatggctcactgcaacctcagcctcccaagctcaagcaatcctcccacctcagcttcccaagtagctgagactgtagatatgccccaacacactgacctaatttttaaattttttgtagaaaaggggtctccctgtgttgcaccaggctagcctcaaattcctaggcttaagtgattcacgtagccctcccaaagtgctaggattacaggcttaagccagggcacccagcctaagttagcaattccgtagcaactaattatgttgaatttttaatatgcgtgttggccatttgcatatattcttttgtaacgcatcttttaatatatttacctagttttccaatgtgttttaggagttatattaacatgattatttgtatttaggagagcaatgttcgaaaaccaaaaaatattccttcatattagattttatgttttgctccctaagtaggtgtctgcaacccaagtttcttgactccctaggcatcgagaatatctctgtatctaaacaggatcagaactgtctgtctcatgctgcactatgactgacaacaaccaagaagcataacggactatagttggtgagctgagataatagatggaaagggaattgcattctaagttaggtgaaaactagaattacatgaaaagtgacctgggagtacaacagtaaaaacaaaaaacaaaaggcaaaaacataaccgatggacttgaatggtactaatggtgaggctgatggcatttcatagggaaggtgggaaactacttcctcagcccctagagcaacagaaaaatctgtgctaccagggcttataaaggacaagaagtaagtgcattttgcatagtagccatcattctacagtagcactctcaacaaatcaacctaaatacatgaagctccaccaagttgggtgagtgctactcagttttaaaaggagatgcagagggtgcttcatcatttcaaaacaattccgagcatagactactagtaatagctggcagcaaacctttcaggataattaaaaagattttaccaaagcccatacctttaggtaagagtttgtcagaggttctggaaataggctgttttggctatgtttgtcaatcttattttcaacttcatcaaaatgtactgaaaaactcatgctagctagcaagtcaaatcactagagattacatagacatgggcagagggagtatttttgcatttatgaatgctacagactcccattgaaaatgccttcttgcttacagactgcccaccccagagtagttcttaaatatttaaacgtgggaactttaacaaaccatgatgcctaacctaaaaggttaccatttaattggtctgaggcatggccttggcattgggatctttaaaaacttccatgtaactgaaaagcatatctggggttgaagaccacagcctagggagaggcagggcagcagagaagcaggagtacggagctctggagccaatcgtatctgggttaaactctcagctttcctcctcctaactctgtgatcctggttgcttaatgatatcgagcctttacttcttcctctgtacaaataagaataataatttctaccttatagttgttttaaatatgaaatagtgctaataaattagaaatgttcttttcttgaccttcttcccatagaactttcaaaggtatgatagtttaactgttgaggcaggcttatctattcacacagtgattaggaacgcaggcgctagagccataactctctggctttgtacaccagcatgtgcaatttaatgaacttctgaggttccattccttcatttataaaaatgagaagaataacaacatccatcctaatagggttttctggagattcaatggaggtttatgagtaagcactaagaatggcaccatatttatagtaagcgctcattaatcattactcgtttttgaattttagggaaataaaatttcatatcctacccttagaaagtataacacaatatctggtcaaagaatgagttcacactaggagagcagggtttctacctggatggtattttaagccagttttaattattcaccatcataattttgtcaatgaaaaagattggttcattgttgcctggccataccttgaagaatgtataaggtgtttagcttaagaagtttgaaagagacacaaaaaactagacgatggaaacagaaaagaacatcttattacacacatcttgatagcaagaggtattagatatttatctagaaatgaatatatacagacactgttaagacgtttggtgcatgagaccagtgtaatttggaaaatggtttgctaactctacggatattctcatatatatatattatatatatgagaatatatatataatatatatatacacaatatataagagatattttatatacatatatatctatatatgtatatatagatatatatgtatatgtatatatgtatatatgtatatgtatatatgatatatgtatatatgtatatatgtgtatatatgtatatgtatacgtatatatgtatatatgtgtatatatgtatatgtatacgtatatatgtatatatatgtatacatatatatgtgtatatatatgtatgtatatctagttaacagtcccaggggtttaaaaattattattatggtcttataacatctgtattcaaattctattacatgatttcctaggctaaggagacactaaataatgaatttgggggaaaggaccatttgtatgggctaggggcagggtggagaggaggtgagggctatagctgcatttatggaaaagcacagaagatcctggaacagtgccatgcatgggacatttgcttcttccacaggttgagtggtgactatgccaccccagcaggaggagtcattccaatttgtggtgatcaaagtcctttggaccacaccaagatagaaatacaaccaccaaacaaattcaaagaacatatttaccaataaatctaccccatttgcagcttcattcacactcctaagttcaggaaaatcaaggaatggattggagctatggattccagtaccagattaatccatcttttatgattagatagaaactttatcattgaaaggaaccgatggctttagggataaaatgtcctttgattgcataaataaatcttgctttaattttcttggaggaattacaatccaaaaatagccagtagtccccacgggggctcaaaacaattcgcacaggcattttaagctgggatggtggagaggttaatggaccactcttcagagaaatcagcaagggccactcccaagattccatacgtcaaagacaacactggggtctgactctggaggtccagccattttatacaattagaattgctgaggaggtcagccaagaacctccagagaaacattccacagcaccaggagtgcacgatcagcaacgtgcccaaagtgcccatcgtgttgtcaggggctgtgctgcatctgaccacagacaggatcaggcatggactctgaagccttcccgtagcagtccagcttccataaagctgtgctttcaatacattatttgtttctttacagaattaactgtcatttctgttttccatacgtattattaatatatgttatttatttatttattttttgagactgagtcttgctctgtcgcccaggctggagtgcaatgatctcggctcactgcaacctccacctctctggttcaagtgattctcctgcctcagcctcccgagtagctgggactacaggcacctgccaccacgcctggctaatttttgtattttcactggacacggggtttcaccacgttggccaggctggtctcgaactgctgacctcaggtgattcgcccaccttggcctcccaaagtgctgggattataggcatgagccactgcgcctagccaacatatgttatttataagattcatagacattgatataacctttagctccaccacagaagaaagctgtgccctgggagtaatatgggttccatcagctcttgttcctgataatctaccattttgatttatagtttgataagctttgatcctattctttcctttcctttcttttcttttttttctctttttcttttcttttcttttttttttttttttttttttgagatggagtctcgctctgtcactcagtctggagtgcagtggtgtgatcgtggctcactgcaacttccatcacctgggttcaagcgattctcctgtctcagcctccccagtagctgggattataggcatgtgccaccacacctagctaatttttgtatttttagtagagacagggtttcatcatgttggcctggctggtctcatgcctagcctcaagtgatctgcctacctcgtcctaccaaagtgttgggattacaggcgtgagtcactgtgcccagactataaactttgattttctatttctattttgttatcattttattttatgtgtcttgttctatgctccacgaatcaaggcaaagccaaataaaccaagaagagagatcaccagatagatgggtaattggctgatttatgcattgaattataggaaatcccaatcccaacctacaatgaaagaatgtccaaatgcatgtttctctgtaaatatacacatacatgcagacatagacacaaacacaatatgtatatgtttactggagtgcatgcttaaatcacaaccaaaataacaaaagccagtgtacattgcgtgcctactgtcttcagcatgtaccctaaaggtacttcataaggcattattttaatgtgtccacataaaatgatgctaatgcattatccccattttacctaagatgaaatcaagtcacactaaggtgaagaaccttgccctgtattatgtatatagtaagattcagagccagcatttgaactaggcttttctgaggtgccgtatataaaccaggatttgtgaaaaatggttcactggtttatgggggtaatattaggacttacacaggtattatgcaaaaaatatgaaaagaattgacctccacaaagacttaatgtacagaatgatatgtgtaccatctcataccctagcctgtatattggatggtcatatgtcatgtattgcaaaggggttatcccaagggaacagggagtcccacaaccaccactggagagtggagccctctcttgtcagtcacctttcagcagaaggtcatctgtgcttggctaaaagaataatgaataacttatctcattttaattaaattaaccctattaaaacagataggtgacttaaaaataatccttcaaagaaactattaattaaagatagaagtaataatctaaacatgaggaaaatgagaaaacggcaacactgacgatgtcggtacatacgtgaacatcaatgtgattataaaataggctccgagacagaagctaacgagagtagggagccattatatttagcaagacatttaaaaactaagcaagtaataaacaaaatgagtgtctctgttgagcaaatattaaagaaaatccagtttgttcttgacaaaataaaatctatgacatctgaaagtttctctttgcataatatagggaaacattgtaattggatatacagtttttaaaaaggctgaaataacacatgctaaacaatcttgtgacaaaccgaactatattttctcatgagtgagtacttacggagatacatactaaaacatggctgaagctatgaagaaacagggatggaaccgaaccatgccatgtggaagactgactacacagttgaatggcagtacagttgtttctagcctgtctcagcttctggttactagttcattttttaaaatagcaaaacacacaaatatgtaactttagcacttgtagttattaaacattaaggaaaagaggtgccagggaatataagttctcaatagcaactggtattttaaaaaataaaagcaaatttctatgagtattatatttaagtaaccagtgatgaggtggccacattcacaaaaaatgtgtagaaggattccaaagaaactttgcaacgcaacatctttccatccattcatccctgcctcactccctattaaaaccaagaagttgaacccaagagtgcataagattctgaggatggcattggcatactgaatttaaaaataaaagtctaaaaggtgtttaaaacacaattaatatttagtagaatccatataatgcattttaacaacatagagcttgaccacgcaaaattcttttcaaggaggttgttagttatctcgtggcaaagaaccaccgaaattaaagttaatttacgcacattctttacaagtgacccaactttgctaatcttttctgtatctacaaggggctgtcaacagtgtgctatacagaaaatatttttgaaaataatatatgtaacctgtccctgaaagaaaaggtgatgttttcaacatgactgagaaaaagaaacaccaaaggatcctaaacacatgaaaagatgctcaactttgtttaaaattaaaaagaaacatacagccaactacatagaataacatttctcaaatatataattagaaacaaagcaaaagccttgcggctcccctgttggggaggaagtggagagcctgatactgcactttgcaattgctgatgggcatggaaagcgcaccactactgggagagaaatttggaaacagtaaaataaatacacattttccctttggtgcagtaacccctcttctagggagcagatcccagtaatactctgacaacaatatgaaaatacgggtgcacacaagtctattagttgtagcaatatttacagtaaaaaaatgaaaacttagtgtttgccagtaaggaaaaagtaagctatacctacacaaaggaattcaataatgctatatatttttatatgtaagaaaatatctatatcggactagggagtgatctttaaaatataataggtactatagagtgaaaaaagcaaggtaaagaaaaatgtgtataatctactttctacttaagaaggtgacacatctataccatttttgatatcatctatagtatgtttacctatttttaaaataggtgattgtttttaataaacgtttacctttgggagagaaaaggaatattatttacctttatttatttattatttacctttgggagagaaagagaacgtagataaagggtgtatttctttgaatatagcatgttttgtagcttttgctttggaataatggaaatattttacatattatgaaaacacaataaatttaaaagcaatgaaaggccaggtgcagtggctcatgcctgtaatcccagcaccttgggaggctgaggtgggcggatcacctgaggtcaggagttagagaccagcctggttaacatggcgaaaccccatctctactaaaaatacaaaaattagcagggcatggtggcatgcacctgtagtcccagctacttgggaggctgaggcaggagaatcacttgaacccgggaggccaaggttgcagtgagccgagatcatgccactgcactccagcctcggcgacagagcaagactccatctcaaaaaaataaattaattaattaaaaaatttaaaaaaaagcaatgagaaatacatattcaattgatgacataactatacattaacttatatgagtttatatccctataaggatataccctaatgacaaaacaaactgcaaaaatcttaacattgttttcaataatcacacttaggtgatggtgtcgatactgtaatactgatactgttgtgggtgcattccaaagtaaggcaaatgagtaattttgttggtatcactcagtaacagaatttttgccaagggtgaaagaaacaacagttgtaatattggtgacttttcaatgaaaatttggtaacactggatttgaactgaaaatgttagtataactaatattgcatttgtacttaaaaaaaaaaaagtctcctagcttattccactaggcctagaaacagtaaccaacatggtgacaatgagcattccaagcaccaagacttttaaatactatttcctacgaaagggagccagaggtcctgagaaaaatggctgcttgcaggtcattcggcgagaattacaagaaaggtcgagagcaccttggtacactgcaaatcctgactaatgggtgcaggaaggttcactgtagtatttttccttacttttgtatgtttgaaatcgtctaaaataaaaagatacacattaaaagaaaatgggttcaaaatgaactgataactaaaaagatagagtgtgaagggaagacttgaaaatgtgtgtttagaaatgtttctattgtttgtggctttgtgaaggcagaaggcttaccaaaacaaaattgtcacattaaaagcattacagagttttccaatctgtaaataataaacttcactagattttggatgcttttgttaaaaagaaaggcacaataactttcaacaagttttccttaacaatatgttaacatatattatgtgaatcttagttttaaaaatcattgcattattggtagatatgcttaaaagtgagtatcataatttacaaagtcaacaaagaaattaatttattccatttggatctttttatcatttggaggtatatttttcagctataattgacattaaaactaaatcttgaaataaattgaacttaaaacctcaccattgagtcaaggtatcccatagtttcaaattaagttttgaagaattaatgaaacatatttagtcacattgcagtcatttatacatagagagagataggaacttttacttcactccaggtacataaattacctcaaactagattaatgacctaaatacaagaggtaagctattggtagaaaatatggaagcaaatcatcatgatctcagatatggcaatgaagtcttttgtttgacacaaaaagtattagcaacaacaacaaaaacagataaattgcatttcatcaaaactagaaacttttgttcaccaaaggacgttatgaagaaagtgaaaagacaacctatagaatgggagaaatatgtgcatatcctatatctggtaaggatccagtatccagaatatataaagaactcttacaactcaacaacaaaaacataactcaatttaaaaatgagcaaagaaaggacttgaaccgacattcttataaggaagagatatgaattaagataatcaacatcacagtcattagagaaatgaaaatcaaatccacaataagacaccacttcacacttactaggatgactagttagaaacagtaacaagtgacgacaagaatgtggagagagagaaacctgggacattgctacactgctggtggcaatataaaacggtacagcagctgtggaacacagtgggcagttctcctaaaggttaaacttcgaattctgcttctcggtatatatccaaggtaaatgaaagcaaatgttcatacagaaacttatatatgaatgtttacaacggcattattcataatagccaaaaagacggaaacaacacaaatgcccatcagcagatgaatggacacacaaattgtggggtatccacacagtggaatattattcagccacaaagaggaaagaaatattcatacacgctacaacttgaataaacctcaaatacactatgctaagtgaaataaggcagacacgaaaggtcacctattgtacgatttcttttataggaaatacctacaataggcaaatccatagagaaagaaagtgattggtggtggccagggctaggacagggggtcacaggcagtgattagctgggtaggaggtgttcagaaagttttgaagccaggcagaggtagtggttgtgcaacattgtgaatgcacaaaatgccactgaattgtacacttgtaaatggttaattggttacatgaatttcacttccattaaaatgtatatatgtaataacagtatagtacaagtaaagggtgctttgtaatgtgaaaagataaaatattaagtagttcaggtttatctcattctgctttctttttcacatatgttattttatatatattgggtatgtgttcaacattttgagtgatagaggtatacgatttaaaaattaggtaatactgctctagttccacggtaacaaatctagaacatggagagtgactctaacccacagaaaaacttagtataccttggctgaataatattgacaaacttattctcaatgcctttatgcaaataatgcattttccagttcaacacaattccttcattccccagaacttttatcttttgcgatccaaacattaatgtttcatatccagcaatgatcaaatttaaattcttctgctagggtttacgtatatctaagccagttttacatcaataattgttcttctgttcttcattagcattagagatggagagaaaacatgctagacttacccacacaaggcagggagtagccaagttgagggtcgtgaacaaactgccgatcattgagtcttgtcacacagtataagtggaaacagtctaagcaaatcacgtggcgggagttgcactggaaaaccaggacggggctcctgcagagagaaaggaagatgtttcctctagtacctgtcagtgtggaaaggcagcacgtgctttagaccaatttctgtaatcctggagggttgtgtagactgtgctctgtgcaaagaccggagctgctaagcattaagctcatgtataccaacacaacatcttaaaaattggaggcactcaatgaactacatagaaaactgattctcctaattttacattttttatgttaacacatttatcaatcttttgattaaacctgagctaaaatataatctctttctggaagtcttccctgactcagaattcccaattaacctatcaaatcatcccatctgcttgtatatatttctattgatccgttattacaccacagtattcatatcttctcctttctcatagactgtgatctcctggaaagtagttcctatgtttattttgctattcccatagtaccaggcattgtaaagttttaaatgaatgttttaaaaatttaaatctttaaaacattttaaatatttttttcctccaaagtattttaagggaatcaaaaaaatttaggacttgtatatagtgatttactagtaatcccataaacataattagagaaaattcaacagtgaaataacagattttcaaaattctgctatcccacttattttaaagcaatatgtaatacaaaacaaagaaaataaaattccttggtaatttaattataactatgttataacaatagaatctgaatttccccactatcaaaagaaaaattactattgcatcaaagtaaaaacgttaaacattttctcacattttattggcaaataaaaaagtagaatttagggataaaaggttatccaacagggattcttctactgcaagattttgtctattgtgccatctcgaaaccatccaaatattcagtttctcagagtatggttatgggattactaattaatcaatatatataaatcctaattttttttatccctttaaaatactctgtagaaaaaaaaatcttaaaagccatgtatttttactggaaaacgaaccacacaagtttatgtcaaacaggagacaagctcaatacatgaatttgaaatcagccccaaggcgattttaatagtaagaaagttattggagtctatttagataagcctatttcctatgtaattgtaacaaaatacaaaataaacatgttcattttatacccaatctttaacgcctataagagctcttcaaaagccctttttctagagaaatgaataatactaataatataaaagataatttcttaacacctaaaagattttcaaaattctgttatcccacttacttcaaagcaatatgtaatacaaacaaagaaaatacaattccttggtattttaatgccatggatgtgtaagtaatcggtcaacttaatctgagcaagggcgcacctaaaggtgcggcttctcctttcccctcttggaacctatccaagtccttcataatgctttcctatttctaaccaaacagtcactcgcatacacatgctcaagcacacacatacttttttcactttgcgaccctatgaagctgctgtattctacctttttctctcacagctgttatgtgaaaaatattctccatcttgctttcagcaacatggtagactaaaacctttatagacctcccaatctgctactaattcatggagaaaatattagaacatttatgaaaatgtgcctgtatataacaaagttaaaaagaaagcttagaggccaggcgtggtggctcacgcctgtaatcccagcactttgggaggctgaggcaggcggatcacgaggtcaggagatggagatcatcctggctaacacagcgaaagcccgtctctaccaaaaatacaaaaaattagcccggcgtggtggcgggcgcctgtaatcccagctactcaggaggctgaggcaggtgaatggcatgaacgcgggagcttgcagtgagccgagatcgcaccactgcactccagcctgggctacagagtgaggctctgcctcaaaaacaaacaaacaaaaaagcttagaaatgaccctgtagaggaaacataaagaaaacttacagagcctaaatggtcagcccacgaactcccgccacagtggcccagaaagccatggctgcgtggtatgcggccatcagtgtagcttctgcaggcttttccattcctgttagaagagttctctctcacatggatggacaacagcacacttctatagttgtctccttcagttttaatatgatcccaaatgactcataccatctagacaacacatggaacatcaattgtcctactctattaatgacatcctgctatttggagaacattaacaagaaacaagcactacgttggcggccatggtgtgaaatcaaccctgtgcagtgacaggagccattagggacattagggaaagtttagaggtccaagtcttggggcctggaagtgcacaccttccaatataaatagtccatcttacccatcctgcaactggcagtgaagcatagacagctgcagatgcggtgggtccagagttttggttcccacagagtgaagtgtatcttcctagggacacaggaagagtcctactgaaaactaagctacagctgcaccaggccacctcaacctccttgaactgaggatgtctaccttgaataaaaaataggagaaattggcaccaggtaacagtgggttaccagagagtgagcagtgaagggactagcattggaagtgaagacagagactcatgtaactcccttgaagaaacgccactgcccagacgcaggtgtggaatgcaaccggggaagctggaatgttgtgtgtgtttctgcatgtcctcttcggaaaagaaagaaatttacaagttacagggagtcaaaaatgataaatgagtcattcaggaattctgattgtctattactatacatacacagtcaacttggatatatacctatatacagatatagataaatgatagatacagatatcaatatatgaatgtatgtgctaagatacacagatgaagatatagaaaagtatatatgctgcctttatacacacacacgcacatacacagataatgttataaagacggtgtatatgtgcatttcacatagaattatcagtcacctggaattcttgatacagctgtgagctaagattgctcctctcctattaagatattccttgtagttttggaaagttaggtgaggaataaacatgacaccaataaaaagttattagattaatcacctaaggaaaggagtaaaaatcttttcatggctagaaggtctacatcattaacttcctaaatgctaaatcaaagaggaggggaaagctagtgtttatgggcacctacttcgggttaggtggcttgctaggaacttcgcagacttcctttcatttcatcctcgtaaaataaactgcccctcccctaccgtccatcctgttctctccgcacctccgtcccctccagctgggaaggtccttgcgtagcctaggattcttctagttcctgtacacctagatgcatgctctttgccatctagtctcacggtaatactcaccttcatattcaaagccaaatcacaaattcctaggtccagttcaagactaaagatctccaaggaactttctctggagcctaacacctcactgcctcttccctttttctttacctttcttcaatagttatttaaaaagttcatctgtaatgtacttcaatactggcctgacttttgtttaaagtgtttcatatactccttccttagctatcaacattaaatgaaaagtcatgaaattgtagagaccctacttgcttaaccctttcatgacccatgcctcatcaaatacaatgctgagcacctgatcgttttgtaatcaagagttattgattattctagtggataaatgaatgggtcactatttttgtagtttctcatacttttataatttctctgctctcatttacatgttgttcactaaatttcttattgaacatctactttgactaaagtaggcacttagtaaatgcatgtggactacagcacccagtgagtggataaataccttatagttatacttggcttacacaatcacagggcgtagttgagagacataagattaccatggaacaagtattacaaggaagtatctgtaatccccaaactctgggagcccgaaagttaggaaaagagaattattgagtcaggatggatccattagggaacttgaattgaatttaaagaaacgggaggattgatgtttggtcactggaaagaaatgttgtttctaagcaggaaggaatcacagacatgcaagtatgcttggaacagaagagaaatcaggtgggctgatcaaaaagatgtatcaggaaaatggtgggggacaagatgaaaagagttgagaacagaggagattctggccagggatcagggttgactctaggagacacacctagcataaggcctctagactgtgggattcactgaaggtttctgctatggtctgaatgtttgtgttccccaaaattcgtatgttaaaatccttatctccaaaatgatggtgttagaacacggggtctttaggaagtgaatggtgtgagagaagagccctcatgaataaaatgagtgcccttttaaagagaccccggaaagctcccacacacgttccaccatatgaggacacagtgagaagccaccgtctatgaaccaggaagtggggatctcaccagacactggatctgccagtgctttgatctaggacttcccagtctccggaaccgtgagaaataaattcctgttgtttataagccaccagtttatgggattttgttatagcagccagaatgtactaagagagtttttaaacatgggaagggaatgatgttttagtaagtttagctccgacagaagtatggagggaaagctggaagtagtgagaactacttgaggtcattttgataatttagacatgagttactaagaactggactatgatgtgcaaatggctctgggagtggaaatgagaagaagaacgggtgacatttcagagcaggacccgccaggacttatcctctcatgggtcttttgttcctcctgacattcctgtgtgccctttgctctaattatctacatataaatgttaattgatcgatccagagatgatttcaccccaatgggccaggttaaagagcggtaaattaaaggttaagtaaagttctcaattatatataaaaagacttataaatgctttccttgacaatgccaaagagttatttgtaaccaatgatttctctgttttgataaaaagcgaccctttgtttgcagaatatttaagcacaattgaaggagtttgagttacaaataatgtggcaagtcattcacatacattaaaaaagtagaatatggttacacagtgttccaaatatttaaattcttgtaaagttagtattctagcatctacaaaaatagcatgcgagtttttatgtttatctagaaaaatgtgcaatttactctgctgtccaccttgtttgttctctctcatttgccctccttcacacactctctggcaaaatctgtctgtttctctttctctccatttgcctgattctttcccatgtgtacatcttcatttatactcattaagagagaggctgtggatgaaatgtgacatatatcgaaagcaatgtgccagatatttcaagctatgcaaagatgaggaagcaaatctaagctctcaaggacatataaatccagtagagtgggcaggagagggaaacaaatacttactatacaggacagaatattttaagtcatgttagagagataggatatattgccacgctcacgctctggggtaagcagccttcaagatgttctccagtgagctccacctcctctgtagttcctctccacattgaatggattgactcacatgcaataggaaaagtgcagaaacggcaatgtgtgacttccaagagtaggtcagaaaagacaccgcagcctctgtctgtgctcttacagatcacttgctctgaggaaagcgagcagccatgttgggaggacactcaagcagtactatggtgaagtccatgtagcaagaaactggggccttctaacaacagctggcatctacttggcagccagttggcaagccctaggatgactgaagccctggctgatattttgactataactgcatgagataccctgagcaagaactatccagctaacttgctcccaaattcctgacctgctgaaactgtgagaggcaatgtttattattttcttcagccactaagttatgggatactttgttattcagcaatatctaactaattcaggttcagaggaggaggaggtcatatataggttgaagaccagaaaagaattcatgaatgtaggggcatttgaaaaacggtcaggattccagtgcataaagatgcagacaacacctgaggtcaagagaaaagaatggagctgtgaaagcacagagcaggaaaagagaatgctcagttatcaagagtggctggtttcttcattctccccagtggaaagcaaagttattacatatgtatgaagagcagcagcatctgaaatgcaatgaaaagcagcacaagttaaaataaaaatattacgtgcaaaatccttgaggaaataaaaactaaatttcctcacttgagggagagagtcttgcaatttagctaacacttgacccttgaaaattcacacattgtttccactgttcttagtttgtgcaatagtaacacagaagtcatgccccagttagcaatctttcaaagctctctgcaaactccacacatggagaactatgactcctgggcatttaacacagtatttgattagataaaagtaattaaaagaggaaagctacaccattaaaaaacatgaatttatcttcttaacgactgtcactttaagccccttttagttagagatggcttataaacaagaaataaatgactgaaatctcagagaccaaatgcattttaatttgatctatatttggcaaaattacatactaattgccaaagtgcacgactgacaaagaagtaaccggcacagcgcctgcccacaacaatgccagagagagcatttcagcccacgtgggtcgtatgagttcattatttgaattagccaagtgagcaacccccctcactggagaggagcctgctccgagatactaattgatagactcaacttttagaaattaacataagcttcaacagttgaatgatcttcaaaattccttccagcagccaagtctaaaatcctgaaatcagttcagttgtccattggcctgcttagaatcacagtcctattaaggcactggcagatcctgaatcagctcactaactaccccttctggtttttcttgcctcctctgctcatgttctccctgttttatccagtccactctgctgcatggaagagggtttactttggttctgtaagcttatttgcagaagtcccaatatttcagcatatacaacgtagccaaggtaaaattcatttatgtctacatttttgaatcacttttattcacccattctgccaacacagtggaccggccactagatgccaggcagtgtcatgtcacatcctataaaagtgaacaagaatgttccatctcctcaggaggtcacagtctatagagttgaagacaaataattaattattcatagtgtggtaagcactaccataaggatgaatttggagacacctagcctatctctggggttggaggaagggctcccaagatagctcatggctcagtgcatccagtctatatagtgagaagaggctgaacaaactaaatggcttttcctgtttataaaggtttttaacaaattactacataaaataatattgtaaatatgttacaaaggattatgaaaatataaattctctatctcctttcctaagagttcccttctcctcttaaattctcatccagtaagtcaacatcccatctggggtattcaatattgttaaattcaagagactttctaacctcggtgtttgtttccaagtttgactctgctgctatctgccctcggcactctgtggaccctcctgtcaggcacgttccctttcactcctgggcaacgacttgattttatgcatctcgtggcattggcttgtgtctacctggaatttttttatttaaaagttccctatcaaattaattatgttcccattgataggttaactcattttatttactgtcatgaaaggaaatagaaaagtttcaagtaacagccactttttctgttgcagacatactcccttcaatatatacctgctgaggttgagagtctgcaacacaggtgctataaaaataattgagtcaagatttaggagtggccacggtgcagtgtgccccagagcaatggattaggtctcatgagtgttggcggagtctgaattctcacgagcgtctgtctggccaagacctacatcagcaccgaggctgtctccatcccctcttccctccctggaccccctgtctgatcccagcagctcaccccagcaacactgttctaaagaggcttccatcctgacagttcttggccccaaaatatgaactagtttcgcagtgcccatgtattaaggcctcaggtttttcttctatcttttggagcctccataagctggattcaccctatggaatgtctttccctctttcccattcacgaatccctctgtttctctcaagtcagtctctttgctgctttcttccttatgctcccatccctacaggcaagactcctcctcttagtccttattccccccaaaactacaaggttcagctgaggcgcaacctcccccataagctttttcaataaaactccagataacatcgatgtgctattcactgtctaatttcttgtaatgtttacatttagaaagtattgcttttatatttaacttagcattttttttttgaggtggagtctcgttctgtcacccaggctggagtgcagtggcgcgatctcagctcactgcaagctccgcctcccgggttcacgccattctcttgcctcagcctcccgagtagctgggactacaggcacccaccaccacacccagctaattttttgtatttttagtagagacggggtttcaccaagctagccaggatggtctcaatctcctgacctcatgatccacccgcctcggcctcccaaagtgctgggattacaggcatgagtcaccgtgcctggcctaacttagtattattacatgttatttgtattactgttttcttttctttttttttttttttcttttctgagacagggtctcactctctagctcaggctggagtgcagtggcgcaatctcggctcactgtagccttcgtctcccaggttcaaatgattctcatgcctcagcctcccaagtagctgggactacagtcacctgccaccatgcctggctaatctttcctatttttggtagagatggggtctcgccatgttggccaggctggtcttgaactcctgacctcaagtgatccgcccgcctcagcctcccagtgctgggattacaggtgtgagccaccgagtccagcctcctttgtattgttttctacctgctttatgaacctgcaccaggtctctccaactcaaattcaacatatactaattggaaggctactatgcaccggtccctgcactagacctgagagggggatgcagctgttgctctcaggaagtctgtctgatgatgagaaaactcagtcagggacaccttggaagatctaataagaggccactcagtccaatgttggtcaggcacaggatatttcctgaaagaaggaaaatacaaactaaggccgaaaaagcaaaaatgagttagcctgaccaagaaactatagggaagtgggaaaaagatgtgaaaacacttcagatggagtaaaattaggtaagatcagggaaccatgctgtatacggtattttcatactgtcttctcaggctttattaaagtcccaaattcttccagaaattaaaaattatattaaaatataatgataatgcttctataagccacatacataaatctgcgttttaggtttatataatatcccaagtgtggttgaattgggttccattgtttacaacattttgagccattgacaataaactggctacgcaaaatagaaatacaaagccacgattacaagatggaattaatgtattattaattttctccagatgatttcagtcctggaagatacccatttgcctttagtctaatttgtgtattgcatttctaaatataattactgttgacaggttgaacccaaacataacccattaacttctcaaagtgctagattgaaaacattacaatgtaacaagagatattagaaataaaaaaattaacttctgttctttttaaaaagtaagttaaaagcaaagatgtcagtcctgttttgtagtaatttgttagaatgatttggtttaccctagctttcttgccgaggcttttatactagaaaacagacactgacatgtaattgtaaatagtggataaatcataatgaaataattgttgcgtgtaaaaagaaaagaaaagaaactaaaaattccaaagggtatttggcccatgggagaaaaacgcagctcataaaaaattatcacgatactttcctatcccccagttaatggagttatgttttttcaaggatgctcaaaattacgtttataatagtccaagttcttcagactctaatttcaggtcacattctattcagactgtcgatatgtataactaaaaaaagctcaagccagatttaacataaaatagtttctgggtcatatcatttgcacagagctgttatgtggcacaactatttagctgttggagatgccatctgtaatacatactaactcatgcacatatcttgtctttgtttttgcctctgtgcaaaacagctagaagcagataatgcccagatccactgcaaaagcattctgctaaattgagaaagatatgaagacagatcttgtttggataagaaccccactgtgaaataaattgttctgatgtatccccaaacctcatgacaggaagaattaatgtgctaagaatcagtccagtggccataaatgttagaagctatttaacataagaaattatttcagacacagagtggttttaaaaagatacatcttttgctgttgactcaccaaaaccctgcacaaacaattgtgtaccggtttttcattcattcttaaaatgaatgaatgtaatcgtatgctgggtcttttcttttctttttattctttctttctttctgtttttttgagacagagtctcactcggtcacccaggctggagtgcagtggcacgatcttggctctacaacctccggctcactgcaacctctgcctcctgggttcaagtgattcttgtgcctcagccccctacgtagctgggactataggcacacaccaccacatctggctaatttgtgtatttttagtagatggggtttcgccatgttggccaggctggtctcaagctcctgacctcaagtgatccacctgcctcagcctcccaaactgctgggatttaaaggcaagagctactgtgcccagtgggccttttatttcttttattagaggaatatttaaaaatcaggttgtctgaagtagagtggtttgaaatgaggagtctgccgaaaagattgtagacatcttaaaacagttcaacaatgaaaatgtctcaacatgagaaggtactgtgaaatttctaaggtatcattagatgagttcagcattaaaatattgacataagaatttctggcatatagtagataaaattattttcccaacttagttgtttttgcttgttttacgtgtatccagaaaaggattgtataccatcccaaagtattttccaaaatataataaaaatcaatatggcataacaatacaaatcaaaatgaattcagagccaggcgcagtggctcatgcctgtaatcccagcactttgggaggccgaggtgggtggatcaccaggtgaggagatcaagaccattctggctaacatggtgaaaccctgtctctactaaaactacaaaaaattaatcgggcgtggtggcacgcacctgtagtcccagctacttgggaggctaaggcgggagaatggcttgaactcaggaggcggaggttgcagtgagctgagatcgcaccactgcactccagcctgggtgacagagggagactccttctcaaaacaaacaagcaaacaaaccaaaccaaacaaacaaaaaaaatgagttcaggtgcaaacccaagataaaggaattcatgcaaagatgtgactgtccacccagcacatgggatgcagctggtggttgagcgaggtttgtaaagagccctaggagggtggtgtgagccggctgcagcattagctggcctcagaatcccatttctgtgaaacgaggacctgtgacatcagcaggttagatgggaccatctccagagactttctggatatagaggtattgccatcttcaatttatatgatcacaacatttcttttttatcgaaagcttgtaggacttaatcctcacttgaaagcacatacaaagcctattcatattttggatttcacctttcttgaattaatgcatatgctgcaagcaagggtgagaaactggagatttctagagattttactccctgggagacttatgagagggagatcttgatccagagtattccaggaagatcagaaaagatgttttggtgttaaaaacaaaaaaggccacaaaatattacatatagcttttagttttaaggctcctttgttcttttttcaactaagtcagctgatcaccagggccaggcacgcttacatggaagaagagcctgtgcagacaggctccctgggtcagcctgggcctccctgggtcaggcgcccctccactgtgctcggggctcccccacacactgccctcacccttttcatcacaggtccccggggtactcacccactggcttcaatgtctatgttctcgccagactagaggccagaaaactgggatttggccctcagactgcttttgccaataaagttttattggaagccagccattttacatattactcgtggctgcttttgtgccataatagcagcattcactagctgtgacaggtcctagatgggccaccaagcctaagttacttcctatttggcccttatcaggacatgtttgcttattcctgttcgaggctgttgactccacaaacacagggctatctttctgtattcccaatgcctggcctgtggctggtgtttggtcaatgtttatgttctcagtgactgacagtttgactcaaggaatgaatgactatcaaggaacagggacaaaagcgaggcaaacaacaatttttgcagtgtccagaggtctgcagtagatgactggttttgagctaagccattcaactgctgtcaaaagctgaaaacaccatctccccccatctgccagagttaggctcatccgttcagagagctgagtccagtttggagagcacccaatacttgcgacttccacataatggaaaggaaaaggcacaagaactttgaagagggcaaataggacaaagaacatattgattcccttattgaacaaaaatgtactgcatgcctactatgggccaggcacttagcattcaggatgtcattgtctcttcagattggaagggataggtattaagcaaacaagtaaaaactagcaatgaaaagtgacagcaaggaaatgccatgggatcatgtgatagtgctggtgcactgcccatgctgggtggcctgggaaggcctggggatgggacatttgcattgccatctcaatgacaagccatgtgcaggtctggcgtaagagggtttgcagggaaggagcaagtggaaaggcacttaggtaggaatgctgggcatttgtgaagaattaatcagggggttagtgttttggggacacagttaccaaggaggcagtggagcaagatgaggtctgaggagatgaaggaagccacatggggcctttaagacatactcaggaattcagcgcttggacaatggcaagtcaggacaaaattttaagtagggatgcaacataataccatttatgttttaaaaaatcactctaacttgaggtaacgaatggactggagcagggctacaaaggaagggagatgcatggacatggtgaaagccatccaagtaagaaaagagagtgccgtggatcaagcagtggagagggagaggcaacgacaggtagacaatatgtttggggcaatcgagtgcttgatgtctcctacctagctttgctttcctactaccatttgcagatttctcgctttttaggaaatctcagaatcatgccccaacatccatgggttcatggttctaaaagtcacacctttcatattactttaaatggaaatgaaccctttctggttctaagcaaatttaaaatctttgcttagagcccagattaaatgataatgagcctggtaacaaaatactatattaatacagttttaaaactatagctccctttaaaaaacatccactggattgactgatcccctctaccatgcccagtgctgggcacagagcagtgggcatgggatgcatgggctctgctcccactgatgacctgttgtgggcagtgtctggcctatgaagccccgtgaggctgttgggggaccatagctgatatcttcaacaggggagtgacggcactgggggacaaaagtgggaggtgtcagatatttaggaactaaaattgtcaagattcagagactcattaaccagagtcagaaaggggattcaggcacaatgtctggtgactcttctcatcatttagtgaatgcttctaatgtgccatgtttcctgctaagtgctttctcggcatcactattttaatctgcagaatgatctgcagaatgattctggagggcagggcccactcctgtgttttctctgcaatctcactgcctaatgctgggcctgtacctaggaggagctccaaaaatagtggcttaatgcatgaatgcatggctcccccacccctcccatgacaacaacagtgaaatccctaccatagagaaggacacgggaggaaacggaggcctagggcgctatcaaacacccactgtccacagcccaccggtgacggagcaggcaccagagccagcgctgcataagttccacccacattcctcaattccgcatgccagggcccggcctctgcggatgctacggacatttgctgacacagtacagtgactggaggagcagcagggctggaaactgagtcttctggttctaggcttgctgagtttgagatggctttgggatgtcccagcgaagatgtgcagaagtcagtttagttcacggttctttcgggagaaagatggggctataaagggcctggggacccatccatggagagatggcaatcacagccatgggagcgggtggggccaccccaaggaaatgctgagattaccgtgtgactgatttgattacggggctttaacttattgagctataaacatcgaacagtgtcacggtttctaagacctgcctctgtgcatctgtcaaacacagtgggcaacaacctagagtccacgactttcagccacttttacctgtggctgcttttcagttatgaaaataatcgaacgggccttagatcagccggttttaaccttccatctcacacctcactggaagctctttcttccccacagtcaagaccaggaccggctccagctgcttcagatgtgaggcgcagggaaggcctgtgcaactgcgtgtgtccaggactgggcaccccaggtttcgggtgaacaatgggatgtaatgaagggacccctctttttcttgtctcccactggaatctgcttgcatacaagcaggtatttctggttttcattccttcattcaactaatggttgtgctgagggttaaacaacaggcaaggcagagaaagtttctcctcaaattgaacttgcagattcacaaggaaggtgacatacacaaacaaggaattcgtgctaaatgaagtgttaccgagagttgcaagaatggagaggagtagagaagactaaggaacaggctgacctaagctagtgtcaatctcagcaaaggctcattggaggaagagtcattattctccaaacagcaaccagaagatgctttcaaaatcaaagttatagcctctcactcctctgctcagtctctgcaatggctccccctggtcattcagaaaaaggtccaagtcctaatggtgactttaatccatcctctaagcctgccacactgccccttctctgtcccttagctccttctcttctcccactcgctgtgatccaggctcagtgaactctgtgaccctccccacacaggccccacatatgacacacacacaccccacacaagccccacatgacccacacacgccccacacacacaccccacatatgacccacacacgccccccacacaccccacatatgacccacacatgccccacacacacctggctcccagcctttctccggctcctcctgtgcgagcgtgcttccccaatggtcacgtggctcacaccctgccctcctgcagctcttccaatgtctcctttgcaacgagcccctctaaccaccacctgctcatgtaaaacggtggtgaccccaccctacattcccacattcccaattcccatggcctgttttagtctttgtctccataacatcaatcacttcctatagtagatttgccttcttactcgcaatgcctcaaccctccctgttccccagccattgacctgactttgtctttcctcagttagaagctgcatatatttccccatccagttgatggtgagctgagccacgtggctttgtagggtggctgaatatgtcaccccaaaatatgccattttggccatataattacttaaagctaaaggcccttgaaaaaaacaggtgatgtgagaagggtgttctgatctccccttttatacctggaaacaggagatgaaaactcccatgtgaaagacaccctccttgcatgaggagaaaaaccactcttcaattgggacttatagcagagtgaattctgcacaaacagccctcattagggtatgtatgccttatcttcccttagcctccaaacacttgagttacttttccacaattgcctctgctggttcaacccaacacaaaagaatgctggttttgccacttctttgggtcttcatttcctaatgagggctcctgtgtcacataacgcttttattaaacttgcatgctttcctcctgttcatctgtttcctgtctatttcattctcaggcccagttgggactctgggtagaagaaaagctttgcctcccctgcagcttcctttgccaataggatagtagtgtatgtgacataatccagtacgtggcatgtgcttgtttggtgaggcctgcccttctgaattcctgcctttcaccacgagaagaactgtccttgggtagccactggcttaaggatgatggactcattgagcagactggaaacatccacattcactgcccgaagcagggccaagctcagcccagccccagctcaactcgggtggagccgagaggtgtgagaaggctggacgtagtgtcaggggccagtgagctgcccggtttcttagtactcagccatagctgaccagtgaccttctgtacagttaccgatttattagatgtgtgacctattgtctgtctcttatcacaagaagggaagctgcattagggccgagagcttttccgcactgctgcctcctaagttcctggcatgtggcgggtctgcgacacagatgcatttcataaaggaagcaaagacctcaagtccgaacccccaccaaagtgagaagcaggagtttgtcaggtactatttcgctaaaaggaatgaaagaagatggaaccaaagaaggaggcggtgttgccgatgtgtagaggtcagaagtgggcctgctgccatcagacacatggggggtggcacagcctccaggtgacctgcagctgccacagcaggagaacactgacggtaacacatagcaagtgcacggacgcctcagggacaggtttcaatgtcaatgaaggtcattattggctgagcagcacaagggttccctaacaatcacgaataatgaagagcgcagagtatccacccatctcccaggacactgagccacctgaatgcaggctcgacacccaagaggagagaggacaatggggcctgaatgaacttggggtgatgcagcagcagaacttgatctatgaggctctggtgatgagcagtgtggacactgataggcaggtgctcagatgctgccagctgtttttaggtttcagaacagaatctttggggcagctccaccaacgtgcctcgatgtaggaggaaggcaaggctggtggccttcagctctggatcctgcaaggacatctgaaatctgcctctgccatctgcctctgaactccctctccatccccttccctcccctccactggtgaggttggacccataaggagaaggagaaggtaacttggaaggattgaagtaaactctggtgtattgaagagatttggagacaaggttgacaattcatagaaaataaatcatatatctattttaataacacttagctatatattaattggcaaactctgttgcatctacacattgtcccaacaatgcgttttagagttctgcaacaataataaccacaaaacactgaaaaagtttcaaacatcttccagcacttggaaacaaattctagattctattttcccaatctattgctgtctatgagcagtgctatggcagaagggcctaatccagtactcaactttctaagcctgacattttccacatatgtaaataggtcttcttgaatttctattaatacttttatagataagaaagttggactattaactgagactaaataacttgccaaaggtgacagagtggtttggcatcattcagactatgagtttcaacatacaagtcatgagaatctaggttatcgtatggccactaaaccacatttccactttgcctcccactacaaaagaatgcaaattgaagaaatttaacagtgggaggcttctgaatacagtcatgaattttctgcctgggctactgtagaaacaatgtgtctcaattcacagctggtatgttaaaaatcatcttccccaagtcaataaatcccctctgtcgcctcaacttgaaactgcctgttcttcgttcttcatgtttactcgatgcttatttccatatcgtgtcacagaagcagtgccttttccaatatccatcctcacagaccttataccctcatcacatctggaagcgttcttctggataagcatctgaggatgccatcgaggtcccgctagggagccctccttctgtggccttcctgagtacacacatgcacacacacacacacacacacacacacatgcatgtacacacacatgtacacatagagctccctgtttgtgctttcatcttctgatgaccagatcctgtctttactatttcctgttgctctagtgagtctcttccagggctccagcgcaggccctccgatggccatcactacccccggctcctctgtgtgcattggtttgcacactcttctgacttcatttgctttacaatgaggcaaggattctgttttctagaacacaggagaattatcatttgatgtgtctgaaggatctttattgcaggagaaacagctgttgatggagagccggggtggttgggggtggaggggagtggtgatggtatccatctcagctccaccttgaatagatgctgtccctcctatttgccccatgggtccacctggcctggaacactctaaatgcagcaagtccacgtacacctgtgctgcttctgcctgtcagcagctctgcttagcaagcttagccaagagaaagtcctgctcctcattagggtcgacgagttcttccccacagagcagcctactccctggcataggccttctgggatgaactggtgcccagaagcaaaatcaaaaaagaaattccatcgtaaatattggagattcattttctgtccacttcaaaatcaaggcctctgatgatcaacgtgattggtcgtccaagcagccatgtcattaccaacctgccccacaacacagttgctcacacatgaccagcgacagctagacaccaaagtagtgaagcagcctgcccatctgcagcagagggtcccacagaggccaccgctcctggaactgacgggccctgatatcgcacacaggaacagcactcacggttgtggcttcccgaacacaggacagaggcagcgcatgatgtttggactcgaaagcacccgcatcatttctcctttcccaactcatactgaactctgcatggacaggttccctccttagcagcaaaacttccccagtcagacttacaagccagacttgcccagtctctcttgtttcttcaacaagagagagttcagaccctatgtggctatgaagcacctcaccaggtcatccctcgaggaggctggagaaggaggcagctctccaccgagctctgattctggaggagcgagcaggctctccacctccacccagctcttattctgtaggacggaacactccaatgcaggatgcaagacaagattcatcactaagctgttgcctaaatgtcaatttagcctttattgaacatccatctggtatttgaatgtgcattggggatctgggggaattttgtttagaaatagaaaacacagacccttcttcaagaggccataatcgagttggagaaatgtttgatattaagctgtaaagagagtcacgcaggatcaattgagaacatgtgaaatttttcgcaaatagtgagaaatcatccgaacaccacctgcataaaaacccacctaactcccactgtaagctccatctgaacctaatgaggatggtagttaccgatttccaaaaaggttgtcttcattcctttgatttgcgctgtaagtgttaaactttaaaaatagtctaaaggtactaaaaatgatttcatgtttttctcagtacaattttgttaggtttatgtttaattagccaagtgttacattgaggatatgagaacgagcaatattctgttgctataaatccttcagttactaaaccatacggagatttcagtaaagagaggtggaggcaacagtcacacgtgtgcacacacacacgaatacacacacatacacacataaacatgcttatacacagatacacgcatgcaaacatatatatacacaaagatacacgcacacatacacatgcatatacacaaacacatgcatacacgcacagagctacatggacacacacaggtgcatacacacataaacagacacatatacacatacatatacacatagattgctagggctgccatgacaaagtaccacaaaccaggcaactaaaaaaacacaaattgattctctcacagctctggaggtagaaagtcaaaaaccaaaggccacgcttcgtctgaaacctgggagaggagcctttcttgcctcttcctggcttctggtgttgccagcaatctttcacattccttgtcttggagatgcctccctccagtctctgcctctgtcccccaggggcagttcccctgtgtctcctcacatcacactgcctctgtacgtcttccctctcctccccttgtctctcgtcctataaggacaccagttagatttgattaaggccctaccctactccagtaaaacctcatcttaacttagatcttcataacatctgcaaggactccatttccaaataaactgccactcacaggtaccagagattagggcccaacatctttttctgggaacacaattcaacccacaggtacacacaccctccacaaacaaataatgttggcttagtttttaattaattgtgctgaagtgatatgtcatttacattttctgtctgagttcctgtattgtgcgatcttgaattttccagagtaattgacttaatctattcatttctaagatacagaataaggtacccctaacttttaccattgcatagctcaggcaggactagtataaatgatgaagacaggaagattattaatattttcatcacagacccctcatattttcattatttaacacataataatcttctaagactactcaatcttctaataatatttaaattttcaatttaaaatattatttttattctgcaaaggacatcattgggtcagctgacaaaattggaaaacagctggtaacttagataaaagcactgtatcaatgttaaattgacttgaataactgtactgtcttaatgtaagagaatataagttgcttaactgaacactaaagtatttattagtaaaagaccatcatatctgcaaatttctcttaaatagtacagaaaattgtaatgaataacgtgtgtgtgttgaaagacacagaaaaggagatatagcaaatagggtgaaatatgaacaatagctcaactgtgacagatgttataaagggtgttcttaatattatttttgtattatctataaatttgaaattttcaaatgaaaacttaaaaagagattaaactgcatttttaattgtattgagagatgagtctaagaaacaacaaaatacactctccaattttcaaaccatgctccttatcttggtgggaggacttcaaaaaggtgccatagtcatatgacaaatgaaaagtaattaaacttagtttactccattatcaagactgcgataaaagtcatattctggtattttgttctgttttgttttgttttgtttttcagacagggtctcactctgttgctgaggctggagcgcggtggtgcgatcacagttcgctgtagcctcaaactcctgagctcaatcgatcctcccacttcagcctcctgagtagttgggaccacaggcatgcaccacaatgcctgggtaatttttgtatattttgtagagatggggtttctacttgttgccaaggctgatctcaaactcctgggctcaggcagtccgcccacctcagcctcccaaagtactgggattataggcataagccacagagcccggtcagatcatattcatttaactttaaagttgaaaggatgacacagatagaaaatattttttagttataaataccatattgggtgtaccccttacccacacatcaacagtcctcaaaggcagggggggaagggggatgactcagaaatcccgagtcctgaggaattaccacttggggctgggtacttgatcatacgagaaggtgaggaggtggattctggacttgcatttatggtgacaatgaatctgaagtacaatgtcaagggtttagataacaatgttaagaaaaaaatgttagggagaaactgggtcaaggtatatgcattttggaattattggttctgtgtgggctctagaaataaagcgacaaaaaaaatagcaaatatcccagttgcttaatagcttattgtcctgcgtagcgaacttttttcttaagggaaatatctattttttggatttaacattatttaacatgtaagtcaccttattcactcatcaatttttgaaaactaaaaatataaatcattccattttggtgataaaattttaatttcctatactgataataaatttttccttgacaaatgcacttagggcacccttcacactgaaaaactacaagagacaagtcccacatcatcaacagaatgtaagaatgtaggtggatgaaggataccacctgagactctacatttctgttaaactggcttcaaattattaagtagctaatctaaacaagtgtgcctgtttctgctctaaagcaatgtggaattctttcaatcccttaggacgtgtttttaataataaacttttaaaaatgtgtttaataaaatataacaaactttataatgagtattcatactcatacatacatagtattacaggttgagctgtgcccccttaaaattcgtgcattgaagtcctaacccctagtgcctcagaatgtgattatagttggagatggggccttcaaagagttaattaaggttaaatgaggtcagatatgtggaacttaattcaacatgactggagtccttacaagaagcagagactatgacacagatatgtacagagggaagcccatctggagatacagggagaagacagccatctgcaagcgaggaagagaggcctcagaagaaaccaaccttttcaacaccttgatcttgggcttctggtctgtgaggaaatacatttctgttatttaagccacctggtctgtagtaggcagcctgagcaaactaatatacatgtatattttagttttgtctaagaaaactcttgaatggattatgacagactggaattctagactgataataaattactgtgtgacctccttaaaatttagagataagaggaggtcctagacaacgtctaacgtttcatcattttatacccatatacaaaagctttttttctgaaacagaaagcatcataccttggttgggaagctgacattcccttggatcaagacatggctgctaactgtaggagtgactacttatgtaacagtcattcaaatgaaaatacctatgctaaaaatgattatttgcaacattcatgtatttacttcttattagacaagtaattattaagcatatggcatataccttatactaggcattggaaaaatcaaaaaataaaatacagtcattatccttaggattctaattcaaattcaacacgatgtatgctatagcagagacataaatacagccaaggtggtgtctagctttacctggggaacttgaggaaggcttcccagaggaggaaagtcttttgagctatatctttaaggatgggcaggggttcgtctgatggggaagaggaagaaagggtactccaagcagagggaagactatctggtaaaatagtaattctcaaaatgatctgtagattcgaaataatcccttttgaaatatcatcaaagtttttaaagaactagacaaactaactctaaaatttatatggaaatataatgatctgtattagccaaagcaattctgaaaaatgaaacaaaatctcaggccttaaacttcctgatttcaggacttgctataatgcagcacacaagccaataaactaggccaatcaattgtcagaaagaaagttttctgggttttactaatgattccaagcagtaattgtcctttagtttctcaaaaaaaaaattgtttaattttctagttcacctggcaaaatgaaagacagttttagacatcatcatatacagttacagaaatcaagccagtgtggtactggcatcaggatggataaatagatcaacagaacagaagagtgagtctaacagaggagccaaggtagctcaacgggagagggctggtcatttcaatatacggggcttggacaagaggagaaacatatgcacgatagcaacagtaacataaccattgtcccttacatcacaccaaacacaaagattaacaagaaattgaccaaggatctaaatgaaagagctattactttaaatcttctagaaggggccgggcacggtggctcacacctgtaatcccagcactttgggaggccgaggcgggtggatcacctgaggtcaggagttcaagaccagcctggccaacatagtgaaactccatctctactaaaaatacaaaaattagccgggtgtggtggcatgcacctgtagtcccgctactcaggaggctgaggcaggggtatcgcttgaacctgggaggtggaggttgcagtgagttgagatcgtgtctttgcactccagcctgggtgacagagcaagactctgtctcaaaaataaataaataaataaataaaaattaaaaaaaaatctagaaggaaaaatataacagacattttctttgtaaccttgagcaagacaacaatttctagataagataaaccaaaaaatgaacagtaaaagcaaaaaatcaatatattggacttcatcaaaattaaaattaaaatgttgttgaagccaggcatggtagttcacacctacaatcccagtgctttgggaagctgagacgggaggactgcttgatcccaggagattgaggccagcctgggcaacacagggagaccctgtctctaaaagaataaaaataaaaataattactcaggtgtggtggtgtttgcctgtagtcccagatactcaggaggctaaggcagggggtgggagtccctttaggccagaagtttgaggctgcagattacggcactgtactccagcttgggcaacagagcaaaagcctgtgtccaaaagggggaaaaaaaactttgaaagtcaccataaagatgaaaaggcaaccttcagactggcagaaaatacatacaaatcatctgtctgagaaaggacctatgttgagagtatacataaaaaaacttacagtttagtattaagaaaacaaccaagcaaccaacaacccaattaaaaatggagaaaaatttgaatagatgccacagtaaagaagatagcagaatgtcaaatgtgcacatgaaaagatggtgcagatcattacacaacagggaaatgcaaattaaaacaatgtaagatattatcatgcacctactaaaatatccaaaattaaaaagactgacaataccaagtgttggcaaggatatagagaaactaaagcccttaaatattattgtggagatactttaaaatgttttaaaaatagtttggcagtttctttaaaactgtaaagtttctttaaaaattgaatatatgctaccacagagtttggcaattccacaaagtctgctcccaagaggagtgaaaacatgtatacacaaaggcgtttacacaaatggtcacagcagcattatttatgatagtcaaaagtgatgaaagaattagaataaaacctgaataggacatggaaccagaagttttcaggcaggaagtaacaaagtgaggcttgtttattcaaaagataaatcagacatggaagttggactgaagcaggtgagagactcgtagcaggaagaccagatgcttaacctccttggatggattctgttttaactgacaggaagacagttggatttcctaaaggagaggcttagcttgtgggaggaagtgcagtggaaaggatatgaacttctcatcatcctggttcagcatcccaggtgcgcacctgagcatgtgagtccccctttgcccaacctccagtctcaggcgcctcacccaccacaggaggggatgtccccagcctcaccgggctgcggcgaggcggtgcagtatctgtggacagcttctggctgatgcctgccacatgggtgggactcggggtagctgagtttccttctccttctcttctaacttcttatccaaggaaaaggaaaagacctgtctggccttccataatcagtaaggtaaattcatccatccacagagaaaataaccgggaagcctacagtgcacattttctctctgcccccaccccctatgcccatgccgcatcaccatgacgactctctgccctgccaggcttgctctgcatcccagaaagttgggcccttggggctgtacccacaaggctcccctgatctctggctgccagctgccacccagctctgggtcacattttctgacagtggcttcatccttccctgctacagatcctcttggccatcctcttcctctcctccatgcctcctggagctgcggcagcactaagcaggccacttacttctgaaagactggggtgctgatggagctggcagtttctgggttcctcactaccactgcccacatctctgcaaattcatctttgtcattaaagcatctagaattatttggattgattctgtttcatactcagaccccaattcaaagggtctaaaacaggtaaaatggacagaggtggggcaaatatatccaaataaaagaggatccttttatcttatgctcagggccttgctgacagaaggtagcatctttggtgatgcgacgttttttcctctccaggagcaaacatccaaggagcacaaactgccagtctctagttgtagtgagcaacactggctacactgctttctactcttattcaagcattgtgctgtgagtgaattaatattgtgctgtttccattcctgttaaaatattcttcatagtgacaaagaatacacaaaaatgtccagactgacataacggtgccacctgaagcataactcttggaagtcaaatgtgctgtgaccaaagaggtttctaaagagacacagtgtattcgtccattctcatgttgctaataaagactcacagtttcacatggctaaggaggcctcacaattatagcagaaggcgaaagaggagcaaaagcatgtcttacatggtggcaggtaagagagtgtgtgcaggggaactgcctttttttcttttttttgagatggagtttcactcttgttgcccaggctggagtgcaatggcccaatcttggctcaccgcaacctccgcctcccgggttcaagcaattctcctgcctcagcctcccaagtagctgagattacaggcatgtgccaccacgcccagctaattttgtatttttagtagagacagggtttctccatgttggtcaggctggtctcgaactcccgacctcaggtgatctgcccacctcagcctcccaaagtgctaggattacaggcatgagtaaccgcgcccagccgggaactgcctttcatagaactatcaggtctcatgaaacttattcattatcaggagagcagcatgggaaagacccgcccccatgattcaattacctcccacagggtccctcccatgacacatgggaattatgggagctcaagatgagattgggtggagacacaaccaaatcatatcacacagtttcttctctgaatttatgggtctttgaggtacttttatgacaatgagaaaaactctctctaggtgtgtgcaaccacataccagggaactaagtctagggaacagaccataagccgcatttcatccccaattcattgctgcagccaggtatgcctgtgcagtatacaacctacacaactgcaagtggcagccgttacttcatatgattctaggacactcgcacttacttcttggactcaattttcatatgtataaaatgaataatgctatacacttttcacctagctttatacaactagaggtattgtactttgaattcaaagaactataacttatctaaaaacattcaggtatacaaagttcaaccatccaaagtgttcacctatacaaagaaaagttaccattcttttgtgggctgattataggttacttagcaggggactttttgttcctggtggttaacgcagatcctaatatccaacttggtcaactttcaaaagtgccttatcagactttcacttctggctacaatggaataacaagcactgaatttatctccctccctgaagcaacctaataattccacaaaatatatgaaacaatggttttcaagacagtgacatgagacaatgtgggacaaaggtccgtgagagacaggaagcaagcgtgctgagtcctgcaatcactccagcctcctgccttcagagagtggccaggccctggttcagggagggagaccccagcgggagctcagcagacttgcggaattgaacccacaggtctgtgtgtagggggaagacggggcagctggagttaacagaactgagcagagagagctgcacagagaagactagaaaactgtacgacgggttcacctgaagcgtctggctgctggtgtaaacctgcgctttggaaaatggtatgcacacgtacactcactatggaaaaatagtttggcaatttcttaaaaaggtgaacatgtatctaacaggagatccagccattcttctccagaatttctaaccaatgcagagaaaacccgtgtgcatgcaaaaacttgtacacaaatgctcctggcagctctgtttgaaatagccccaaacaggaagccacccaaatgttcctcaactgatgagtgaataaactggtggatccctgcagtccatgtggcggcaggctgctcagtaccaacgaggagggagctgggacatatgcagcagcatgcgtgagtcttaaaataatgatgctgtgtgaaagaagacaagcagaaagaaacacacactgggtaactccacttccaaaacctctaaaaaatggtaactaatctatggggacagagaacagatcagtggtctccaggagatgagaaggggaggcagagtggggtgggagggagagaatccaaagaaacctgaggcaattgtgggggtgatgggttcactgactgtgatagtggtcttaccggtgtatacatgtatcatgactaattgaattgcacactttcaatatgtgtgttttatcacacaccacttatacctcagtgaaaaatttcatgcacagaaaaaaggtttaagaatacagtggcttgtttaaccaaagattttcatatgtggctgtcttctcacaatgcagctggagggaggccacaagaagaatgtgttcacaccccaggagttggaggttgcagtgagccgagatcacgccactgcactccagcttgggtgacagagtgagactccatctcaaaaaaaaaaaaaaattgttcatgcgcagtcactttcttaaccccaattttgctattgagcaacgtgtaaaaggattgtcactatgctgcatttgaaagcatgccctgtttcagatgtcccaaatggcaacagggtcactcacaaagagaacagggttcagtatatgccttgattcctgtcctccaaaacggtacccataggtaagttctccctgcaaaagggaactgaaaaaatgaggtcctggctttgggctttcattactttcatacacacacacgcacatgcacacgtactcacacacacataaagtttttgttttgttattctaatttgtgcttcgatttgcccaggagactgggtcctagaatttgatcaattctaccttcccggtccactgctagagaattaatctggaatcacattaaaaactcctggagcccccatcactatagcttctgaaggaaaagaataggaagaaaaatcaatgtgctttgtgtattcacagacttctgataaactctgggcatgaatcctgtctcgattttaagaggctctaaatggtagtgaattgtgagcctcactgcagagctaagaagtagccccctcagaactggagagtaaacagggccacgtgggtttcccatgcccagtccccagggatttagacctagtgtatgtttgtcaccaccaactagtgacaaggacaaattttccaattagaagaaagtcctttatttgaaactatatatttcccagatttcctgttaaaatgattcccttttattaagtgatgttgagactagatacttttgttactgtgtttttaaacatccttacatggtaaaatgaaatattgtaaacctatattgctcagtcctccactttatttttaagaaaagttaacttgttaataaaactgaaaagtcttaaatgtatcaatacttgtcattgcatgtggaaaattttatcgacattttggttttggtttatatagactaagttacaataaaaacaaagaactgtgaacacaatcacacatgatcacgaatgacaacgctactcctacagcgtaagaaatctcatcttaaatttcctcaacccaatattttcaaaaagaacttgacctgccaagcttccagaaaacacaaataaggaggcagaataatcacttcccaccgttgctccaaggagacccccgaagagcctgaagatgtgaagctctgataaggtaactaataattccttggatagtctactggcgtaggagccatggaaacagagaaacagcattggcaccaatgaaggttaatcaaatcataacacagacatgcattttattactctgacggcacacagcaacacagagttatcaggtgcagatgaacctaattagattgggtagggggaaatggacagctgtgaggtgactgctttgagctctcctgaaagataaggtcagatttaccaaagacacataggtggaaactcaaagaccagtttttggtagaggggcaggtccttgtgagactcagtcctactatcctgaggtcaagaagttcaaaacaaagtggaaagactggacatctgattcacttgttttaattttttttttttttaatttttagagatggggtctcactctgtcacccaggctggagtgcagtggtgcgatcacagctcactgctgcctcaacctcccatgcccaagtatctcctgcctcagcctcctaattagctgggactacaggcctatgccaccatgcctggctaagttttgaatttttctgcagagataggatcttgctatgttgcccaggctgatcaccaacacctggactaaagcgatcctcctgcgttggactccctagtgctgggattctgggtgtgagccaccgtgcccagcccctagtcactttcaaacagaatttagcaagtttggaaaggttactagatagcaaggaaaaccattttcacagaaggcagtaagacagtagcaatgatgtaatttttccctcaaaaaaactagaaggcaagagatctccaacaacaagggcctgggaatttgacacacttgtttccacacacttcatagagctacgaactggagaagtctttgaatgtggggtaagatagggaaggtcaagccctgtaggtatacaggtgggcatgggagccagacggagtcagtggacaggtgaagagggccttatccatctaacatgtactgtggttaggcctggagacattcaataagtggcatctgagtgcatgaatgtttcaataccctcaacgcactgcggttatgttcttgaaaatgtacattgcattcaaacattatactccgaacttaggtgcccaaatgaacagtattgataaatggaaatttcatttctcatagagtccttgactgtcctctcatatcataaaaaataaaggggatacataggtagatgaatacagatgtgataccctttaaaaataatagcaggccaggcatgtgggctcatgcctgtaatactttgggaggctaaggtgggcagatcgctagaagtcaggagttcaagccagcctggacaacatggtgaaaccctatctctactaaaaatacaaacattagccaagcatggtggcatgtgcctgtaatcccagctactagggaggctaaggcaggagaatcgcttgaacctgggaggcggaggttgcagtgagctgaggtcacgcactgcactccagcctgggtgacaagagtgagactctgtctcaaaaaaataaaaataaaaataatagcaaataatgagcataaaagtaacaaagatttatgttaaactcctaaatgtttcttgtatctctataggtattacccccaatcaaattcccaaattaaataaattttataaaaatacatgcagagcttctaataacagaaattccactctactctaaggatgtcagtacaatagtgctattaaaaacacatttggtttacattcaaaggctacctttcagagattaaggcacatcacattttaaagcgaatctcaaagaaaaagtagataaatttattttatccaccactgaagtccaatcactaagcatagcagcagatatttaacatgtgcttagaaaatatttttcaaataaaaaatgatttatcaaaactcgtaagagatacttcaaagcataatatccaaaacagcataaaattaactggccaaattaagcctaaaaatattagtaataagtaacactgaaaaaattattatcctcagtatataaagagctcttacaatttagtaaaaacatgctattatcaagccacagaaaataggccagtgacataaacgtacctatcccagtaaatgcttgaaactgtttaacctcattattaatagtaatttaaacttttttaccagaaagagagcattttgctcatcaaatttacaatctttctaaaaattcaataaccaccattgaataaaaattcaatggtagttagctctggcaaaatgggttcactcatacattgctagtgggaatataaattagcaaaacctctctgaaaaacaaactggtaatataattcatatcaagagttttaaaaagtttataactttcaacacagcaactcctagtaataatctctcctgtgacaataaaatatatgggcaaagatggtgtatgaagatgtttattacaaataattttttaaatatttatattttcatttataatgttaaagtttatatgtttataaatatttatataatatatactatgtaatttttcataatttaaaaaataaaaattttattcatttactttataaaaaattacaaataaatataaaatatataaacaaatattacaaatataattacataatatacagtatacaatatgcaaatatttataaaaatatatgaataaaatttttattttataaatggcaatttttataagtataaaattttatgcataaataaaattatataattatatattcatttataggtgtatatatttataagcataaatatataaacaattgtttataaatatatttttaaattgcaaacaacttaaattttcaagaattggaagtggttatgtgtaacatagtatgcgtatgaagaaaatcattaaaataaacctttgaagtataaacgcctttggaaaatacccccaatatgacactatgtaataaaatcaatacaaaaactctctgtacagcgtgattctatctatactatcttatgaatataataattcacagacacagatatacatacacatttatgcatctaaaaaatggacaaaaagcccaccatatggttcatagcagtgaatgactatgtgtattatatgttttcattaaaaatattttcagagaaaataatttttgtaaaaatactaattatataaagcaaaaagtaaaatcccccaattaccaaaaacccccaaacatactcactctttgtcctccaccaacatacccactgatatcagtctgaagcataggatgtatttaaacataaatcttttaaaaatataggcagaattaaatctttttaaaatataggcagaattatcctgtgcatatcgatccatcttggagatctttcctagcccgtacataatcatcattcttattaatgtctggttataattctatggctatataaaaatgtgtttaacccatcccaataaaagggattttttttttaatccagactttcactattacaaataatgttgtatgaaacagcttagtacacttctttctatcctctttaagaaacatatccagaagtgttaactttcaggaaaaagtgatcacacattcattttcacagacaatggcaaattttcctcctaattatccctaccactttatatccccaaaatagtacaggagagaacttacatccctacagccttgactgagtattttctttctgcttcacttttggaaaatatttccactggtgttctttttttttttttttttttttttttttttttttttttttttttttttgagatgcagtctcattctgtcacccaggctggagtgcagtggtgcaatctcggctcactgcaacttctgcgccctgggttgaagtgattctcctgcctcagcctccccagtagctgggactacagatgtgcatcaccatgctcagctgatttttgtatttttagtagagacggggtttcaccatgtggaccaggctggtcttgaactcctgacctcagatgatccacctgcctggcccctggcatctttaaaattactagtgagttcactttttaagttgcttggctattgacatttctattgataatggtttatttatatctggagctcagaccatttgctgttctctaatattcactcactcagtctttcttagcaataacaccccaatatttaatgggacatgcggtcatacaggatgaagactacattgccaagtctcttttaaagttagggatactcatgtgactaaacactgggcaaggggacatgaagaaaagggtttgttataagacttccagaaagtgattttaaaggaaaagtgcacatctttcctagttgttggaatgtagacgcaacagcagaagctgaggcatgcatcttggacgatgaataaaagacacatatggctgggcacggtggctcacgcctgtaatcccagcactttaggaagccaaggcaggcggatcacctgatgttaggagttcaacaccagcctggccaacatggcgaaaccccgtctcaactaaaaatacaaaaatcagccaggcatggtggtgtgtgcctgaaatcccagctacgcgggaggctgaggcaggagaattgcttgaaccttggaggcagaggttgcagtgagccgaggttgcaccactacattctagtctgggcaacagagtgaaacgctgtcaaaaaaaaaagacaaatgttttggatgttacagtaacaaaccagaggggtctcagatcatgataatgtttgagaagccaccttaccagtcattgaccatttacctctggacattgtttatgtgagaattaaatgtttgtcttgttaaaaacccttttatcataaattttctatcatcttcaatttgacctaattgtatcctttgccaattttttaattggcttgtttacttatatccttgccaatttttttaactggtttacttattaattatttattttttgagatagggttttctctgtcactcaggctggagtccagtgacatgaatgtggctctgcagccttgaccgcttgggctcaagtgatgctcccacctcagcttcccaagtagctgggacgagaagcacatgctactatgccaggctaattttttttttttttttttagagatggggtctttctatgttgcccaggctaatctcaaacccctgggctcaagtgatccctctgccttgttcccccaaagtattgggattgcaggtgtgagccactgtgcccatcctggtttttctttttttcctgttggcatgtacttctttatgaaataaatagaatttcttctgtcggcagcaaatcatgaaataaattccattcattcatctattcataaattagcttaataattcattatcatatgcaactttcacccaaaggcaatgcgtgggtgtggctatgggtgtgatgggctgggtacactgcagacactaggaggaatccaaacaaacgaatctttaaaatcctgtccataagtgtatgaaatatttggcattcaagttaccctaggagaagaagatatttttctcattttcagtaaagaaaaacagaaacctaacttcttgcttctttcattggccgaaaggatggtattacagatttgctttaagagaaaataatctcaaaatctcatcttttaaaatgttagggtaacccattaaagccacatttggcaagtcaggtttcatgactgcagatgcaaatatttaggtgcacactcccttggtgtgcaaaccccgtgcactgaggaaggtttttctgcgaactgctgaagctgaagcttcagggctgttcacttgcttgggcctgtcaggaggtctagtgaggactgagcaaggtgatcacatggctatgtattccccaaaatttaagaagatattttcacagctgttgcttaggacaggtgcccctttccactccagcactgcctctggtagaaatccccctgtgtcaggcggccttggagtggtaatgggtatttgggaagctgagctatatatgtgcagtttgtctgccatttagtgagatgtggtatggagtttacagttattccttcactgaagtaacatactcccaggtgtttcagtgtaagcatggcttccaaggatcctcctcgcacagactgtgtccacacacccacccaacgccacgaagtagggaagatcagagttctgatatggcacccagcacctgaaacgtgtggatggagaaaaaggaagcaggtttgaagtttagggagccagaagcctgtctgtggataattctttcaatcattagatgtgccaagtcataagtgcaaggtgcgattctcatcaacaccttgtcaaacagaagttcattttggccaagaatatacttgataaggccttgtgcataaacacaaatgaatcatgtacgctttttgtttattttaatggaaaccacttgagagagaatttaccggtatttccacacttgaagtgcagaaacctgtagaaataaatactacagtgaatatggcagttatgaagttgcgtgatttatacaccctaatgtactagatcatgtcttactgtatcggaaacatctcaaaccaaagaaatctgggctccagatgaaaatagtacacaaattgccacatcctaacaaaatgcctgcagaagcaagtgctatattccagtgactaaattgctacatttatctactaataatgaactgcgtgtagcaatgaacaggccattcaagtatttgctaattaactaagagaaataatcatagggccacattgaaaaaaagatttaaatgttttcctgatttgacatgatatactaacattgactaagataacattcatttcataatatgccaacacaaaaggacatattgaagacatattcattgatgagttttgtcaattgatcaaatatgtaagcagtcactatgcaataagacttgaaatgctctgcaatcttacacaccagaaataatggaaaattattagaagttacctcaaatttgaaaacaagcctcaaagttgtcatatttccaataatttgtaaaactaaaaggtacttttcaaaaccatcaataataaaaataaattgtaatcgactatgcttggaagactaaattattttctattctttttatacaaagcaatacaataaaagtcatatgccaagaggcatatgaccaaaaatcataggaaaaagagtattaaagggaatatcacacagcaagaaaattgaaatatgttatttttctaaaagtatgattttcctggtatctactgaatttttaaaatttataatctgttgtaattttcttattatcaattatagtaatacttttgcattctgtttcttaaagaaggtctcccaaatggtgtaatttaagatccccacaaaatctgaacttgtctctgcttagttaagcacctcctcaggaccccttggcctcgtcaatatttccaaaatccttctggtctgggctgctcatggccatgtccctttccaggaagtgtccttgtcaaactctcaagagatttaactttaaccaagttagtcctgggtttacccggccctcatccccactcaagggacttttcagcatggagcttccgctctactcccaagcttgaatgaaatctcttgatcttctgggcatggggttttgcttcctgggcaagtgcaaggaaatgtgatgtgaactggaaatgcgagggtgtctgctccccccgggacacaccttcatccatagtaatgggagacaggaggattctgggtaaacaaaggcctccttcccttctccttgccttcagagggctggtccaagttgtggtttcttccttgcaaattttcactaagagtcctctgtgtcatacaaacacacctgctaaggaccaactgtggctctttagggcccctgaagctgcggccggcaagaatgcttcgagttgcttctcatgtttccttgcctttattcccctctatttttcaccctagccatcccgggcttccaccttccaaagaaagtgtcagctctcactcttgccccaagctctgctctctagaggaccctggctaaaatgcaaaccatctaacagaaattaaaaagcctggcaatctagcaggtaggagccctcattactgtagctattatcattaccacgaagattcataccaaaacatgtcagtacggatgaccttgggtcactgctctgaaattcaatacaaggaattagagaaatgaatgaaattcatgtaaaaagtagaaaaatcatatttaagacaaattttaaaacaaaagaaaattaaaaataaattattagcttggaaaatgatagcataaaaatgagctttattttgataagctccattttgggttaagcttgataaatacaaaatacaatacatgcatctatttatacacacataggcatatgatgactatagcaaaaatagtatatttctgctcatccttgcagaaaacccattaatgtacaaatgcaaaagtgaaggtttctaaaagttctatttgtggacgtctgcacccgtgttttatccattgccatttttctcctatggaaggaggtgaccaacccatctcagacgcaggacaagcttccttgttccacccagtcagttctagacagatggccacaatacacatttttgaatcatgccaaaacaaagattgaatctggcagaggctttaacccataacttcttttcccaaagacattaaatacatttgcttggtatcctttctgacagcaccaattcaacagagaggcatgtaggaacggacacgctgagtgagttttaggggagaaagtcaggcaaatatgcatgatcgaaatagcctcccaaacaggaagacttatgttcttctctcttctggaaatctaaatcccatagtgtgtaattttgatttgcattggcaggacaagaatatagctcaataagatgacacagcaccacgtccaagtgtacacctcatacctgctcttcacaatggggaggcttaattgtaggtagggaatgagcttggaggactatgacatatataaaatgagccaggaaaattctgtctgcctaacttacatggattcatggccaaactgttctcctttaattaacacatctttccacatctcagataagggggtccttacaacaccacatttcttcccactcacacttaatcacagtgagcacgagctatggaaggggctctgttcatctgaagaccctgaagatgctgtctttttcacatgttgttttcctctcagatcagaggtagtctagggaactgagatttcccaatgggtttgagttttactgcaattaccagaaggctattgaaagatgggtttttagaatctgagcaaattatcactgcaggtaggtattcagaggatacatgtatctatataactgtggcattgaatttttaaaaaatataatcattttagactagaaattagggctctaccttgtattcacctcaattgattttacttttttttttttttttttgagacagagtctcaatctgtcacccaggctggagtgcagtggcgtgatctcggctccctgaaacctctgcctctggttcaagcaattcttgtgcctcagcctcctgagtagctgggactacaggtgtgtgccaccacaccgggctaatttttgtatttttaatagagatgaggtttcactatgttggccagtctgctcttgaactcctgaccttaggtgatccacccaccttggcctcccaaagttctgggattacaagcgtgagccagcacacccggcccttgattttactttttaaattgtagtccacttgctcaaatttggaaactaaaagacaacagaattctatttctaccaagttttattgactatttagttaccagctttactgatcacaaccaagtttactaactgactttgccttttctagagtgccaccgttctgctcatgaatttgaaattatactggttttcatgcacttattacatacataattattctgtgtgatgaacagctcaagaccttaggaataaaggaataaaagacctctgtgttttgaaaataagaatctgaataaatagaaagattccctttcaatcaaatcttatttaccacacaacttgtgagtaacctgcaaaatactgtaggcaataacagaagtaacagaccctgctcctttcctcaaagaattcaaaatttagtcaattaagccaaataaagccttaccagtaactatttagcttaataatttcttgtttttctggcactttcagaaaatgaaccctacataaagcaccaaaatatttttaatcttatttgagtgaatctttgatgtgacatcctgttcccaagagtattacaaatacgactctgtggttcagggtcttcacggcaaacagtgatgcacaacagcacggcagacccttgggagcaatctagtgctggctgcttcctgtgggccccccgacctcacgccactgtgcttctgcccaaaggggctgctggtttgcttttcctgcccctcccacaggcgtcagctctgcttcccgcccctctgtttctcactggctgcctctcactgtgctgtgttgagagagggcactaaagaatatgcagaacaggccaggcactctgtctctcagcactctgggaggctgaggtgggcggatcacctgaggtcaggagttcgaatccagcctgtccaaaatgacaaaaccccatctctactaaaaatacaacaataacaaaaacattagttgggtctggtggcagctgcctgtagtcccagctacttgggacgctgaggcgggagaattgcttaaacctgggagatggaggttgcagtgagctgagatcacgccattgcactctagtctggaaaacaaagtgagactccatctcaaaaaaaaaaaaaagagccggttgcgacggctcacacctgtaatcccagcactttgggaggccaaggtgggtggatcccttgaggtcaggagttcaagaccagcctggccaacatggtgaaacctgtctctagtaaaaatacaaaaattagccaggcatagtggcatgtgcctgtaatcccagctacttgggaggctgaggcaggaaaatcacttgaacctgagaggcggaggttgcagtcagccaagatcacacgattgcactccagtctgggtgacagagccagactcaaaacaacaaaaacaaaaacgaaaacaaaaacaaaaaaaacaataacagcagcatagtaagaagccctggaaagtgcaagtgcttttgcacccatgagctcctttgccaaccacagtctggtctgcagggctttcttccaagtagactgcactggtggcattgtgtttcgtgacagttttgttttgttttttcccttggagacattttgatgaatctaggcttttggcggttttcactgatctttaggctctctgtgctccctgcggtctgaggatcagacaagcgggttatgtcagactgacatgaattgaaacaggtttcctgaggtctctttggcctagagagccctgctggtggtcttgccccctgccaggtggatactaacgctcaggaagccactctcaggatgcagcctctgggtaggccccgcaaaggcctccgcagaaagctttgtggacagacgcccctgcaggatgccccggagagcaaagaaagcaaagggaagctgcagcccagctcctccactcccagagcctggtgaacatgtgctctgaaggcaccagagcttcgggaacctgtgtatgaggaccccaagtctttaaccttcatgccacttagcactaaatgccaaaaaaaaaaaaaaaaaaaatgccaatacaagaaccaaggatgggaatataacatatgtagcaagtgaacaagtttgcagagctagggatctgcctctcgccaagtccgtagcttggccgggagctgggtcatattcatgttggtgccctgcttcggctacactggcccctttgtccctactaccatctctcttattcacctcccacagcaatttgtacaggttacaccttactgtcccacttgtagggcgaggtcagtaaggctcagcaaggtaaaaatcaatttgcccaaaaccatgccccacagttaaggactggggttgcccctctggccctggaaccagagtctctgctgcgtgttcctgtctcctagtgtgtcggggttacctttgttttttttgttttttgttttttttttttgagatggagtctcgctctgttgcccaggctggagtgcggtggcgcgatcttggctcactgcaagctccgcctcctgggttcacgccattctcctgcctcagcctcccgaggagctgggactacaggtgcccgccaccatgccgagctaatttttttctgtttttagtagagacagtgtttcaccgtgttagccaggatggtctcgatctcctgacctcgtgatctgcccgcctcggcctcccaaagtgctgggataacaggcgtgagcccccgcacccggcccgcctttgttttactaataacaaggtgtcactgggtcactgctacttggcgcaaggcattttttacatttattagattttcctttttaaattgaaacataaaaattgtatatattcatggtatacaacatggtgctttgatatatatacccattgtgaaacggctacatcaagctaatttagctaacaaatgcattacctcacatacttatgattttttacttatgattttgtatgattttttaactgaagaataaatacaaactccttagcatgggattctgtttgctttgtccgcaacctccttctaatggcatccagcataccaaggagaagaaagaggtgcagcctggagaggaagatggccaaaagtctccctttcctatgaccctgctccccaaccacagcaagggaccaggtcatcaaaaacacaggctggccaagctccacattctggttcatctcactgttatccagatccctttttatcaacaggaaacatcagctctgcagtaacggttatatggtcctgtaagaaccaagaaagagcagctaactggcccataaaggggattgaactcacatactcagcctcattaggaactactttctaaccaagagatgcaaacaactggagaaacatacaggtggtctgcagtttccacttacagcattagcaaaacaaaacacaatgaaataaaaataaaagccctgtattaagaactgacctctatcccaagaatgatgttgattggatgtgaagctgtaatttgtccagatgtatttctaagtacatgtgacatgtcagctgcttacagatcatcggcttcctcctcacatatccagcacaaaatcaacacgaagtgacagagggaagaaacagcattgtcttgtgttctgcttccaaaaccaccttgacaagtcaactgacagcagaaaaatcccaggctccgtggaggttcccgattttcataacattagccatgcatttcaaggaaatgcatttcaagatgatcaacagtgaacttggcgagggagcactggttctgtgcagaagcagcagaaatgttctttgcctctcttaacattttgtggactcttactgtccagtctcatgagtgggaatttaagtgggaatgaaatgtaatctgggtggattcctttaatcatattgtgcaggtaaatgtcagctggcttggtaccctattcagaatccagaaaaaataagaggttcagggagggaaacagggagaggaggcagaaggaagagggtctgccacagccctttcctactacaacacaagtctgttcctggtccaagtccctgcagagaaggcttccaatagcagcagccactttgggccatgccaaatgactggggagccacaagggcctcttgggactccctcaggaaggcccccacgctccaggatccagcaactgtctggctgtcttgtttctgtccccatgtggaagtttctcccatgtaggattggatacatttaccaactggacacattactagattcacatgttcttccttttcaagtcattagtgccccattatttactcttgacacttttcaattagcaaccatttctgcaaaagagcaacttcaagagaaatgcaaatgtatattagggatgcctgatgttttaaaactcaaaataagcatagctttatggggacccatagaaccacgtattttgaaaatatcttagtactttcttgaatagaagtatggtcatgagaataatagcgttgtttttcagatggtaaacatcaatatcggccgggtggggtggctctcacgcctgtaatctcagcactttgggagtccgaggtgggcagattctgaggtcaggagatcgagaccatcctggccaacatggtgaaacctcgtctctagtaaaaatacaaaaaatagctgggtgtggtggcatgtgcctatagtctcagctactcgggaggctgaggcaggagaatcgcttgaacccaggaggcggtggttgcagtgaggtgagatcatgccgctgcactccagcctgggcaacagagtgagattccatctcaaaaaaaaaaaaaaaaaaaaagatcaatatcagtgtatacccgcggaactgtaatacaggccgatccctaaggcctccatggtgtcttacagccacacagtgtgacacaatgacatgcgccatcctggagcagggcatctcaccctccccattctctacggtctgtctggagaaagctttgtggcggcgcctgtgccctgcagggtctccagcagcatccccgctcctgcccactagatgccagcagccttctcctacttgggacgaccaactatgactccaaccattgccgaatgtctggctgagggtgggaggtgatagtgagtgtccccccatccccggccgattgaggagcagtcctagaggtattactatgatccccaggctgcagtcaataggaagcctcatgagacacacatacttgcccaaggtcacatacaattagttcactgtagacaatgcaacgtctactgtgtgctatggaacaaccgggaggaaggagacggagcccgctctaagagatggtgcccactctaagagcccccttttctgattgagctggtagcacagaaaatgtcttataaagccagggcagcctaagaagccgtgatccctggaatggggcaccgccagatacagtctccgggtggccaaatgacttctcgtcactgaagtgcttgcccggaggcctgagcgatttcctaatcctcttgcttaatgtcttctgaaaggctcattttaataagggaatgaagctgttttaagataagttaggtagcttataatatgaagtgctaatccctagcctagaaaaacgcaaaagaaaaggttttgactaaatgtctctagctataacctgatgctgttctaggaccattagcatttttttttccctgggctgcctcagtcttgacacttccttatctctcttcattggtgcgaacaatacctgagctctccctcacagcagccgtctcccacagactcccctcggatgtccgggtgggcaggtggggatggagtgagcagatcggggttggagtttggttatgcaaccattgagaagtgagatgagtctgcagcttctgcctcactgtatggataagtaagttgttgtgtccgaggctagcacccacgacagtggacacagaggtggagaaagggtatgtgggaagcagcactccagctctgttcctatcccatgggtcctgaaggagcctttcggtttcctactagatcttacctagaactatttagattatacatgtagttttgcagtaaacctagcaacttaaaggaactcatgattcgttttttattttggaagctatgtctcagaatctatgggaaaccaattacttagaaaacatggaactctggactttttaattgatcaaacactaaaagacagtgagcaaaagtcccaacctaagacagcggcacagacatcgtgtaagagcagccgctgggattcagggtctccagcacacagtgaggagaggccatgtctcagcttctccatccactcagtcagatcataaaactgaccagttttatgcactgatctaggagccgagaggtttgctgtataaatgcaaagtagtaatccaaacacttctcccttagtcggtctacacagccaaataatccccctccagaaaggcagtggggaaaagctccttcttcctttgcaggtagaaggcctcacacattctcactcttaaacgggtcaggcttctaaggcttcccatggaccatatctaatttacaggaaaaagactagagtacacagccctggtctccacagtttcaaaatagcctgcggtaactaggcattgttattatttaccagttcttatccataacttgtttgggaaatggtaataaactgatgctccgtttgaataacaccatcaatgaggtaagatactttataattattcttctacctggggaacacgctcattaggaacaagccggctggaagcttcagattgttacattgtagacactgcattctgcaaattgctggaagcactgggtagagggaggttcatgtgtgaaaaatgaggatgatgatatccacaggcagaacagtttgagggtttcagagaatgcaagaaaagctgatgctacacacgccctggctctcagggtggctgcgatgggaggggtccctcccaggccagggcaaccattctgggagacagcaagtttgccttgttgtaccattgcctgcctgggatttaaagaaggtctgtgggatgagccaccccacctagctacgtgatgactgaacatgtagcaaataagcctgtgagcacctccaccccaccccaccccggagcacccccgtcagcaggcagagcttggcctatactcactaggcatcatttctgcccgctgtggccaagtcgctctccagggtaagtccgtctcttactgatttcactaattctttctcccctctggagtttcaggatactgaaaactactcagcaaattctttaaaatctgaaatacgacaggagttaaatatgctctaaggaaaagggggaatcatttttatttagtattttcaaataaattaaagacctggcttatttaacccacaggatgggatgctgtgactgtcaccaatccatggggcaaaagggaactgacttgagcgtatggtgagaaggaaggggggcttcctggggcagggaaaattggaaaacagattcacgcagaacccccactccacaccccctgggaaacgtgcttaccccactcttccgtacccttgtttaatctgtgacattgtgattgaaatttgtcactctgggagttacatctgatgttacagcctgcagcggagctaaaccaaaataaacaatctgctctattctgcttagactaatacgacagtgatgtaaggcccgagacactggcagcggcaaaatgcttttcccacaccgcatgctgcagctgggccccatgcgtttccacgccggggataggcggcaccggcttatccacgcatggggagggttggggaggggctcaggcacaagtgcaaactttgcttgtaggcaactgagttatcctgtttcttctatcagccggcagcacgtgctcttaaggtggacttttaaaagcctttttaattttattttcccgggcatgggtgacccctgtctctctaagcctggagggtttgcaaacacgctaactggtggtggaagtgttcattgcagttcacataaagggtgtgtggctccagcacatatcgatttgaagctgcccacacagacgcattttcagttgtcttaaattaaatacccaatttattttttggtacatatttggttgcttgccagcaaatgactctcagtatattcaatggctttttgccagaaagatgacaggcttttttctttaaaaagggggtggcccctaaatagcttcctttctgaagagctcttggtggccctctggtttgtagcagctaactcggagtgcggcctttttacagccagctttgggggtgctaaatctgtgcatttttcaagcctcagtagttctggtctcaatgcagtagtattcgcttgctttcttttctcttttaaaatttccacacagggtcctgagagccctgccatatgtgggctactcatcccagcagcatgcagaggttctgcgatgccagtggtcacagggagtcccctcatctggtcatccttccatccaagatccctggctctggatgagggggaaattgccgtacatgattcagttaaaattccagcctgagtggcctcgattaaatccagcctcctacatgcaatcaattttcaattttatcacctcatacgaagcaaagcgtgaatgagagttcagggaacttggatagagataaagcagggtcctctttaatacacagatgcttgttaaacctgctcattattctacactgtgattttctacgtgtaaaccagagacgatcataattatcatatgcctctccaggatttctccacggagaaaaacctaagagtaagttcatcaaaatggaaggtagaaaacaggaagaagctaaaatgtcatatccaggtgcaaactagaagcccctcgtccaccctggccatgagctccctcccttcctctactaaagcatcccctgaaccggggagagggactccacttcccagttcttgggccttcactgctcccgagcacaagccgtaaaatgacgggagctgtgtgaggtgccaaggtctcaaatgaatgcgggcagcagcacctgtgaagctgataaaacatcagtttgcatttggctcaccttgcaagagggggttttatgcctctcgttttcgctccgctcccacactcctgtcacccagcagctcacactataaagagcatcccctgcgctctgtcttaaggaatgggcactaaataaaagaggcagcatggtgctgttaatttttcagcataggggacgctctgcctgtgacaccagatggaagaaaatgtcctgtagcctcctcccccctcatcaatgctcagtcacacctctctttaagcatccttcagctttcccgagaaactggtggaaaatggtgttgtctgaaaatctgggaatttttcccttcctcctgctaatggcctgggttgaataaacattgaagaggaaaatttagaaaaatgaaagagagaagagaaacgctctacccctagatggggctactgtccgcaagcagagtgtgtttgttttttaaaattcagttcacttacagtgagactgagattaggtatcaacagagaatttacaatttaaatcaaactttgactcatttaattaagtctttagtcctgtgaacctcattcacagccttagcattgggctgctctaggactccaattgataaacttcttaatttcctgggtgtctgggttttttttcctttaaaaaaaaaaaaaacaacccatacatcaaatccaaactgttgaataaactacaaggaaatagtagccagcagcgaatgtttatatgttccagggtaatagataatgaataataagggactgagggtgagggtagacttaacaaaatgcttggaaaagcccaggtgagcttcaatctgtccacttgggaaataagtctgaagaaggagaactgcattccaattaacatctgtaatttgcattgtatgaaagcactagaaaataatagttttgagagcttttttaatgtttccagaggtaggagtacagataatcttatttaagaagcaagcataataggtctttctgtcatttctgagctgctgaatcataggaaggacaggaaactctacctcaagtcatgagaagaaaaggtctgcatgtgtctccttagccttaacccccttgcctaggacagaaagcggctgaaggagggctctgcctcaagtgtttcttaatcattcccttcagcaatggtgctgcttttgttacatgactgctaaaagagctgacgtgtctgtattgtgtactgggcaccattttacatacattgactcatctgctccttaaaaccatgctatggtttaagtattattacaatatttactagaaaattaaataacttgtagaaactcatgacccaaatttttaaaccttattttagattcttctaagaccagggcaattgtgaaaactcagtgttacccataaataaaacagcggggcactctccttatcaggaggcagtgtgccttaaaatcagctttgaagtcaagccagacttagctgcaagtcccccctccatcactgcaggctgcatgcctttgggcaggtcacttcagccttccgagcctcaggttccaagtctgtaaaatgggttagcatcattcccatctggcaggattgtcatggggcttaaatgagataacacattaaaagtgttcaggcctcagcctggatgttagcccaggtctcgcaaatacaagaccagccaccttcctcttcctcatccttaatgcttcctaatattctctctcacctcccacactagcagcgccattgcaggaactgtccccgtcccactgcactggctggcccagtgccacatactgcagggaggagacacaagcatgcggccctggggagcgctggtctctgcacaaacacggctcttgcagctttcaccctgagctcgccctgcgccagggcagccagtcatcttgacaagagcaaggaccgagttataggtcaaggtaagtggcagaagcaactcactttgatctgtaactagagctcagggagtcccattcgaccctgcaaggggcctgacaagcacaagccccacccaggagccaatgtgtctccgcagtgcttgctctagaggaggagggactgggcgaggtggggggaggagcagcctttggttcagaagcaaaatagggggaaaaaagaggcccagaaagaaacagagaggggagaagaagcgctgttaagtgacagagccacaaacagagctctcttgtctactgaagtgatgtaggggaactgaggtggcattggagatatgcctcccacagtgagaaagattgtactgggaagagatggagagaaaggtgcccctgagggaagaaggtaagccggacactgagacaagaaaccaggaaggctgagggagcgcctggagctgggatgggctcactccaggtatacaatgtgcacgtggggataaggctgcactaagtcgggggtcacggctagtaataataagcaaatcactgggaattactctctgggtaggcacaagtgaggcctctcaaaccaccctgacgttcagggtgagggctggagctctctgctcctgacagggagcacagcactgcatcctcgcagcccaggaaagttctggcccattcgaggaggtagccgggggtcccactgactctggaatgcttggggctctattttagtccttggaaccccaggagagtcagatccctcgtctgcaaagctctagatatccctgtcccttgatttttcttgaatcaggaatgtcctctaatttcagaaattaatttgaacaatttaaagccttctgggattcagaggaggcagcttggatgctacgtggagctacaggaggggcgcagccaatcagccactgatcttcactcctcaggaacacacggaaaaaagtccactgagcaaatcagaaggcacatacccgtgtgcaaatacacaaaatgtatcctattataaaattttattagcagtgacagttttaagggagctttagcaatatttcaagctctggcatcaaaatctgacatattcaattttgcttttatcaggttatctgatgacatttctgcaaaagaggcactcgcccatctcaggctcgcccctcctctgctgggcaacacttgcctacagttggcggagccagcatggacagcatctctcttcttctgctgaggaacaaacaagggttcaaccctcaacacacaaagaccaccagcactgcttgccctttcattttatagcaagctcatgtctaaagaaacccgtaggctcgtgggcaggggaccaaatggcaagtgcagatagtgtcattacagaggactggtgagctctgcagatggcatctggggcatcacaggtgacaggcaggctgttgtggggccctgcgtgtttgtgcattattgcaaagaccgggaatcagcagctaaagtgcatctacctggttagggggcagcctgccctggacagctgagagctgggaaagccatctcgaagattgccacatcacaggagaaaagccccatccattccgctctttctttttaacaagttcaggggtacatgtgcaggatgtgcaggtttgttacataggtaaatgtggtcatgggggtttgttgtacagatgatttcatcaccaggcattaagcctagtacgtgtcagttatgatttctgagcctctccctcctcccaccctccaccttctgccaggccccagtgcctgtttttcccctccagtgtatgtgtccatgtgttctcaccatttagccctcacttataagtgagaaaatgtggtatttggttttctgtccctgttttagtttgctaaggataatggcctccagctccacccatgtccctgcaagggaaatggtctcattcttttttttggctacatggtattccacatggtatatacgtaccacattttagaaatgcaaatcaaaaccacaatgagataccatctcacactggtcagaatggctattattaaaaagtcaaaaaaaaacagatgctggtgagactatggagaaaaaggaatgcttatacactgctgatgggattgtaaaaaaagttcagccactgtggaagacagtgtgatgattcctcaaagacctaaaggcagaaataccatttgacccagcaatcccattactgtgtgtataccaaaaggaatataaatctttctatgacaaagacacatgcatatgtttgttgcaacagtattcacaaagcaaagccatggaatcaatttttcttaataaatgaatccaggaacaaaagagaaggctccatgaaacccattaggtgcacagcaagagggtgaggaggttaagagggaatgagcatatctcctaatgacagagtctctccttgacccaacgttagtcaggctcttctgaatcctcttcctatctgccatgacttttaggctttctttttccttttttttttttttgagacagggtctcactctgttgcccaggctggagtgcactggcgtaatctctgctcacagtaaactccactacccaggttcaagctattcttgtgcctcagcctcctgagtagctgggattacaggcgtgtgccaccacgcccagctaatttttgtatttttattagagatggggtttcaccatgttggccaggctggtctcgaactcctgacctcaggtgatctgcccacctcggcctcccaaagtgctgggattacagatgtgagccaccacgcctggcccacttttagactttcttatccatctttgcatccctcaattttagcaagatctggctaagttggtttaccttcaatatctgatcacccttgatataagattggtttcttcattccctgccatcttccaggtgacatctgatcacctcggcctgcctacagcaagaatcctattggcaaataattactttgccttctgagtaattttctatccaacaacccccaaccactctgtctcatcctgctcttggactacaaatccccaatttttccttattgtatttggagttgagtccaatctccttcccctgctgcaaaaccccattgcagtaatcccctccaaataaagcctgccttactgttctttaacaagtgccaggaataatttttaagcactaacccaaatttctttcctgtactccttacaacaagatgtaaggagcacactcggcttgtcctcaggttgcatttattaaacaaaagctaaaatccccctttcaaatatgagaacataaagcatataagagagaagtgtttcctgggtgatccaaattaaaaataagagccatgggccaggtgtggtggctcactcctgtaatcccagcactttgggaggccaaggcaggcacacttaagttcaggagttcaagaccatagtgaaacctcgtctttactaaaaatacaaaatttagctaggcacctgtaatcccagctacttgggaggctgaggcaggaggatcacttgaatctgggaggcaaaggttgcagtgagtggagatggcaccactgcactccagcctgggcaacagaatgagactctaaaaaaaaaaaaaaaatagccatgggcaagagagacatgtccttgctgatttctccccttgaatctggcccactgaggacacctcttccttctcttttttttctttttctttttttgagacagagtctcgctctgtcacccaggctggagtgcaatggcacgatctcagctcactgcaaccaccacttccagggttcacacgattctcctgcctcagcctcacaagtaggtgggattacaggtgcctgccaccatgcctggctaattgagatgggttttcactatgttggccagactggtctcaaactcctgacctcgtgatctgccctcctcggcctcccaaagtgctgggattacaggcgtgagccactgcaccccgcctcttccttctctttattctgcctgaggatgcacgttctcttttgacagtttcagcggattgaggctgaatgttaagttttctgccaaaatgggttcagtatcttgtcagctatttcctctgctgaaacgaactttcatctttaatctactcaggagtgctatgtatgacaggcgatccttggaggagagaagtctgagggacagcctgctactgtatttaaattggcttcacccagacagataaatacaaagataaggttaataagggttaataatttatagtcagaaaagtttaagaggattgcataatttaagcctcccgtgaaggccccaaaccaaactctatattattatcctgaagccgggtctactccgtgactctccttctgaataacagcccctcatgagtctcccagatacctgacctcaaaaccacagagccactgaagccaccttctgtctccttctccatcttctctgagagacagctggttaatcaggtcaaattattcttatctgattattagtcattagcagttatagttattctctagtaccttccacatttgttcttatttttattctcacttggatacttaagaataaaattcttctgcttattttgtttgaatccgtggattttaagaattattcctggctgggcgcagtggctcacgcctataatcccagcactttgagaggccaaggaggggagattacttaaggtcaggagtttgagaccaatctggccaacatggtgaaaccccatctctactaaaaatacaaaaaggaattagataggcatggtggcgggcacctgtaatcccagctacttaggaggctgaggtagaaaaattgcttgaacctgggaggcggaggttagagtgagctgaaattgtgtcactgcactgcagcctgggcaacagagcaagcctccatctctaaataaattcattcattcattcatgcattcattcattccatagtacagctacgatcatgttggtgccccattcaaactcagtttgcatcgagggtgaatctccctcccctccctaggatccctgttgggatctctggagatggtaacctgcgtggaaggctccaggctctggtcctcaccctctctgtgaattccacttgaaagcctttctgcctacgtgaagatgcagatgaaggacccgaggcttaaggcaacaagaaaatttagaatagttagcagccgagataatgaataagaattttcagtaacttctgggcaacataaaagtggagtgctcagtctgcaatttttgccccatcacctttaataagcatgaagcaaaatgaacaaaaagaatattaaacttttaaagactaaaagatctttcaaaatatattcctcgcttataatggtggcaatgaccctttccctttgttacctagctgaaaaaaaattacaaagtcgcatcaaaagcagaaatgaacattgcagaatgggagtagaatagtttgcctccaaggaaagtgattgaaagttgattatccggtttgttaaacagctaacattgaaccctgtggtcgggttttgggtgaagactctaagcctgaaaggccatggtcagggtctctctacggagctggacggttggactttctgctgtcgtggcaatgttctgtatctactctgtccatatcctggctactggctgcatgtggctgttgaaccacaactgaggaactgagtttttgttttattgaattttaattaatttttaaggctaatttaaagagctacatgctgctagaagctaccacattggacagcacagaataaggcattcatgctgctccacctttccccgattcttgttcacaaggtcagaggttgaggaaatgtcaatgcaaaacagaagggggtataaggcagcaggacagaccctccacccccaccccggaagcagaatcacacgcttcgcttcaggcctgcctgcctcctggtgtgcaatgctgatgtcagccgtggagttggcgtatgtgttctgtggaatatctcataagttaaggagtctataattagtactgggaatctaaataataatcatgataacaagaactaaccttgatagagcgtttactaatagaaagtcctttacacaggtacaaaccagttgggtagctttatgtaaatgagcgggacagaggcctagaaaattcaaacagcttggccaagaccataagattaataagtggtagagtcagaacttgaacctacttctctctgactgaaaatcaatcaactcttaaacagtaaacatttaaagtgggattgtggctcagctgctcaaccagtggaccaaacaactaattctctgagaccctgggccaccagtagatgcccaggacagcaagagcccctggccagtagcctctaggctggtggcgtctgtccagaagcagcagtatctctccaccacagtgtgccctacaaatatcatcactgtcttcacgtggaacgaggaaaaaatgtctaggaagcactgaacgacattctaaggaaaaccatgtgggtcattcccaaagagctggtcatgaacaagaccccaaggatgctagcacaccatttgactgactccaagaacagtattggaggcaggaaaatgtcctcacgtgccacaagattttaaattctaatttgcagtagaaggaattataaataggacaaagtcagaaatcaccccaatttttgcatagccagggtcggttaaattcatgaataatgatgagaaaatgaagaccctaggattaaagtggtagcttagtttccgtaaagacattaaagatatatacatctcagtaaagaagcttcctaacactgtcattctcagacaatggtcaaatcaggtgtttccacatggcttcttagagcaaagtttcttcaggacaatgggacatttgtaaaagagacccaagctttgatctgatccatgacagggaggctgctggtattcactgagtctgtcgccacatcaacctggtgaaggcttgggcagcacctgtcaatccgacacgaagaggtgttccatgagtttaatggacaccgtgtgccaactccattttaggttattaatatcaattggagggaaaagaggaaaacggggagagattgctcaatagtggattttaaaagtcttttgttgcatcttgctgaatttggtcccaacttccctcatctaacaaaagataaaaataggctccaaggctgttatgctgagagttaacatgagggaggacttatccctcattttcttgatatctatcccatgtgaagagaagttttgtaactgtgaaatgatatctaatgcgggttctaatatagaaacatatttcttccaatgtctcacactccctttcattcgagcgaccaagtcctgctcacatataattttattagaacttttctcaagggttactattaatactcagaataccaataacaactataatgtatttaccacataccaggtaataggctattttacatagattatcttagaatttccctaaagcccttgaaagataattattatgctctttatgcaacagatttgttcactcattcattcaacgcatatttattgagcacctgcccaacagcagtgggcatttcttacccgttgctgttgggagcacagggcccaagcaggctccctgtccccagtgaggaaaatacaggtatatccaaaggattacatcatagttcttacataaaattattctgttaccatatgctcacatgacaatactgcttctttacaaaatggtatctgcgtgagtgaaaaacaattcagggtgggtgggtgggagactcgggtcttgtgtctccagatttgggtcccaccttaccaaattccatcatgtagaaaaagaaaattcctcaatgtaattgctcctgtgttgatataattgatatccttccagaggaggaaaacctagtttttaatctattttgcattgttcaccttctcagcaccacatacttagaataagcaggaatgatggctctatcactgtaccatgaggagatgagactatggatgctgtgccagggtctgtaagacttttaaacaagagctttgtttgattccattattaatctcatcagagagaggcccaaaagtcatttaagatttggttactgggccaggcacggtggctcacacctgcaatcccagcactgtgggaggccggggtgggcagatcaagaggtcaagagatcgagatcatcctggccaacatggtgaaaccccgtctctactaaaaatacaaaaattagccgggtgtggtggcgggtgcctgtagtcccagctacttgggaggctgaggcaggagaattgcttgaaccagggagttggaggttgcagtgagcggagatggcgccactgtagtccagcctggtgacagagcaagactctgtctaaaaaaaaaaaaatttgttactgaatgtgggtttgaatgggttaaaaagctggcacagaaatgcaaaaaactaccgattttctctaaggagactatcagaagaaatgcaactttgtcctgccttgcccaagggcagagaaggttgcagacatcctctcccctcctcagctgtctacatcaagtggttgaggggtgggtattttgtggcatgaataagaggattattgtgcagcaaacacttgatttctaagcattttacctgtacttttttagattttagtctttgcctttttttttttcctatttgtttcccacttagtaccttagaatttgcctttttaatgcaaaattagcatagtaaaaaaattgaatccggggtgcatcacttagaaaagttaaagaagattttcaaaattaattgttgacaagactcagcaaatatttgctgaatacctgttatgtgccaggtaatgtcataaaccctaggcataggactgggaaccaggtcctctcttcttggaattcacattctatttcacaagggttgggaaagaggaagaaatacagaatggaaactctgccctgagcacaaaacctgtgcatttggttagaagaaggctggtgctctgcacacaggggcctaagagaggaatatgaggtagtggagctctcagtgacctcgctgttagagctgtagggaagatttaggtcaccgccttatcttacaagtgaggaaactgataccaaaagagactggaattattgtctgaggtcacccaggctgtcccactggatgtcaggtaccgcctcttcaggactattcattagcatttgtgaaagtcaagatataacagcatatttcgccttatttctttcttttcctctttatgttgtatttttctttttgggtcattgttttgcattaatgttcatagacaatttttcaccatttatgtaggattagttctcattgaaatattaattccacattttcaataatttatatgatttgatgtcacaaatatctggataatttgatatagcatcaaaaaaaggctttctctaccttcatgtattatcatataatgcattttcttatcatagggaaatcaaaatgtgtctctctaattccttttggttttttaaattttatgagtttaacatgcgtgatatataaatcacagtcaaacattttcttcttacctcatctgatttcgtttgataaaatcaactccatctatatgtatgtcttttagaaatacgtctcagtttttcccaaatgggtatgtcttacatctaatgcgtgagaaaaaattccagtagcacctccctggggaatctgaactaggccctggttatgctaatagaagccaagaggttttcaaagcaaaagaactataataaattattcataaataggtctctctcttgatggttttggtgtttccgaattttccagaccatagaggatatgtgaaacgatacatgcacgctaagctgaagatgttacagagggaaatgggaattgaaaactaattggaattttaaagcattgcatttttgcatttggtacactttctggagctggtttgggcatggacaagacccaggagcctgcttttctggtggtccttggtgactacggatatttttaacaggcagggactggtttctgaggaaagtgtgtcccagttcccaaaggaaaatgactcctcagtgactgttagccctcgaggcagttccagatgaggtgctagacttaattcaggttgccagtctacagaaatgaagactttacttggcatactgctcgtttgcacttggtttgtcagactctctacctcctcttccttctttttcttaaacttgtttttcagtttgttcctctgggtctctacattgccaaacccaagggcacctcctagtctgcgtgacggacccccacgcctggtccagtccacaggtgccatggttttgttgtacctgccaacatttcaactgttttagaattcttttttgtcttaatgggtgttgacaggttttaaaatgtttcctgcttatttctacttgcaattttctgatctctgtaatttaaactaattgcatctactttgttatttattccattttttgtactcatttaatagaaaaaataataatttcttcaacttcagtcttttgtgtttgccgaaacccaccctggcctcacatgttcaagttaagccctgcccccaccttcctcacactcccatagggtcacagaccatgcactgatttacctgcctttaggagcccccaaactccttccttttgagatttttctttgtaatgaatgtcctcgccatgatcacaacccaaataaaaactcttcagtcgtctgctgtattttgtctttaacagtgaacagaattcaattcgaattttgggttcacatttagtcttataatttaagaaagaataggaaaaaacggagagcaacttgatttgaaaaagacaaatctgaggcgggtgagagattctaagtcctgatgtgcttggaacagtccagacctctgtcaattgtcccagcaaaattattaccagcacccccttttacactcagaagatcctggtctagatgaagaatcatatgtgcgtcagctattttcgctaccgtaaagcccagcccagcacagtcccaaggatagagtaagcagccaatatacatttactgagttaggaataaaaagatgccagcggtcaccctccttccctcatggtgggagccagggaagctgacgctactacaaagctatggcgtcacaggtactggacactggctagtcacatatttatatgactcctggaagacagccatgagtagatggctattatccatattttaataatatctgctaagaaaaataacaattttgagatagcacttgtggaatgagtcctccatatttaatgaaccagggaaacataagggaaaggttaaacaattctatgaagccaggcgcggcagctgacgcctataatcccagcactttggaaggctgaggtgcgtggatcacgaggtcaagagatagagaccatcctggccaacatggtgaaacctcatctctactaaaaatacaaaaattagctgggtgtggtggcgcggctgtagtcccggctacttgggaggctgaggcaggagaatcgcttgaacccgggaggcagaggttgcagtgagctgagattgcaccactgcactccagcctggtgacagagcgagactacgtctcaaaaaaaaaaaaaaaaaaaactctacaaaataggagaaatatctaaaagtttttttcttgtttgtctttatgaagggcttcttcccgttcagtaataatttcccttgcaatggagcaaaacttgagacaataagggactcaggaatgtgttgaaagctcatgaggaatttagtctaattccttcattgtgagttgctggcattctactccatttgcattcagcctcctgttaccaccaatgctccccatcagtaacagtcatactaatgtggggtggaatgagaaactctcagtgcttccaatgctataaccacttgcctatcccagtttccaatctcctttaaatactggggatgttaaaggtaactgagtttatgccttggattgtctgtgaaatcgtaggaaaatacatgtgatcttccaatgccccagtacttacaaataacgatactttattgccatggatttaacgtgtcctccaaagttcctaagttggacacttaatccctgatgcaacaatgttgagagatgggacctttaagaggtgattaggttatgagggctctgctctcatgaatggattaatgtcgttctcatgggagtgagttccttatcaaaggatgcatttggcccatttctctttctctttctctctctctctcagtctcttgcccatgtgatgtcttcaccatgttatgaatcagtaggaagaccctcaccagatgcaggccccatgatcttggacttccagactccagaactatgagccaaataagtttctgttaattataaattgcctagtctgtggtattctattatagcagcacaaaagagaataagccgattactatattatgtttcagaagcttttcaagaatcactcttatattatgcacaaataatgtgttttgtttgttttttttttgagacagagtctcactctgttgtccaggctggaatgcagtggcgtgatctcagctcactgcaatctcggcctgatgggctcaagtgattctcgtacgtgcctcagcctcctgagcagctgggaccacaggctcccaccaccatgcctggctaatttttgtatttttggtagagacagggtttcaccctgttggccagtctggtctcgaactcctgacctcaggtgatccacccgctgaagtcctgggattacaggtgtgagtcaccgcacctggcccaaataacgtgtttttaatagttactgtgggccaggtgcagtggctcacgcctgtaatcccagcacttttggaggccgaggcgggcggatcacctgaggtcaggagtttgagaccagcctggccaacatggcgaaaacatatctctaccaaaaatacaaaaattagccgggcgtggtagcacacacctgtggtcccagctgctcaagaggctgaggcaggagaatctcttgaacctgggagacagaggttgcagtgagctgagattgtgccactgcactccagcctgggtgacagagcaggactccgtctcaaaaaaaaaaaaaaaattaattgttactgtgaggaagatgatagccacagagggaattttttaaataaacaacctttcaacaggaagacagagaagaaatataaaacacaatcacatgggaggctgagatgggaggatcccttgaggccaggagtttgagaccagcctggacaacatagtgagactccatctctacaaaaaacaaacaaagaaacaaaatgagccaggtggtggtgcaagcctatagtcttagctactcgggagttggaggcgggaggatcacttgaacccaagagtttgaggctgcaatgagctatgatcacatcactgcactccagcgcgggtgacaaagcaaggctctgtctctaaaccacacactcagacacatatgccatcacacacacacaatcacaaagcatcagtcaggaaggccagcaagagcagaacacagaatgttaggatttcaaggtagaagctcaacactcaattcaaggtaaacttgataagaatttgcaacaagaccaatgatctgctaggtattataatgaatagaaaagcaatatggggttctggctgtaaagcaactgagcttttttgaagaaacattaaatgcacacataaaacccctgaatgtatgtcagcagatgacgaatggctctaaagtggtatggaataaaaaggaaaaatcatgaaaaaagaaggcccaccaaattggaacatctacttggaaaacttgagaaagaacagttttggttgggagtcaagtgcagttaacaggattcagagtgagcaccgcgtgggcctctgaggtcagaaaccagagggaggccagagaaatgagatgagctacaaagtgcctcaggaaagagacagctgggaccagatgacacacacaccatggcctgtttttatgttttatgtcagttttaagagacactgggattttcctaaaacaatatatatttgatggaaaagtgctgtccatttcagtagcaaaatcactttattatattgctgggaaaacttgagaactgaaagttggaagacagcaggtggaggttataaatttgatattaatatggcaatatggagtgagatttatgggctctgatagaatgtgatcttttactgaaaactgtttttactttcttatatgtatctcagtgatttgaccctggttttatgtgaatattgttttaggggatgtagttttctgaatacaatttattttattcaaatgactgcttacggatagatagctatggactagtgcggctacagtttcaataaacagtccaataacattggaagataagttttgaaagactgtaagaagccaaagaataagtttagacaattacatatttggatataattgcttttgaagtcaatattcaattttaaactgtttaagataatatgtttttgcttttatctaaagtatatgagagacttacaccaagcactaaactgaaattgtggtatgcaacatgactctacttaacagagctaggaatactgtcagtttgcaaaggtaaaattacttcgactttttctctggaaaactgaaatgaattcctttggaaattaaagtcctcgttgctttacaaacatcatttcattatgcaggagatctttactcacaaacattcatatcacacaatgtcagaaacacgacaaggagagaaggcatggggctgtggtcaacccacaaaagacaggcttttatccccagctctaagaatttcccacagacattactaacccatcatgcccattcagtgcacacagagtgacaaggtttcaagtggcgctgcagtgagagactactatgacaacgaacacaaaagaacagacattttaaaacactaaaaattggcccggtatggtggctcatgcctgtaatcccaacacttcgggagaccaaggcaggtggatcacttgaggtcaggagttcgaaaccagcctggccatcatggtgaaaccctgtttctacataaaaaaaaaaaaaaaaaaaaattagccaggcatagtggcaggcacctgtaatcccagctacccaggaagccaaggcaggagaatcgcttgaacctgagaggtggaagttgcagtgagccgagatcacgctgttgcattctagcctgggtgacagagcaagattccatatcaaaaacaaacatacaaacaaacaaaaaacaaaccactaaaaattaaatgaaaattaagattaaaaaatattaaaaataaaaaataacagaaaaaaattaactgaaaattcgaaatgcatatgtgatgaaatgttaggcaggaagaatcagcaggagggacaaccgccaaaaatgaaagctgcaaaaagtaattttttctgtctattcaacccacaatcatcacaggctatatttgaaaagtaggtaggtgtacttacctacatatagctgtttgtaggttatatttgaaaagtaggtaaggtgtacttacctacatataactgcacttacatacagttatacatatacctacatctaatgtagttatggttttttaagagagtaaagaataaaatggaagactaccattactgacagtcttctaaaaggcagtcaccatagcatgattaatttattcctggtgttctcttggtcctcacatacttgattctcttgaaaccagtgaaaaactcgcatgtcttactgctagatctagaaaagtggttctcggccgggcgcggtggctcatgcctgtaatcccagcagtctgggaggccgaggcgggtggatcatgaggttaggagttcaagacaagcctggccaacacagtgaaacactgtctctaccaaaaatataaaaattcgctgggcagggtggtgtgtgcctgtagtcccagctactgaggaggctgaggcaggagaattccttgaacccaggaggtggaggttgcagtgagccgagatcatgccactgcactccagcttgggcaacagagtgagacttcatctcaaaaaaaaaaaaaaaagaaaaaaaaaaagaaaaagaaaagtggttctcacaatgcacaccttgcaccagaaccacctggagaactttgtaaaaatgcagctgcttgctcaccacccccagaacctctttctgcgatgatcagggtggggttttgggcactgatatttgtaagatctgcatcaagtgattctaacatgctgccagttaagaaacactggttaacaaggagacacatatgaaacctcatatatcagacatctaacctacccttatttcttttattctcaaatctccatctcagctttcttcttcatttagaatttggatataaaccgtaactattaaaattgactgaatatatctaaaaatcattgattcatttacttattgcacacatacataatccaccattcatctgatgagatcacagcatttagaagagtactccaaacacaggctgctaaatcctcatctgttgattgggtctttaaaacattactattgttcactttcatactgacaacaatgttatgctatagggtaagctcaaatttaattttctttctttacgctgttctttattgtattttttccattaaaataatatttgacagataatccttatacctgttgcttcaaataataaaaataacctaacttattttatgagactaatatcttgttacccaactggataagaacaatgtaagaaaagaaaattacaggccaattttacataaggctatagatataaaaatccttcgtaaatattatctaacataagaaagtgtacagttaaaaaagcagaatcaagcagggttcatcccaaggatttaagaatagtttaacatcagaaaatctatgtatgtagttcatcaggttaacagactagaggagaaacttttcatgctacttagatgctaggaaagcatgagtccaagcacagggtctctgtctctctgcctcaataattctccagattacgatcaaagatctgctaggtgcggtggctcacgcctgtaaacccagcactttgggaggccgaggtgggcagatcacctgaggtcaggagttcaagaccagcctggtcaacacggtgaaacccagtctctactaaaaatacaaaaattagccaggcatgagggcgggcacctgtaatcccagctgctcgggaagctgaggcaggagaatcatttgaacccgggaggcggaggttgcagcgagccgagattgcgccactgcactccagcctggtcaatgagagtgaaatgccatctcaaaataaataaataaataaataaataagattgaaaatgaactgcttcttctacagagcttctgtaggatgaaaaaaaggcgctgatatatgctttctgtaatttgactcaatgggtttttgaatccttcatataaatttataacatcatatttcatttattagaaggtacatatactgtttttttagtagcacatttttaccataaatggtgactgtaatcgataaaacagagtattcaatatatttctacaaatgtgtattcccttctccccagagaacatcatagtataaggtgatctccagttttcttctgattctatgatttaaaaatcatccctgttctgaagctcttaagtattttgtttcttttaggtgcattggaacaccaaaatcactcatctgtttctttattcttgcttcccgctactcaagaacataaaataaaagctctcaagtactaaaatactgggctttatataaactagagtttatataaatactgaaaaatatttcttcctagaggtcagactgtcttcagggtcatggctaacataagcatttgcttagataaaaagttgacatttttttctgtaaagaatcagagagtagtcctggcacagtactttgggaggctgaggcaggtggatcacctgaggtcaggagttcaagaccagcctggccaacgtggtaaaaccccatctctacaaaaatacaaaaattagctgggcatgatggtgggtgcctgtaatcccagctactcgggaggctgaggcaggtgaatcgcttgagcccgggaggcagaagttgcagtgagccaagatcgaaccacggaactccagcctgggcgacagagtgagactccgcctcaaaaaataagaagaatcagagagtaagtgttttggctttgtaaaccatacatcctctatcagaacggctcaactctaccactgcggtgtgaaagcagccacagacaatgcatatgagtagggttgcatttcaatacaactttacttacaaaacaggtggtgggctgcatttggtgcatggatcctagtttgctgacacctggcttagatgcagtgcacccactgaggaacaggtgtgtcctactctgaaagcagcatgagctagtctgactacttatttcaaatcaatactatattttttaaatggcccacattttcaatctagcaaatctacattggggtatgtgtatgggtgtgcccatatgtctgtatctgttaaatgtatcagtttgcttttaaaatgttgagacacagctcacataagcagaatatcagttcaaagcagttctggccaactcagtttaaaaaataacaacattggtgtgttactaatactaccatttctatacgtagcatgatttctcctctctggtttaataacagtcatccaagtgtgacttcaagtaatgatcacttccagtgagctcgagtttactgctaaggtgtgaggttggaaagaggaagacacaacttcatggagatcaaatcactcatgaccttaacagccaaataagtattaaatggctgcaaggtaacaggtaggcaaggtttgttgtagcatccaattatcacgttggtgcaaagacactcagtagacaacaagtatctaatggccaaggagctgaaacttatgaattggctgtttaaaaaatatatttgccataattccttctcacacctaagtttcccaaaaggaatgcataaagcaggtactaataatggaacaaaaataataaagtgcttgccagggtagttgattccttttgaaaactgatcacaagtaagagattttagttacagctttcttttgcttcaatgatttgctaagaatccataaggataacctattcagatactattatcacatgagacatgatatgtgaagcaaaaactgttacgggaatttctgcttgcatgtacactggctgttaggttacagaatagaaataggattcctctgcatatttaacattggttctccatttgtagccggacaaccagatagtactgatttcaaagtcactgttaaaaactctaaaaacttagatttcggtaacatgtcatcacattgcacgaaaactggacctgccactaggcttggagaagctctgatgtgctataaacagccctaaccatcaagatggtaaaggctagtgtgacccagagacttctgctctctgaatacccacccccaccttcacctattccctttataaatgctaacagagcccgggaactttctgttccagagtgagcctgcaacagcattctcttgggtgaaatgctcttcccgttggcggtgagaatccttcctccttattctaacccatgctccccacagaggaggaggaaccctgagcttctcttagggaccatggcagagggttggaggcatggaggcagctctgcatggccttttaatgcttagtatgctcagggtgccgcctttcaattaactagcacagctgtacttttttttttttttttttttgagacagaggctcgctcttgttgcctaggctggagcacagtggcgtgatcttggctcactgcaacctccgtctcctgggttcaagcgattctcctattctcctgcctcggcctcccgagtagctgggattacaggtgcccaccaacatacccagctaatttttgtatttttattagagatggggtttcaccatgttggccaggctggtctcgaactcctgacctcaagtgatccaccacctcggccttccaaagtgctgggattacaggcataagccaccacacaaggccacagcgatactttttgactaagtaaggcttccgtaagagttttcacacacatgccccaaatcctggattatatgagacaaaaataaataggccacgtgtgctaattgcgtacctctctcttctcacatttcggttttctagaaatgagaacgcaggccagacgcggtgactgacgcctgtaatcccagcactttgggaggccaaggcgggtggatcacaaggtcaggagatcgagaccatcctggccaacatgctgaaactccatctctactaaaaatacaaaaataagctgggcatggtggcgcatgcctgtatgcctgtaatctcagctactcgggaggatgtggcagaagaattgcttgaatcagggagttggaggtttcagtgagttgagatcatgccagtgtactccagcctgggtgacagagtgagactctctctcaaaaaaaaaaaaaaaaaaagagaaagagcatttcttgtatgtcttgtgacaagagttaacaaaaacagtcctgcttcttaactgttggtgacatttgtaaaggtcccatggttatgcttattcagtgggattccgtcttcttgcatgtctaatggtgttagaaggcctgaaactatgcctaaaactatggttttatcccagagagaaaaataaattcatatcaagaaaaatactaagatttatatataaagcaacaataatggcaataataattctatggtgtaattcccctgagaaaaactgaacggaacaatggttaatcttaaaatattctacagtagagctcaggacttagtataattgcctgctactagtctcgtgataacagtcgaagctagttttgtggagggtttttttgacacttcaaaattatcatgttgtcttcaaggtcacaaatcaaagtctcatctattagtgtataatagtaagtttacagttttaaaatattttatcattaagaaaatattaactgcaaatttaaaaaaagtactaagtggaagtaagcgaaaagacagatattgtgatgaaaagaaagaccttctttccctgcctttttgagtgtattgattcattcatttaactgatacttgttgagtgtctcctttgttgtggtccttctgtgaagcacctccattcaacagaccctttctttgggtaagtgtgtataagtttcaacaagggaaatccatgtatgcatgcaattgtagagactaggacacttggtgataaaggacttgaaaaggaaattaatatcccacttaaatcttctttttcaacatcagattttacaatatttgcgatctcgcactcactttttctaaaacaactcattggacaccgttgcctcatcacagccctaaaacagaactccctctttcggtcagtaacaccatcatcttcctagttttaaaaccttggagtctgttttttttcttgtaaatttgttgaagttccttgtagattctggatattagacttttgtcaggtgggtagattgcaaaaattatctcccattctgtaggttgcctgttcactctgattatagtttcttgtgctgtgcagaagctctttagttcaaccccatcaaaagaggacaaaggatatgaagagacacttctcaaaagaagacatttatgtgaccaacaaacgtataaacaaaagctcatcatcactggtcattagagaaatgcaaatcaaaaccacaatgagataccatcttacaccagtcagaatggcgattattaaaaagtcaggaaacaacagatgctggcaaagctgtggagaaaaaggaatgctcttacactgttggtgggagtgtaaattagttcagccattgtggaagacagtgtggcgattcctcaatcatctagaaccagaaataccatttgacctggtaatcccattactgggtatatgcccaaaggattataaatcattctactataaagacacatgcacacgtacgtttattgcagcagtatttacaatagcaaagaaccatcccaaatgcccatcaatgatagactggttaaagaaaatgtggcacatatacaccatggaatactatgcagccataaaaaaggatgagtttgtgtcctttgcagggacatggatgaaactggaaagccatcattctcagcaaactaacacaggaacagaaaaccaaacaatgcatgttctcactcataaatgggagttgaacaatgagaacacatggacacagggaggggaacttcacacaccagggcctgttgggcaatggggggtaaaggcagggagagcattagaacaaatacgtaatgcatgtggggcttataacctagatgatgggttgaggggtgcagcaaaccaccatggcaaatgtatacctatgtaacaaacctgcacgttctgcacatgtatcccagaacttaaaagtaaaatttttttaaaaagtataaacattcaaaaaaaaaaaaaaaaaccttagagtcgtcagttgcacccctttttcttctccctcatatgcagataatccccaaatcctaccaactgtcccttgaaatgtctcacaatctgttttttccattcaactaagatataaatgtgaggtatctttcaaaaacctgatagtaattgaaaaatattctaagaacttccacttgagctgatattgaagctgggtgactagatttgtttcctgtcacttcctcaactaatgatcacaaacttgctgccttaatataacagaaatttatctcctatcaaggggaggccagaagtctaacacgactgtgcttgctctgaagagtctatgggagaatatattctttgcctctttcagtttctggtggctgccctggcattcctggatttgggccacatcactgcaatctttgcctctgtcttcatatcttctcttctaaggacatttgttattggatttagggcccacccagataatccaggatgactgactcaaatcaagagccttaatttatctgcaaagacgctttttccacatatggtcatattcacaggttccaaggatgcagacacatgattttggaagccactattcaacccactacagtgaattagttcctccctttccctgaaatgaatgcacaagtctcctagccttttttgagtcaggcttgtcggggattactcgaataggaaattccctaaattgttctagccttggcaactctaagtgggagcagagagagtaaggctggtggtgaaagcagttttccttcctactgcaactttattcacctctgcattggctgagcttaacataatggaaggttaaatacagaaataaatgaatgaataagtgaataggcacaggaatgaaggagtaattaatgaatggactaaagaccaaagggatctcaagagtataaattcccatgagctcccctactgtgaccccagcctggagtaacggggtaaaaaaaaaagattccttttggtctactgagcctgtggaagagagaggaatgaaccaccatggctgtgaggtccagctacaaatgggaggtttgtcccttagaatcaaaggctggtggcagcttcccttccattcagaggcgagaaggagtccaagccattcagaggtaagaaggagtccaagtcacacagaagcaacgaagacccgtctatctctgaagtggtcagaagtaaaagctatttcctgtttggtttgtttttttaagagaaagactatgatgtcagaggtacaagacaccatgatcatattgcaacagtcctaagatggtgacacatgtcagacaatcagatcttctcaaattcttaaaattattatccaggatgaactgattttcacctaaacataaagatcaagaagaatcaagctgcttttgtgttcatatgaacaacaaaatgtctcaaaataagcaaaacctcaattgaaagagaggcttgagattacaacgtgaaaactgtttcttgccattattctgttttgggatattcttctctataatgcatttatcactaaagaacattcaatttttgagacagaagaataacataaaagattattccacaagataaagaaaatgccactttgacacagacctctccttttctgtttgtcattcccttgactttgtaaaaaaggaaaaccatgttccttggatttattaaaaaaaaaaagggaaaaaacattctgtgttgttgtgtatacgtttttaaattatcaatctgctcaggactgacaaacatgaaaagaattaatttaatgccaaaaaatctgagaaataatttatgtttaacaagtatgcccccttattcctgtgtgtgtactgtacaacagtgtcctactcttaagaaaagtgagtttagaaagatatttgctcatgtggtttttcaaaattgagtatgacatttcctggaagtgatggtgaaggtaatctctgtatgacaattaacccagtcatcagcaccatacacctgggcaaggggctcaagaatgaaaatctctacacttcccgcctctactccaggtggaaagtcacagggtgggagggcaggcttgagatccaagagaagacttttaacactttaaggtatataggcatagctcatagctgtcatgggcttggttccagaccaccataataaagggaatactgcaataaagtgagtcccatgaatgttttggtttcccagtgcatataaaagccatgtttatactatgccatagtcatattaagtgtacaagagcattatgtctcaaaaaagtacataccttaatttaaaactattttattgctaaaaatgctaatgatcatctgagcattcagcagcttttaattttttgctggtagagggtcttgcctcaacgctgatggctgctgactgaccagggcagtggttgctgaagattggggtgactatagtggttccatacaataaaacgaagacaaagttggccccatcatttgactcctcctttcatgaaagatttctctgtagcatatggtgctatttgattatattttactcacggtagaattttttcaaaattggagtcaatcctctcaaaccctgctgctgcctcatcaactaagtgtatgtaatattctaaatcctttgttgtcatctcaacaatgttcacaccatcttcaccaggagtagattccatctcaagaagccactttctttgttcacccataagatgcgattcctcacctgttcaagtttgattatgagattacagcaattcagtcacatcttcaggctccacttctcatgctatttctcttgctatttccaccatatctgcagtcacttcctccactgaagtcttgaagctctgaaagtcatccatgagggttgaaaccaactttttcaaagctcctgttaatgttgatattttgtctttcacccatgaatcatgaatcgttttaatgacatctagaatggtgaattctttccaaaaggtgtttttgtttgtttgtttgtttttgttttagtttgttttgtttttttgagacagaatctcgcactgttgcctgggctggagtgcagtggcatgatctcaactcactgcaacctccacgtcccaagttcaagtgattctcctgccctagcctcctgagtagctgggattacagtcgcccaccacacctggctaattttttcgtatttttagtagagacggggtttcactatgttggccagagtggtctcaaactcctgaccttgtgatccgcctgccctggcctcacaaagtgctgggattacaggcgtgaaccatcgtgcccggcctccaaaaggttttcaatgtattttgcccagatccgtcagaggaatcactttgaaaatgtgtttttaaattgcaattcttagaagtcaaaaaaacttcttgatccatgggctgcagaatgggtgttgtgtcagcagggatgaaaacaacattcatgtccttgtacatctccatcagagcgcttgggtgaccaggtacattctcagtgagtagttatattttgaaaggaacccttctttctgagcagtagttttcaacaatgggcttaaaacattgagtaaaccatggtgtaaacagatgtactgtaatcccgactttgttgttccctttatagagcacaggcagagtcaacgtggcctaattcttaagggtcttaggattttaatggtaaatgagcatttgctcccacttaaagtcaccagctgcattagcccctaacaagggagtcagcctatccttggaagctttgaagccaggaatcgatttttttttatccaactatgaaagtcctagatggcatctttttacaacagaaggctgtttcatctgcactgacaatctattgtttaatgtagccagatacatcaaacatttaagctagatcttctggataacttgctgcttcaccttgaactttcatacgatgtagacggcttctttccttaaatctcatgaaccaacctctgctaacttcaaacttttctcatgcaactttctcacctctctcagccttcacagaattgaagagagttagggccttgctctggattaggttttggcttaagggagtgttgtggctggtttgatctatccagaccagagtttttccatatcagcgataaggctgtttcactttcttaacattcacgtgttcactggagtagcacttttaatttccttcaagagctttcactttgcattcacaacttggataacttattggagcaagaggcctagtttttggcctatctcagctttcaacgtcttcctcactaagcttaatcatctctaacttctgatttgaagtaagatgcaattttcctttcacttaaacactttgagcccattgtaaggttattattaataattggtcttatttcaatattgttgtatctctgggattagggaggcccaagggtggggagagagatgtggtgatgggcggtcactggagcagttggaacacacacatttatcaagtacgttcacaatcttatttgggcatggtttttggtactgcaaacaattgcaacagtaacctcaaagatcactgatcacaggtcaccataacagatataataataatgaaaaagttaaatattgtgaaaattaccaaaatgttggccaggcgcagtgactcacacctgtaatcccagcactttgggaggccaaggcgggtggatcacgaggtcaggagattgagaccatcctggccaacacagtgaaaccctgtctctactaaaaatacaaaaaattagccgggcgtggtggcgcatgcctgtagtcccagctacttgggaggctgaggcaggagaatgacatgaacccgggaggcggagcttgcagtgagctgagatcgcaccactgcactctagcctgggcgacagagtaatactctgtttaaaaaaagaaaagaaaagaaaagaaaattaccaaaatgtaacagagacacacaaatgagcacaggctgctggagaaatggcactgatggagtggctcagggcagggttgccacaaaccttcaatctgtaaaaatcacaatatctgccaagtgcgatacgatagacggcaataaaaccaggtgtgcctggacaatttttatagtgattgctgtgagtaggtgtgggaggatgtggggtaaggacagggaggagctggtggaaacaaaccttttaaagtagctcaggctctgggaaaggcctcagtttgttttctctctagagttggctctggctgaagaggatggatggggtgatgaggaaagcttaatttaaatagagtcccacctggactgggatcactgctggcctgagttctctattagctggtgactcaagcataattagtgaggggcccacatgatgagcctcgattttgatccaggtctgaaccatgcattattttagtatctggacaaggaatacatgtttttttcatcagtctttattttatttggatctgttctatattgcgagttgattttgtctttccaactgagattggaaacccttagaattaactgttttttaccttaatgtggtattatcattttttctgtaaaacatgtagaaagggccagatagtaaataatttagcatgtgaggtccatatattcccttctgcaactactcaacttcatgctgttgtgacaacattttatttataggcactggaaattgaatttcatataattttcatgtatcacaaaatattattctttaaacaaagaattgcaaccttgtaaaaatgtaaaatacattcttagctcatgccctgtacaacagcagactgctggccacatttagtcagagggcctcagtgtgctgacctctcaccttgttttattctaaattatggaaaagcagatatataaaaacatgaaaagatgatgatgaaaatagaaaaaaggtggtaatgatgatgtctgtttagattaattacataagcagataaatacttgccatagtaaagagctatttggcatcataatgagtgacacaaaagcaagagaactgggttttattctaactttatctgtcaactattagcaatcatgggaaaaatctttcatttatttatttatttatttatttatttatttatttttgagacagagtctcactctgtcacccaggctggagtgcagcggcacaatcttggctcagtgaaacctccacctcccaggttcaagcgattctcctgcctcagcctcccgagtagctgggattacaggcatgcaccaccatgcctggctaatttttgtatttttagtagagacgaggtttctccatgttggccattctggtcttgaactcctgacctcaggtgatccaccaccctcggcctcccaaagtgctgggattacaggggtgagccattgcgcctggccaaatcttttaatttctttaatcccaatcttttacttctaagataatggaaatggattataatgtttctaagatcattttcactattgagattattccatccttgtttacaactgctatcttctcccgtgtataactagctaccaatttactattgttttacgtatagtatacacaattataagacgcaagatcctaaaataagaggtgattgttacaattgaaaatgaatactttgggcccggcgcagtggctcacacctgtaatcccagcactttgggaggccgaggctggtggatcactcgaagctaggagttcaagaccagcctggctaacgtggcaaaaccccgtctctactaaaaatacaaaaaaattagctgggcatggtggtgcatgcttgtaatcccagttacccaggaggctgaggcaggagaatcacttaaacccaggaggcagaggttgcagtgagctgagatcacaccactgcactccaacctaggtgagagagtgagactctgtctctaaaacaaaacaaaacaaacaaaaggaaattaatactttgctcttaatttgtccttaaagcacaggctgtttgtggagaagcacaatctttaggcctcttaatgatttgtagcatatcatcactaagcagacattttgaaaaggctaagaaagatgaaatcaaagtagaatataaattatacatcagataagtcccattatgaggagggaaaaaaatatttggatgcacatggcctacctcttgctgtcatcaaaagcacttgtcaggatgaggcccttgcagcaggtactagagttctactgatttagacttcaatggctggtgtgttgtattttatagtgtaaaataattacaattactttaaaaattgttatggtccagcacaggccctataaatggcataataaatagtctataaataataatgtgaacctcactggaactaaaccacattttcccatttttctaaagcagaacatgctaagaaatagaagttattaaaaattaaaggggatagctgggcgcgatggcttatgcctgttatcccagcactttgggaggccgaggcgggtggatcacctgaggtcaggagttaaagaccagcctggccaacatgacgaaaccccatgtctgctaaaagtacaaaaatcagttgagcgtggtggcgtgcacctgtaatcccagctactcatgagtctgaggcaggagaattgctggaactcaggaggcagtggctgcagtgagccaagatcacaccactgcactccagcctgagcgacagagcaagactccatctcaaataaaaaataaaaataaaataaaataaaataaaagaaaggcgatggtcaacccatacacatgcttttaagagccctgtgctatgttttgagctgataaatacgaggccaagaagaaattaacctcacaatgattatattttttagtataatggtttctatttaacttgagcatacttaaaacgaatgcatcacctagaagccacatcaccccgcttcaactcagactctgctgtttctgtcaagagaatcacatttcttccactcacaacacaaacatgctgtccttgacccaccctctgcgtcgtcttaatcaccaagccttgtggatccctcctttgaaagagctcttcagctgtcttctcccttttgttttcctgccaacttattcattgtcttcttcccagggcagaccacagttctgccacatacaggagacccaaaattgtctatgaaagggagaagtgaaggtagtcctcagatagtttatgtaccaggacaaactagctacatgtgggaagataatctacacaggtttaattcagctgatgggttgatttcagaagatttcagcccattttattattttgtttcttccttttttacttaaaaaacaaacatatattgagcatttattatgtaccaacaaaacaaaataaaataccaatcatctatgtattgagggtagaggatagaaaagtacattttctcccattcaagtactaaccagggccgaccttgcttagcttccaagatcagaggagatcaggcacgttcagggtggtatggtcatagacagagaagtacgtttcctaatattaagatattgggctgttctcagagtgcctacaattgggaagaaaagtggtacaaagaaaatgacaaaatcagaagcccccccacagctcagcacatactctattaccaaattagtgatacggatgtcaagtgctgtgggtcatgaagaaaaggggatggctgtgtttcaatgtcctttaacttttcatgcactcagacttggtctaattcaggccacacagaacaaagctagctgaatcttgctgtctcccacattctcaaatcaaacacaccttacataattatctcatgttcttctttttagaattatgtatgccactgtttccttttgttggcatgagtcagagtacatttaacacgacttatttacttctctactaaaaaaaatttttaatgtttcatgatcagaaggctatcaatattttatattaatcactgagtaaatatatcagtagagctatttaaaaatcctgctggcctgtgaaggaaaggcaatacgagagaaatgattaattattaactgataaggattaattactgaccatatattatgtgccagcgacagtgccaactgttttcatggacctcctcttctttaattcttgcaatggacattggtgataggtaggtctccttgttatgaagaatgtttttagaggtaactagagaactctggggagttaggctgggaatcatggaatagttcttttgcctaaatgagacatggggaaaaatactgaagagagattttcttgggggatgaaattagagatagggtaatcatctactcttcagagtcagaagatagatgcagaagacagagaaggggagaggagagaggaggaggaggatgaggagagagagagagaaaataagagagagaaaataagaataagagggaaaataagatagatactttgtagcaatttaaacgtatagagattatttctagagttttcagtaagctatgagttttcctgggagctgttttaatcatttcttttttggaaaatacaccatcacagaatgtttcttattttacatcattagacgtatgatggtatctcttccagagacatggcccccaaaagtctgtgatagagaaaaaccatatggtacttttggtgcagtcatttaaggaacatgaagaaagagccctactttgtattaatttggggtctacctggaaaggcccttcagagagaaacttgtgttactattgcctcagccaccctaaagccatgcacacacttagaactcagggtgcagtttttagacattattccaaatgaggatgttgcactctactttaaaaagtataataaaaagtgttatattttacaatcctagactctacaaagaatgataggatattctcagggatcgctttgcagcagagggaactggaccagccagagccctcttccttgcagttggacagcacaaagctccctgtacacactttttaaaacataagttgtacatgtgaaggtatttggtggctatcatatgaagtttaagatgtgtggctatttttcccttccatggatatggataggaaatcaaacatgggttttaagcatgtatttctcagctggtgtagtctgtgttcagaatacttaacatatctgtgctataaaactcccgtgtatatttgcatatgggacacaccacaggcacgaggacgtgaacggctccagcattcactgaccgtcttctgtgtgccaaacctcagtggggcactttaataatcctctcatttaattttcacagaaacctataaaataggtatctgaatcattacatattcaaatatttcagtgactcttcactgagcagcgacttttgccaggtgttcttgcagggctcacagcagacgcatttcagccctatttagcttacattctagtgggagagagaataaatagacaaacaagtgcgataagatgctatggaagggtaagtgcatgaggaactacacagcaggattggggacagagaacgtcagtgggaggacgcagcagctgagtgggggtcctatttttcagaataaggtcaggagatgtctcctgcacagattcgaaaaggtgagaagatgagccataagccattgagtaacttgactaaaatcaccctgagaatgcatttatatatttaaacagggcagcatttaatacctctagggattatgtaggacacttgtattgctttatctttctcaaatcttctccattgcatcaagtatccaatctgttcataaatttgtcttaattaatgccctcatatcagacatacctcatagccagcatcaggcgctcctgtcctcaactccatgtgggccctgatcaaccctggcgctttgcctcctgttctgggctttcctggtcacacagagggcatttactgatacccacaatgcttaatccatggtccctcatattaaagccatctgctgggcttagcagcagccagctccataaagtgtcctagtttccctgcttcactccccggccctcccgcctctgtcctgggactaggactgtaacggagtaagagcacctgagccctctgcctcaggctctgcttcctggagagcccaggctcttatattatatttcaaaatcccagaggagaaggagacctgtcttcatttttcatctctcccagtgtcacaaatagagttattctcctgagggttaaccagaagttattccaattttgggtccaattgtgaactgatggctgtaagacatacagtaatgactttttttttttttccaaaaaacctagatgcgagctagtgtgtggctggttgtcaagcagaaaactggctgataataagggagggagctgggagcttggaacaggggatcgatgaaataaatcggctgaaaatgcagaatgaaataaaggcccgttctcaatgaatctgtgctgagtcccccaaacctccactcacaccccagttgcagtcagtgtgtgtctcttccttcgaagcacgcgtcagtctcagggactccatctctggagcctttcccgggcctgcctctcccggtccttccctgtagaaacggtctctcctaccccagacactcattctcgctccatgtttggaacatgcttactctgaagttagatatcctggggcataagttatactgtggcgtgtttggaaactatgcaagcatgaaatatacacagtcacgagacagaagaggaggcacgaaaaaccaccccgacacccagcttttcctgacgggaactaaatacaatgcgtatcggactcgagaaattccgaggaatggaaaggaaaatcgccggtagcatccaccgcgcatcagacacgagtcacactgacagccagaaaaaaatggaaatccccttcctagaaagaaaagaactattttatatcccaaactacaaaattaaaacaacaacaacaacaaaacaagtctgccagttgaggcgtttgattgtagaaggcaggccactgtgataagcatttgactctcgtcaaaaaaaattcctgtttcccttgaaatctttgccctatttcccctactattaacttggccatagtcactttcctctaagctttcaaaatttcctagaggcttgcgattattttatatatctaaacaatatatttaagacttttaaaagacctgttttttgtttatatataaataaaaattatatactatatataaaatatataaatatataaaatatataatatatataaaagaaatatatattatatgtaaaatataatatataaaatatatatgtaaaatataatatataaaatatatattatatgtaaaatatatataaaatatatattatatgtaaaatataatatataatatatattatatgtaaaatataatatataatatatattatatgtaaaatataatatataatatatattatatgtaaaatataatatatattatatataatatataatatatattatatataatatataatatatattatatgtaaaatataatatatattatatataatatataatatataatatatattatatgtaaaatatataatatatattatatattatatattacatgtaaaatattatatataaaatatatattacatgtaaaatattatatataaaatatatattatatgtaaaatattatatataaaatatatattatatgtaaaatattatatataaaatatatattatatgtaaaatattatatataaaatatatattatatgtaaaatatattatatgtaaaatatatattatatgtaaaatatattatatgtaaaatatatattatatgtaaaatatatattatgtaaaatatatattatatataaaatatatattatgtaaaatatatattgtatgtaaaatatatattacatataatatgtgtaatatataaatatatattacatataaaatgtataataaaatatataatatataaaatgtacaatatatataaaatatataatatataaaatgtacaatatataaaatgtactatatataaaatatataatatatataaaatatataatatataaaatgtataataaataaaatgtataagatatataaaatgtataatatataaaatgtataatatataaaatatataaaatatatataaaatgtaaaatataaaatatataatatataatatataatatatattataaaatataaaatataaaatataatataatatattataggtactttatatataatatataatttattatattatatactttatatataatatattatatattatatataaagtatataatataataaattatatattatatataaagtatatacattatatataaagtatatatgatatattatatataaagtatatatattatatataaagtatatattatatataatatatataaaaatatacaatacatatataatataaaatatatgtgtgtgtgtatatatgtatacatttttttctgagacagagtctcactctgtttcccaggctagagtggagtggcttgatctctgctgactgcaacctcctcctcctgggttcaagttattctcatgcctcagcctcccagtagctgggattacatgtgcgagccatcacacctggctaatttttgtattttttgtagagacggggtttcatcatgttgggcaggctggtcacaactcctgaccccacgttatctgcctgcctcggcctcccaaagtgctgggattacaggcgtgagccactgtgcctggcctgtttatgaatatattctcatcagcacctgtcaactgctgaaactatggaaaatgggctaggagctctgctcaacactgcggctatggcaataagaggtatcatggcagtcctcacaaatctccctcttgttgaatggggatctgatgagagactaacatttagaagaggctctgtccgttttgacacaggaggaacttttagtatttcacgtgggaccccaaggccacaatggcatggaaatgactgtcagcattcacctaactgctctgaggaaatgtgcccgtggtgacataattagtaaagtgagacacaggatcttgacctcgaactcatgtcctatgatcctcccctcactggcatcccactcataagtactggggccatgcaggatgttaccagatgttccatgggtgccgttatgtaacccatgactttgaccttcactcaacactgtaggacctgagacttacattcccaggtagtgaaagactctcagaaggcaggagtatcagaggatgtgctgaaacctacatatcttcagccattgcttttcctgttcattagctaccaaatataaatggtttaatatttttgtgctgaaagacacatatcttatgtcattgcttttcctgtctcattagttaccaaacaaatataaatgttttaacatttttgctttcttttaagccatattgattattacactgcttcttctgggtacttaaactatattactgaatatctcccatcatccttgattttgagattattgtctttccattttttgttttttggatgccaataattttttactcatcgttacttttctgtttttgacacagagtcttgctatgttgtccagacggaagtacagtggcacaatgacagctcactgaagcctcgaccttctgggcttaagcaatcccttcaccccagccacccaagtagttgtgactacaggcgcatgccgtcacacccagctaattttttaaatgttttgtagagacaaagcctcactatgttgcccaggctggtctcaaactcctgagctcaagtgatcctttctccttcgcatttcaaagtgttaggattacaggcgtgagccaccatgcccggctttattttcacttttcttatgaaaaagtgtgtagtgtcatccaagattaatatatccctacattaagatcctattattttcaacatgtatgtgattttgaaaatattcttttattttctactattattttttctattctcctatcacagttggatgtttagaagccagtatctgtagaatattttaagttttatagactaattgatctcctcaaacactgataaagatccctccctccttcttaaaaaatacccactggaaaccattgaaatctttcatattcaattcaaaatgtcaagtctattaaaatttaattcttattgaaatatttgatttgccatttttcagaagtattcatacttcttgactagaactgctcatttgcaatctagagacctattctgagcatcaggtccttttgataaaggatatattgaccatcacaatggacgcaaatgattcaatgcctgaatcctatatgtagtcccgaccttccctcttgcacagagactctttttcaagccacgtagttgcctgaaccttcatttctgatgcaggtgtgcacagtggtagtcatagaggaggaaactgtgaagcagcccaaatcccactggtgtcccccactccagccacggcggccccattcctcctgtctggaccctgctaggtgaggacagcctcaggctcctgtgaagggctcatgttcctgaccatcccagagctctcaccactgccctccatggcccctccagggaaacacctctccaaattttgccatttcatggcctacatcatgactattttaagcaagactaaaggctgataatgcaaatatggaaacatatttgcattttttttttttttttgagacagagcctcgttgtgtcacccaggctggagtgcagtggcgcgatctcagctcactgcaagctcagcctcctgggttcacgctgttctcctgcctcggcctcttgagtaactgagactacaggtgcccgccaccaagcctggctaattttttttttcttttgtatttttagtagagacagggttacaccgtgttagccaggatggtcttgatctactgacctcatgatctgcccgcctcagcctcccaaagtgctgggattacaggcgggagccaccacgcccggcccatatttgcattttaaaaagagctttagttaagagtgaccgaagagagaatgtgaagccccctggcagttgctaggatggcatgtggggtggacaggccttgtaaggtcccctaaattcccccgtgtagacagtgacacactcccatatatgcagtatggcgctcaatgagggagtgggtgggctcattttatgcaaaagggatgtgataacagctaagccatcccatggccgacacttggaggtgttctcttgaagggtgggtcagcctcttcctctctgctggccagtttcttgtgtcaaagagccatggattctctacacagtcggctggagggagctatgaagctagtggctcggaatggggaaagagtaaatgctccaaatcaaaatgaaacgtatttgctgattacaaccgatgagttgctccagtcggctcgatgtcaaaagtagaaagaaataaatttttaaaatgtaatcttctattgaagtataatgtatatacagaaacatttgtaaaccatgtttcctgttaataaaatttcaaaatggaaactcactcatataaccaggaactgaatcaagaaataaaatgctttaagcgccccagaaacctttcttagtggcccctcccaatcaccatcccctttcatcccagagccgaccactgtcctgattttcaacactaaggatttattttttcttccttttgaaatcgcacagtacgaattattttgtgtttgaattttctcatgcaacactgagtgagatttactttatagtaggatcagctactaatttgcaggggccattacgaaatgaaaatgcaaggccattgttgaaaaatcaagaattccaagatagtgacagcagcacattaaaccaagcccagggtccttttagtgcagggccctctgcaactcaaaggtggcagaccccaaagccagccttgtagagaatcccaaagcatgactatactatatttgtccatcttactactgatgaacatatttgtgagatttccattctttggtgctcctacaaacattcttgcacctctttggtgaagatatggatgcatttctaataggtatatagttgtgaatggaattgaaaggtcctaggcagacagatgttcggctttggtagatgcaagcacaaatttgttgtatcaatttacacttctacagtcagtctttgagagttccagtggctcctcatccttaccaccatttcatgtcttatctttttcagcctaggcaggaatttaaagtgccgattcctaccctctgctccaaaccttatatcattagcatttctctccagattctatattttcacagctccccaagcgattctccgttaagttaggaagcactgctaattaactgagctaggaagctatgagaacatcacatgcaatgttctcattgcaccagagtcaaatatgggttgaaggactaagaatattgagctcacacttttaccctctaggtaaatcagcaaatgattaccaagtgtatgggaagtggccaggacagggacattctgtatggtcattatgacatttctgccttttttttttttttttttttgagatggagtcttgctctgttgcccaggctgggtggagtacagtggtgcaatcttggctcactgcaacctccgccttccaggttcaagcaattctcctgcctcagtctcccgagtagctgggactataggcgtgagccaccacaccagctaactttttgtattttgagtagagacgaggtttcaccgtgttaaccaggatggtctcgatctcctgacctcatgatctgcccacctcagactcccaaagtgctgggattacatgtgtgagccaccatgcccagcccattatgatatttctatgaaattgaagggagtagtgtcaaagggtttataaaagagcattatggacttttttaatgttagaaacttgatactctgaaaacacactgaaacttatcgttatagagtctttttcattttcaaccttctaatttttattttagataatcaaagtaaaatcacaccattttacataattacagtgtattttaaagcttttcttttttgtttcagatctgtaggacatccacttagcaacagcatgccattttcttctattttctacactttaggcatatgcacattagaagtagatgaaaatgcacagaataaaggaaattctgtcaaaatatatggttcctcagcaaagaagcttggagtctgatactatgtgaaatataaacagtaacttggggattcagatgtatcatatttatgctcttttcatgtttaattttagaaaaacacattcatggcaatggtatatgtagatactgctatttctaaaatatcttattaaaatgataatagacaatgaatttcaatattttatattttcagagcaaaaatcattcacaaaacaaaaattccttatgccacatggcatatgtgtatggtgcatgtgttccatgttcgataacatgtgctaagatatataataaaaatttctatttctggtcatcctcacataattatattttgaacatgcatatttagagcgtaaatgtaaagctctatggcactgagagatatgatcatatttatcttcattttaggaaatgtaagtatatgggtaatttatataacctcagctatctacatctctgcatcgttatttttcccccacagtattagggtattcttctccgcaagtgggatatgagggcattaccttatacatgtccccggaaagacagtgcggtcacagccaccctgcctggggaggagcaccggcccacgaggtggggtgggaggtttggctgctcctggcttggtctccaccggccatgggaagccagcttttcctacaaggaggcccacttatattcctcaagcccagtgcatcatgagaagaacgcacttcctgggcactacctccccttcccctgcttttcatttccattgaagagtcggtggtgacccgggaaaaggcaagaaacttaatctgtgcttccaagacagccggaaagagcagcggcccttgttctgaaaaagcacccaagaacccctttagattccgccagcacgttcagggttataaggacgtgggagattgtttccccaacacctgattagttaactcaaacagtacctccagaaaactagttatgtggggtttgcttttttcagtttctaagctttcatagttaaagacatattttcatgtaaaaatgaaacctttaaactgcacttgtagaacctacaaagggtagaaaggagggcctcaccaatgcctctgcacatcttcagccctctaccccatactcagggttcccacagaattcgaagaccttgaaacaagtttccctggaaaacagatgttggagggacacatgtcatcctaatgccccctgtgtggagacgcatcagcagccagggaactgctgaaaacagatgtggaagttggaatccaatccgggtttgccaggggagtaggaagttccgccctgccaccctttttctttgcgggagaggtggtacacagagtgggaattatgtgtaaactacaagcgtcggaaaaatgagaggctaatgcaagaatatggacctgtccggtgagtgcagtgtgtttcctgagtggggctgagtggtttagggctgcgaccaccacagtcctcctcacacacgaccagattccatgaatcccactgcaaatatgcattccctcctgcactcggtaaggggccaggacaaatgggaagagcgttgcaaatacgtacaatccccatgggtctgatggtcagcaactcagagcaatggaaatgatacttaatcgtctctaagaaaactggaattcaacaataaggttacatttcacagactatacacctacagcaactcattagagcctcctgacactggggtgggtggaaaggactaagcatgattgtcccgctttacaaaaacattggactcagaaagggcaactgaaaacggacaacacagaagtcgtggctcctttgctcccgatggcaaacccactagtgtccagaggttctggagcatcttctaggcctttctcttttctgatgctgatagggaatgcagtggccagctaggacaggcaccatggcagagtgggaaactgaaactgccaccactgcccatccccccacctgagttttaaaatttaaaactgttggtgggcaaatgatgaaccacccggatagctagcagattattcagaatagctatatagagccttggtaatcacctcaattctagaatagaaacagcaaatataaaattaaacacaatacaaaatccaaacaaaacatgtccattcctgtgctttggaacttcagctcaacagctcaccttgaattatgtaaataacagcatcacctgttattcctgacttcctttttgtttgtactttttattctattttattatgttgtcattttcccacaggtgaaagggcatcgtttctgatgtcaaagcagtaaacactttgatcacagcaacggcatgggggcggggcgggggcgtgcggtgcaagaatcaggcaggtggtgcggccctccagggaggggaggctgcggcaggcagtgagccgcctccccagcccaggcggcagcttccctccgggccttcctgcaggaaagcagcactcccacaatgagctcatcctctgaccattctagtcagcttctcatcaattatcccagttttgggggctctgagtttgggagttaaactgcataaagatcaaactcaggcttctcaagtttcacttactgtgggagagagtacagtcactggagtcaaatatgttttaactgtttcctctcatttccatatcaaagcaaaatgatgtgaagatggatgaagaaggttgaattaagatacaactccacggctgggcgcggtggctcacgcttgtaatcccagcactttgggaggccgaggtgggtggatcacttgaggtcaggagttcgagaccagcctggccaacatggtaaaaccccatctctactaaaaaatacaaaaattagctgggtgtggtggcgggtgcttgtaatcctagctactcaggaggctgaggcatgataatcgcttgaatccgggaggtggaggttgcagtgagccaagatcatgccacagcactccagcctgggcgacaaagtgagactctgactcaaagaaaacaaaaaacaacaacaacaacaaaaaaaaaccaaaaaaactccaggtaggtattttttctttaaaacttacctttacatatagataaagataaagaaaggcagaaatagaggtaagagagataataacatttttgttagagaatagaattgaataaaataaatttcctaaactttggtttaatcatgttttagaaaggaaacatctgaggccaggcatggtggctcatgcctgtcatcctagcactttgggaggccaaggtgggcacatcacttgaggtcaggagtttgagactagcctggccaacatggtgataccccatctctactaaaaatacaaaaattagccaggcaaggtggtgtctgtaatcccagctactcaggaggcagaggcttgagcccaggaggctgaggttgcagtgagctgagatagcgccactgcactccagcctgggtgacagagcaagactctgacaaagggaagggaagggaagggaaggtggggaggggaggggagggcagaaacatctgaaacacaacactgcagactggttacctatatctacctgtgagtagtaactagaaaacacagacacagcatgcagcaaatcataaaatgattttttattaatttatttttatttttattttttttattaagacagagtctcactctgtcgcccaggccagagcgcagtggtgagaactcagctcgctgctgaaacttccaccccttggattcaagcaattttcctgcctcagcctcccaagtagctgggattacagccgcgcgccaccacgcccagccaatttttgtatttttggtagagacggggtttcactatgtcggccaggctggtctcaaactcctgacctcaagtgatccgcccatcttggcctcccaaggtgctgggattacaggcatgagccactgcgcccagcctaaaatgattttctttttgttactcttgaaaatttatgtgattttctttttgttactcttgaaaatgaagtggggtgggcggtaaaatataacattaaacataacatgaaactaactgtcaactaacatgaaactaactaacttacttggttggttatttctggttgtacagccttctagggtttatttaccacgtggacacagtgcccctatatatcactaatgtattttagagtttcatgaaaacacactgatgaaagaaacagctcatgtttttatgtacattagcatgtttctaatgcagtaaatttttgtgaagatgtgtcgtgtcaactaattcaaccatttaagtaggtctatcagtttatatagaatgaaaatgaagtttcaaggcctatgacaatacacagcagaccactgctatgagctgaatttcattttgcagcttagtttcattttaagattctactatgacatatttagctagagaaagatattaaatccaactcttatgtatttaatataattcgactcaagtgcttcaggccttcacctcactttatgtaaccttaaaatgatggatatgcaacttttgatgtagggctctattttaactgtgagattacgatacgaatggtgattcttttatcaagtaatttatttttaaattctgctttctgtcatttctaattttgttgaaatagtaaatccacttagcagagagtactcatgatttagctcataatttgattcaatgaaattagttcttgtacctcttctgaatctgtagtagtcaatgagtctagacgggttatccatgtgtagatctatatatgaaatgtacatttattgtctacacaaagggtcagcaaacattttatatgagaatcaaataatgaatatatttaaattttgcaggtcatgaggtctctgtcacaaccacccaactctaccattgcagcaaagaatagcactagacacataaatgaatgggctgactgtgttccaataaaactttatttacaaaaaaaaaaaaaatgctatctgtagtttatagacccctggtctaaacttttgctattcatgaacgtagttctagacctactgcatcttcattaactagaagcttattataaatgcatttaaccatgagaaagctgatttgaaagaaagaagaaaaactaaaaaaaaaaaaaaaaagaaatgcatattctcaggcttcaccccggacctactgaatctgaacctgcttcttcaagatgcccaaggcattcaatctgcttcttcactgcccagggcatctgagtgaacatcagcgtatgggaagtgctagtttaaaccacagtgactggcttctatctgggttcacagagcagataagggaggtttcatttgtcattttagctgtctattcaacaataagaatgtctgggccgggtgcggtggctcagcctgtaatcccagcactttgggaggccgaggcgggcagatcacgaggtcaggagatagagaccatcctggctaacacagtgaaaccccgtctctactaaaaatacaaaaaaattagccaggcgtggtggcgggcccctgtagtcccagctgctcgggaggctgaggcaggagaatggcgtgaacccgggaggcggagcttgcagtgggccaagattgcaccactgcactccagcctgggtgacagagcgagactctgtctcaaaaaaaaaaaaaaaaaaagaatgtctgagccctcctgtagaacaacattctctgaattaagtcattgggatatcataagaaaaaatgaggataactgttcatataatttttaaaaattttgaaaatataaactgaagttaagaattactgatattcactgtgcaggtggacactggctccatcattcagactctatgtcccaagtttgaggagggaagaaaggagttttcatcacacaaggaggtggcaatggtacctccatcaatgctaacctgtttcctctccaaatgtggggatataaaataatggtttgcatttgcaaaactgagtgaaatgctctaggtttaacaaatgaatcttctccaaacaagtgctttaaagtatttcctgcaaagaagctgcgaaaataaaatgatactaataatataagcacaactgaacagcaagaaaataagacagctatgctctaattcatgtatattctattcacatatcacattatgtaaaaaataagaattaaatttttaacttaaaatgataaatgatgtgatacacaaatagaacatgcatgaattcgacgaaatacagatttactgataaatctcaatctgatagaattctttgaggtttttcattaataatttcttgaaaccataattaaaatctaagcattgaaaacatgaaaacaaacttctccaaagtttgtgatgttggccttggtgctttaaaatcatcaagaatatttaataggctgggtgcagtggctcacgcctgtaatcccagcactataggaggccgaggcgggcggatcatctgaggtcaggagtttgagaccagcctgaccaacacagagaaaccccgtctctactaacaatacaaaattagccaggcatggtggcacgtgcctataatcccagctactcaggaaggctgaggcaggagaatcacttgaacccgggaggtggaggttgcggtgagccgagatcgcgccactgcactctagcctgggcaacaagagcgaaacttgttctcaaaaataaaataaaataacataaaataacataaaataaaataaaataataaaataaaaaaaaataaaataaaatgaatatttaataataaaattctagaagtctcttttgagtttttcttgtttcatttatttagtttcttaatcgtgaaagaagaaaagctatatactttagggaaattttctccgtattgcaacaaaatgactgaaatcatacaaagaaaatactgtggcaataaattgggatatgtttgcttgtcaaaaacttctgaagaaagatgtgtagaaattattactgatgaagcaaagaagcaaatgttagaacaaatacattccaggtttgacacacgtgtcagctgatggtattttatatattctctcccaataatgaagtacctgaaaaacttatttttcataaagcattaagttgtactgtaagagatgtggtctcaacatagtttcttgcattaaaaactattatttgatggttgtgttggattactgtagcactgatggagtaactatcttgatttgagaaaaagactcaagctgaatggttacagaggtagtactggaagagtattcactcaatgtatgacttacaaaaaagatgctgagcaaagaaattaaagccagaagtaaaaagtgctacaagtgttactgatgtagttaatttgataaaaacaaaccttcaacaatgcagtaggctttcctctgctagttggaataaaatagggagggactataaatcctatttgtaccacagaatttcactccttaattcacagtataaacgttgaaagtactgtgaaagagttactcatttttcctttcagcaagttagtgaaacttttcaaggtcgtcatgtatgattgtataagagatgcattcaacaatgttaggggtcaccacttatattattcctaatgtattaatacaaatatctttactctgaaaacattttccagcagatagcaatgtgtcttgaaagaagtttttaaaaatttgcataaaagtgctacttggacttgtgtagagctttgatatcaaatgactgccggtagaaatgcaatctagcagatattttagaaaagtaacaaaaacagttattttgtcccattaaggtcgatgcgatttttaccagatatagaaatatcttttttataaaaggaagttgaactctggagcaaacactttgaagacagatgtttagaatatttccactgttttatgaatttgttttaaaaaataattgtgtcagttatgaaaatgtatatcctcaccctttaaggagcttggaaatagaagtgcatattctgtttaaaaatctttcaaataaaatgtcttagttttgaacatatggtttaaaaatgcaataatggcccaccttctaaaactgcttgacatcaatggagaaatttattaaatttcaagaaaaatttgaccatttgcctaattatcagatgtgatttgaacattaatatcatgttccagtaggcagtagacaatgtgtccttccatttgggggtattatttttgctcattaactccctccaatatcagcatatgacagctgaatgtcagcgcttaccttctacccattcatgttaacagcttctgcagccctcctagctagcatcgaggtcattttcttactttccaacacttctgttgtaatgcggtacaacctcaatgttctcacaacacattcattcatccaaactggcctcaatctttttctcctcacaccatacggtcttgccatcctctcaactttgcccacctctcctggggttgcaccatgtaccagtagttttcaatctctgggagttgctcttgcatccaaaaccaactgaattagcctttctaggagtggggcatggggaactatatttacattttttccggttgattttcacacattgtgacagttgagaaccactggtgtaggcctgtcattatcaataactgcccataatcttcataatcctccagcatcctttgatcatcacttcataccctcagctcaatccctttagtaaccccacttgaataatttttcaactctactagaaccttcaatccattaaccctcctaacttttcattattcattactccctcctgtccttagctccctccttgcccagcttagacttcatgcttcctcaatcccattgctggatttcttttttagagtacttactgacaaagtctctcccaaacatgggaaaataaagttcattaccctattctgtgcctgcctcaagaagctgactttgggcagacaaaaatttacatccttactaatttaaatgtaatttaaacataagaacctaaacttcaagtttatttccataaaaactgtacttggatatatgatcggcaagaaaataaaattaaaagaaataagagaactacggaaataaaaaagatatattccaaggtaaaaagacgaagaacccaacaaagtaaccacgaagtcagagacgcagagatgtggggtatctgagggtcaccgaagaaaagttttaagaatgaagaatggacaaaacaactcaattttgaaaacagagagaaatggagaccgatgatcacacaaacactgtatatgaatgtacacagcagctccaatcgcaactgccaaaaacgagagcccagatgtcccttattgagtaaatgctcaaatacactgtggtgccagccacacaacagtcaccactgagcaacagagagggatgaacaacgggcgcacagcatctcaaaggcattgccctgaataaagggagcgccttaaaggttacctactgcatggttccattcatccagcattctcagacagacagactggagggatggaggccaggtcaggtggtgctgggagatgacgacacagccacagctgcagggatttgcagtgagggaagagttttgaatcctggttatgccggtagccacagtaatttctacaggtgttaacattcaagtgtacatcaaaaggaaagaagtcaacacaactgtaagacaatttaaaagttttaaaaaatagtgttggttgagagaatgcattcaataaatgtaaacttccctcttgagagttttgttaaagaaactgcagaactcttcagagaatatagggctaatgaaaatgacagcttccaattatctgtaatttttttaatgttttcaaagcacttattattatttattgctaagaagcttaaaataaaatgtagtaagaatagaaaccaaaagaagccccatacatttagtaatcagtatatatttgaaagtacacgcattcgaggagcagctggggtctgaggcctctcacttagactcatggggtcagaacaggtctcgtatcagctctccagctcccaacttctattattctgccgtctcccttgtgtgactaaagcaatgagatgatttattcattcaaatcctatgaaaatcagttcttattttacagtattctgagaatgttatcttacttcctagctttttaaaaggctttcttcctgagatgctatttttcaaaatcagatttatttctgaaagagtccctgttctctttgccaacctccttgtagctggcaaacttcccttttttccttcaggatgaaagaggccttaatccatcttacacaatattcagtgtacagcagccctggtcttggcatcgcatcacactcagtaaatgacacagagcttcccaagatttcagactctggggttccacaacggagacgagagcaaaaggatgtagtcatttaatctatgctatgcgttcagaaaagctcactgagtttgggactcatgggctgaagacgaagaggagccatgcggccggatttaagccttgggggaatgctggagaaaaggtggatgctgtctcagatctaatgtggtcctaacagagttgggaagacagatgtctgtctgtgccgtgaacataacactctgtcagggatttaccctgggaaaagtctgtctttctctattcaaggcactgttgattcatttggggaacagaattctacattccagtcaatgaatctacaagacaattgggaaaggatcacattagtttttaaatagaatttattttccatagtgttatttcacagcaaactctgttccatttcccgcgctctgcctccggggtcttagaacaatcacttcttcagaggaggaccttgccaaccagtacactagatgccaggcggaacttgcctttacagcagaaaatgaagtgggctactgtgatctatcgtcagagtttctcaatccattctcaagataccccgagggagatttcactcttgctacaaagcgggaaataacaacaataacaatcaccgctgtaatagaacacattatgagggggcattcttttaaaagcctttaaaatgctaccaggagagttttatggctgctccaagtcagaacttggccgtgtttaaaagcacggggagagggtgttccggaggcggaccccaggggggccacagcgcctccccttcccctgggggctctgctagttttttggctgataggatcacagccaagttcatgggcgccccgaggaaacactaggcacagcttgtgctgttcaaaacaatcttaccataaaagtgacttttctttttaatctaaaaagcactttttgtaatgagaggttgaagctgagatgccagtgagttctgctagtttctgtttacttccttcaatttcgtattgttcggtgtgtgactgaaaattgggtatcaaaggtaagtattagggtcttctcctgggtccctaaacatgaggcttcgaggtcttacaggcttgaataattcttcagaaactacagcaagtttgtttttagagtgtcttccaagtaccagccctttgtctaacatctctacaccctaaacattcctcccaacctttgaaggactccaaattgtggccagactacaggggatttgtgaagtgcatgcatatctacagggggtaagacaaatacatcttcattctgacatcatctaggtttttcagaggtaaaagatgtagagtgtctgagccacctatggagaaagcagttagatctaattatagctcttgggatagaggagctgctgtctcaagaaaagcaaatatgtaggttaagagccctgttcgaccttcagagatcatgctgttgcacgcttgttagagtgatgcccttgtttagtccttacctagacatctcacaaatattcctgtgaagttttcttggaagtggatggtttacgaaattcccaatacatttcctttgcatcctgatggactctctgggtgacctcttaactataacctttcaagaagcaaattttttgaagtttgcaatcaggcaaacaatcctcactcttcttataaattctcatcttccctaagtgcttatatttgaatattcttaaaataatgggctgggtacaggggctcatgcctataatcccagtgctttgggaggttgaggtgggaggatctcttgaaccccagaagttagaggtcagtctaggcaatgtggtaaaaccctgcctctacaaaaaatctttggaccagccacagtggttcacacctggtatcccagcacttagagagaccaaagcaagaggatcgcttgaggccaggtgtttgaaatcagcctgggtaacacagctagactccacctcaaccaaaaaaaaaaataaataagattagttgggcatggtggtgtgtttacttcctccaattccttttgttcggtgtatgactgaaaattgggtatcacaggtaagaactaggggcattttgctgggtccctaaacatgaggctttgaggtcttacaggcttgaataattcttcagaaactacagcaagtttgttttcagaaaccaaagaggctgaggtgggaggatctactcaagaggctgaggcaggaggatctcctgagcgcatgagttagaggatgcagtgagctatgactgtgccactgcactccagccttggtgacagagcaatatcctatctctaaacaataaaaaaaattaaaaattttaagttaaaaattaatggtcattttgtgaaattggtcagagtttaaggttttagagaatgtacctggtggcagaaaccaatatttagttgttttatgagacggagtctcactctatcacccaggctggagtgcagtggtgcaatcttgcctcactgcaacctctgccacccaggtttaaccaattctcctgccttggcctcccgagtagctgggataacaggcacctgccaccacgcccggctaatttttgtatttttagtagagatggggtttcaccatcttggccaggctgatcttgaactcctgacctcgtgatccacctgtctcagtctcccaaagtgctgggattacaggcgtgagccaccgcacccagcccatcaatattttgttttaaaggtgcttaaaaaagacatatttatacattccccttttatagttaaatcaaaagcggcttttggtatgctctttcaaggcaaaggtatagataatcccagccatcaggattttactgagtgattgaaagtagaggggtaccatagaatactaacatatcagtaattagcttagccagttaaagcacagaattgaggagggctggttatctgttcacacgccatgaagttgagttagctttgttctcatcaggaaacaaagtatcctatagatgcctaatgttagaaacaacaataatatagtttaaatagacactgggctcaaaccttaaacactgtctgtgccttcactatgttatcactacgttactgttgcaggaacagagacagactagaggagcgaccttgggcaagttcttcatcttttctgagcctcagtttctacatgtaaaatatggaccagtcagtagtatccacctcagaaagtgtctctgaaaactaaataataggttctttacacacactgcttggtgcctggcaaataataactcaacaaatataagatgataacaatgatcccatccagtcccagccacaaagtgagcaagaaataatgattcagagttttaaaggagctgtgtctttcttattctgttactctgtggattctgagacttgctcaagatgcttcatgcctttctccttaaacctatctgtgttctcctcgacggatctgggtaagtcatctctccactgccaaacattttggcacacgatttgtcacaaagaagaacacaaaattatttttgaatgaacaaacatatgaagtaaaaagccacattcattatcgatcctattcctatccccagctaagttctatgtgctataaatagtgagttctgtttgcattaaatggtgtgaccttctcctgtgtcctcagatggaaagttctcaccattggagacttttctgacactactctctcttcattagctccactacccacctgccaaccccttcgacctaccaaccccaccatgaactactgacaatctttctgtggccactgccttcaatgactttcccatgaattcctttccttttctactgtggtcactgatttcatgcgagtctcattatttccttcctagaccactatggtattcttataacatctctcttcaccccagttcagactataaatgactgacatattaaccttcctcaatcatagctgtaaaaacattcctactttttccaaacttttcagcagttttccattcccttctaaactacaaccaaactcatcaggatgggattccaatcaatcctcaccacagcacctgcctttccaagcctcatttcccatttagtgctttgcttggaccttaatgtatcttaaatacttcctgttttcaaatcgtgcgttactcatgcatttctccatgtctggaatatgctccttgcgatatacttatctttgaaattcttcccgtgtttgtgtcctaagtgaaattagcctttctctatgggaacgttttcacatgcccttccaggtggtcacagatcctagtgatctcttttgtatgcgcttctagacacattgttgatatctggcttgccatattggcagaattattacttacaaacattaaaatgatatgcatgttggacaaatgtggtccatcatttataactgtatttatttaatgaggatatgatttggtcctgttctaaagtctaattatgtgcttattccaccaatgcttaagatggaaaatttgaagcacctccaaaatctgaggtgggaatagatgttatttctgaagatctgacctcactctgttataacaatattttatagaccgcttatttgttgctatttttaaaactttgtattgactttccttacatttggttgctttcatgaccagtgaaaaaactttcaagttaaaatatagctgagaagaatgaaagagaaatggtaatgtaaagcttcacatttaactgccacagcaggaaaactcaaaattgaattccaaccctagctactaaacaccctggtaaagctttgctccagcttcactgagccaggaaatttctctcttttcccctctgacactagagtcggcaagaggagacctgaacgattggcataagaaaataaataccccttccatggagggctcacagaactagagcctgctaaccgtggctggacttgcttgcaccctgaaggtgctgacaaggtgtgcaggtggccaggaatctaaaacacaacactgcctgggtccccctggggagccaaaccccagtgaggcttctgagattcaggagtacgcccaccccacctgccgttatgccccccagtgaggcttctgagattcaggagcacgcccaccccacctgccgttatacaccccagtgaggcttctgagattcaggagcacgcccaccccacctgctgttatgctccccagtgaggcttctgagattcaggagcacgcccacccctcctgctgttatgccccccagtgaggcttctgagattcaggagcacgcccaccccacctgccgttatgctctttttcacccgtagttagctggggtgcctatgagtgcctcagtaaatatctgttgaacaaacaattgaatggacacatgaatgaatggatgagggcacagtgggggtaaggggcagggttggagggaagaattcttagagaagctgagcagtgaaggaaaaataggaattacccagacgaagggagctggaaaggactgaggggcacagaatcagctgagctggtgggaagtgaacaagtaaagctaaggggctagagaccaccttgttatcagtaagaagggaaaatcccctcagcagtgttggaggagagactaaagtgcgggtgaagcagggcaggtgtgacgggtgatgaataaattatgtgagagaaaatatagctgtcaggtatgcttatgagacactacatttatgtgtagaaaggactatggaagaattgaaggtggccatgaattcttttgccctcctcctattgtaaggtggggtctccccttgaacctgggcagactctgtgactactctgctgaatagaagacagtggaagtgctgctctgtcagttttggggctcatgcctaaaaatgggcagcttccattccctgtcttttagatcactctctctgggtgccctgagctctgacactgcccatttagcagaggccatgtgtctatctcccatcaacaaccatagtggaatccattcttccagccacacctaccaagatgcctgacatgtgagcccctccaccagctgagcaccaccaagcaacctcagtcaacgccatatagagtagaaacatcccctgacctagccctgcccaaacccataacccacacaatgataaggcaatagataaggaaaacacggcatgtaagaactaatggcgacgggaggagctgggggagcaggggaggtgatgtatgcttattttcacaggaccaagcttcgtaagtgtttacaagatggtgttgtcactgttgggggccttttccaatattatactcttgcctgtggttccaggttcatttcctttttctatatctcaattcctgatgctgaaattaaatttggaacaatgaaaaaaaaattccactggatctattttctggtcatgttctattcctagataatataatattcagaggacagaagaaaacccgtcattgttgtagaaaggcgtgttcagcacgcacagtcacgtacagcacattgtggtgtaatctcttgggcatgatagaattggaggacaggaagaaatgattccagtaactcaatcaatgaccgatgatatagttttctgagtattcctagtatcttctaactttctcttctacatgttggacactatcactgtctctatcccttggcctagatagcagctaaacagccgatagctgagccaacagtgttcaatactcatatcctcttctttgttcgagctcaagtgaacacgtggcattcattcctaactgcagcctcctcaagcccagaagcctgaatctgttttttaatttagcagtgaagaatgcagctacatcacatgctatgagagcagctggtgtttcatgcttcttctctcctatcatccctctcattcaacttctcttctttttcagatatgcggtcaccttatttatgtatgtgttgaggctccctttcaagactccaaaaggtctaatccaaaaaatagctgctaaagtattatctcttttttaggcccattttccttctgtaagagaagaatgcttcattgggattagggaacatagtggtttgattgattagactgcttaccaaagcaatacaatttcaaatgataaataacagatgtgggtactctatacagcaattgtttaaaaataattttgcttctatagtacattttggcttagaattgtgtgcttctaccctctgtgataatttatgttgttcatggcatataaaatgtctcccagttgcggccgggcgcggtggctcacgcctgtaatcccagcactttgggaggctgaggcgggtggatcacgaggtcaggagatcgagaccaaggtgaaaccccgtctctactgaaaatacaaaaagttccgggcgtagtggcgggcgcctgtagtcccagctactcgggaggctgaggcaggagaatggcgtgaacccgggaggcggagcttgcagtgagctgagatcgcgccactgcactccagcctgggtgacagagcgagactccgtctcaaaaaaaaaaaaaaaaaagtctcccagttgcatagaaaaggtttttctcatctgctacatcttcaattaaatcaagaacaaatctctgattattgagttttaagaaggatgactataacagaacttgtagcaaattttccatagtaaagcaaaatcactataattgatacttgtaattgatactttaagctgccttgtatttgccaattttccagttaaaacgaatctgtaaaactaagatattacaaatgaatttcaatcagcaatcagatcaatttggcacagtgaaccctttgaattacggaagtattttacttaaagtttcatgaggagtcctgatgcatataaggtagaagggaaatgagctacaggttctagggaatcacgaaggtcccacgagcaataatatttacgcattacatctgtatattgctttacactgttcacaatatcctttcatctacataatttttatgtacacttcacaacagttctccaaatggatataattatcttcatcgtgcagctgaggaaacggaggcacatacaatttgtgctcctcacagccatcgtttatgggaaaacgctgtggctgaagtgggtcatgcagatgattactaaatggatgttttcaaagctaaagttgcgggcatctttgctgacagtggaatgtcattttggtactgggcgaagctatctgggtagacagaacttccagagtgataggtggcaagtttcataaaatgtctgagtttcttagcaatagttaaaacatggtttaatcagatgataattttggtgattccccctccctaggctgcaacagctttaattttaagagaactgaggtagtggtctaattcctattgcaaatgtacgcttgtggcttcttcgtaatttgcagtgaagaatctagaaaagtgatggggaataatgtctaaaaggcccggaacgcttataactcagcataaagcagcctatcacagctcaatggcaaatcatcggttgaagtcaagggcaaaagggcagggaatccaagggctcctctgcccaaagcatcgcttacttgaggttggcagctggctgcacagcagcccttggctgccttcaaggaccggccagagtcagcatcctccaccccgcagctatgtcagcgtggcccagacagtgactgtggagtggggaggccctggccagccaggcacacatttcacagatgaggctgaaatgagaaacttcagggagatatttgcataaatatatttcccattgtccaaaaataaggccagacggaaacatctttcagtatgttccgatgagaattacaaaatgttatacaaatcaattttttacaaaggttattatgaggtttattctgacagaggacaaagcctttccccccttattaaaactgttgctgacatcactctgagggaagtcttgggaaaaaccaaaaataatatgtaggtaatattttgcaattttatcaaatatttaccaaaggctcagataaaagatatccagccacaggtgaagggtgttcatcactgggaagtggggttgaggggaatgtttattttctcactcatatttttccatttgctacggtagcacatcctacctttataaacaaagatatttcccactgcctggctcttctcttcagcttatcgatgatatcacctgcttatcttcgaatgggtcagaatcaacaactacttaccaaacatacactgtccttttttctaaccaattatttttctccagtcatctacaaataggtcttcaaggcgtattcccatacgttgtactatgtgtgtattgtgggattgagtacagcagggaagtcatatattttaaaatatggacaaccgggccgggccaggcggctcttgcctgtaatcccagcactttgggaggccgaggtgggcagatcacttgaggttaaagttcaagaccagcctggccaacatgatcaaaccctgtctctactagaaatacaaaaattagctgggcgtctgtaatcccagctactcgggaggctgaggcagggagatttgcttggacctgggaggcagaggttgcagtgagctgagatcatgccacttcactccagcctaggtgacagagtgagattctgactcaaaaataataaaataaaataaaataaaataaaaatatagataatcggaaaattttagtgaattcagaggaagcagaataaatttaaagctgaaattatcgagaaggtctttctggaactgatagcatgtaaattggactatgcaccgtgcaggtgagatgtgaacgtgttgaaatggaagtgagagggagtccactgagaagcagcagcagcagcatcaggaaacaagacatggagctttgggtgacgccaataacacatgagcctggatgctgctgccactgagtgtgggatcaaattagagaaaattagagaaaaataatatatatttttatatatatataaattatacataatttactatgtaatatataatataaattatatattataatatatattatatatacaacatatcttttatatatattataatatacatattttatatgttatatattatgtaatatattatatattaatatattatatattaatatactgtagtatatactataatatactatatattatatattatatataacatatattatatatgttatatataatatattatatattatagtaatatatcatataatatataatacattatgtataacatatatttatgtattaaatataaatatatacaacatacataattatatataaaatataaatatataataaaataatatgtaatatatattatgtattgtatattatatataattacatatataatatataatatacaatacataatatatattatatataacacatatgttaaattgtatatatatatatatattttttagatggagtctcgctctgtcacccaggctgtagtgcagtggtatgagcttggctcactgcaacctctaactcccaggttcaagcaactttcctgtctcagcctcctgagtagctggcactacaggcacatgccaggacgcccggctaatttttttgtatttttagtagagatggggttttgccatgttagccaggctggtctcaaacccctgactcaggtgatcctcctgacctcaggtgatccaccggccttggcctcccaaagtgctgggattacaggtgtgagccaccgcgtccagccaataatcaataaatttaataagaaaagtaaaaaagcagtttggatcgatggcccaaggaagagacgtagtgtactgagtgcgaggaaaagcatgtctccagtatgtagttaaactgcaggataaatcagtcctgcctgggggagagaaaaagtagggcagaggatgggcaggccagtctccttcacccctgtgcctggagtgagtaaattcgtctcattttcctcatgtccaaatactcacatcatgagatattacaaagctgccaagacaacacacctcagattttctgaaatggtctaaatttcaaatattccactccactctgcccataagtgttctaatgtggaatttttggtctggcatacagaaacaacggcattcagacaacagattacaaacaatggagcgggtctgatttaaacagggagaaggacataaaaatgtagatatttgccttaaaacaaatattaacaagaacaggttttgattgttacattttgtaaattcatcgtggctgcaggaaagactcagtgatttatgcatttgaacagagagaggtatgatggcaaaaggacggtgattttgtccaggaggtaactggagattctcagaaagggtcctctgaccctgctgctgcagctgcgagtgcttcagcttgggctgcgaggtgcaagttcccctggagagagtgggatgccgagtcatggagccagcagcctaacctggcctgcacattaagtgatgaatcagagcgtgtgatgctgacacacggggctttgcttccgaatggtactttcttcccaaacgaaaggcaaattcctctacctccatttcactgcaatgttatcaatagcagactcttcctttgacttgagaaaaataggagaacaggggtttctaagttaacatttccctaaagaccctggctgggcttatgctgcctctttccagcaatgcgtcagggcactcccctggccggccccgtcctcgcaccctctgtgagcatggtctgcttcatcccacttgcaagatgtcaaaacgtcaccaggctgcagaggctcagaagagactggcttctgaactggacttttgattaaatcacgagagaagactgctgtgtagtcttttcaaactgtgtgttgtgattcaataagaagtctaacctaaatgggttaagacggtctaaatatttcatatggttttgcttattcactcaaaataattatatttttaggcagagagtggtttagagtcactggtgtgtgtgtgtaaatgtaatagacatccgtctatctatctatctatctatctatttatttatttatttatttttttttttttgcgacagagtcttgctctgttccccaggctggagtgcagtggtaccatctcagctcactgcaaccctccgcctcttgggttcaagtgaatctcctgccttagcctcccaagtagctgggattacaggagcctgccaccacgcctaatttttgtaatttgagtagagactgagtttcgccatgttggccaggctggtctcaaactcctgtcctcaagtgatctgcccacctcggcctcccaaagtgctgggattacaggcgtgagccaccttgcccggctcatctatgtatttcttacataggacaaaagcactaaggcacagcgttagggaaacacctcatgctgcctgtataaacccctgctctcagaaagttgtgtgctgcaagatgggcaagacggtgcactgtgctggaatactggtttctggctggttctctacttaacaagtaaggcagtgagtcatctgatcctcaccttcaggggaactgttcatcgctattgtctttaaaggcagatgtccgaagttgcccagcacccagtgtctagatctagtgagagggatttagaggagtctttccaaaggagacaggacggaagcagcgttgtgctggaggcggctgcactggctctagagccaactgtgtctttccttcccaagtctgtactcagtgaggagacactggtagcttgaagctggcccagatgggtgtatttacaccacagaaattggcagcaactgcaaagtgggctcttttgtttacctcggagatctgcttgctaaactttcaccaattgttggatgaaagctagttctgagtcaaaaagatgaatatgtcttgaccaaggagacagaagtcaaacttcgcgaaggcaaagaaaagagggtgggaccttcgtttctgagctgacagccgccatctacctccatgcagcctctgatgggaggaaaattgttgtttttagggtgaatgaacatcaaatattatttgttgggttgccaaccaatttagagtcagaaatacagggaaagacagaggacatgagctcatattttattcctaacaaaacctacaaaacacagtgctttggatttgtggtcaaaagggctgatgaatattttgcctcagaatgaaacagatatacccacttaagtatgaggaaagagataaagaaagtgtgcagggaggagcctgggaacacagagaactttctttttttctttttctttttttttttttaatggtcccttttattgtatgtatgcgcagtgctggcctggctttgcaatgcaagtcctcagttaagatatagtcaaataactatggctgcagtttcgtctgcaggatccacaattcagatacaaacagggagctggggtgggcaggagaaacaggagggaagcagagtgcagactgtccccagcactggcctcttcacacagggttggcccaggcagacacaccccatggaatgatgaggaaatgacaacatggtcccttcccacagtgagcctggggctgctaggaaactgcccttcagaacctttgtgcccaggttgtcttggagcccaacaactttttatttggattaattaaaaaataataagttaaaattaagcaacagctgggtcctgaggatgctgagccagcacgcccacagtttggggggaaaaaaatagccagaccttttttgagggggcaaggtgtgttggcttgttttcgaatttgtggggttttttttttttttttttttttttgagacagagtctggctctgttgcccaggctggagtgcagtggcacgatctcagctcactgcaacctccacctcctgggttcatgccattctcctgcctcagcctcccgagtagctgggaccacaggcgcctgccaccacgcccagctaattttttgtatttttagtagagacggggtttcactgtgtcagccaggacggtctcgatctcctgacctcatgatctgcctgcctcggcctcccaaagtactgagattacaggcgtaagccactgcacccgacctcaaatttgtttttaaaaacacattccctgtgaggtaagaccgcagggggtgggcctctgtgaaagcctgaacttgggatgtgccaagtcgcagattcagccaacaccatctctgtatcctcttgggaaacagggactggggatgggggtgtgggtcaagaagagcgtgtggccagcaagatggggttgtgcagaggccgagctgcagagacagaccttgagatgcagaggacaaaaggcaagggaatgggaggtctgatgtggggggagtcaggataggactgcagccgtggaggtcaaggtgtggatggctctgctgctgcattcttcccctcccaatttctgattgacattctaatttttaactcttacacggacttaaattttgtttaatgcttagctacatctccatctgcgaagtttggtccccaccttgaatatccaccacgtaaaataaagaaacaggagcctgggcggtattttcacctcgtctccctccacttcccagctttttttcaactataccattattgttacattttcaagatttgttacatttacgttttattctgttaacaaccatgattacatgccttgcctctgagtggatgctggaagtgaaatagacacactcgtgacactaactaactacgtttgctggctggagcctgaaggtacagtctcattcttgtgttcctaaacctgggtcaccccaggaggaattttctgaaattcagatcaaacgaataattattccttacactaactttgaaaaatctttttgctgtatgtctatggacaggtttctggtgtagacttttgcttttcctgagtgtcaaagctgcctttccttcttcttgttgacagaagcaacacagggattccccacgggagtgctcagctctcccagctcattcagtgtctcgttaactgactgctctaagttgactccttccttttcagatccgcttccaagctgtctttctggaattttcttactgaatcccctgccttcctttatcttgggttttatttatatatatatttttttaaagtacattttcggccgggtgtggtggctcacacctgtaatctcagcacttggagaggccgaggtgggcggatcacttgaggttaggcattcaagaccagcctggccaacatggtgaaaccctgtctctaccaaaaatatgaaaattagcctggcatggtggaaacggctgtaatcccagctacttgggaggctgaggcaggagaatcacttgaacccgagaggtggaggttgcagtaagccaagatcacaccactgcatctaaaaaaaaaaaaaaaaaaaaggacattttcaggtatttttttcctcctttgggaattctttttaaaatttaatttaattttaaaagagagacagggtctcactatgttgcccagactggtctgtaactctagtctttcagcagtcctctcacctggggcctcccaaaatgttgggactacaggtatgggccagtatgctcagcctgggaattcttttcattcattctgaattgcatgtgtcttccacattgttgagtttccttgtcctttactgcagtccatatcatataataatatcatggtatattttttgaaaagttgcatggaagataacaatttctggatgctccatgtctgaatgtgtcttaactcgtttacacatttgataagaactggaataggtacaggaatccatgttgaaagaaacttcttctcagaaccttgctgacatttgcccagcttccaccatcagcatcagagggctgacagcaagctctgtgcctggcacaggacatggcttctcattgctgtagcttaagggacctctctggccaaggagaagccactcgactctgggactccatctagctttctcttggttagatgatttccagtagcttcttttgctattaattttgtgagtatttttacaaccttctagggatcagggtgagttatacccaagtgtattagtcagggttctcaagagggacaaatctaatagaacatacatatatatatatatatgtatatatgagtttatttagtagtattgactcacaagatcacaagataaggagcaaggaagccagtcctagtcacaaaacctcaaaagtagggaagtgacagtctagccttcagtctgtggtttaaggtccaaaagccccgaagctgaagaacttggagtctgatgttcgatgccagaaagtttccagcacgggagaaagatgaaggccggaagactcagccagtctagtccatccacgctcttctgcctgcttttattctggctacactggcagctgattagatggtgcccacccagattgagggtgggtctgcctctcccagtccactgactcaaatgtttatctcctttgggaacaccctcacagacacaccaggaatgatactttgcatccttcagtccaatcaagttgacactcaatgttaaccatcacaccagatattcctctgagatgtgaaattttcagtactattcctatggctttgttcttttctctgcccttatggataaaggatacacttctgtatttcattttggagaacattatttcatgctggttctagatgaatttcactggtttacaagaaacttcactgttctttgaataaaaataaggcaaaatcgtcaagggttttgagactatttggaaaaaaaaagctcgaaaagaatgggatgcacaaactagttattgttgaggcaatcagcatctcaactcctattacaccttaaaaattatttccgcaacataaccacacttgcaaatctcttcatttttacacatatatacacatattctatattagcactgaattttgctaacagctcacatttgccaagttattctaacttgtcttatttatgttcaagttttcatctttcccctactgcttgaaataaaactttgtgtcattgatttatttttgtgaatgtgcactggggacgtaagagaggaaaatagcaggagaagtgtaaacaatggcatgaaagtgacgtaagacgtgagccaggatggtctgtagagttcggactgtatttgctgagatcgaaaggaccaaacagcgctctcagcaaaggtgcaaacttaagaaggctgcaattattagaacataaagaatttccggcgaggcgcaggggcttatgcctatcgtcccagcactttgggaggccaaggcgggtggatcacctgaagtcaggagttcaaaaccagcctggccaacatggtgaaaccctgtctctactaaatacacaaaaattagccgggtgtgggggcgggtgcctgtaatcccagctactcaggaggctgaggcaagagaatggcttgaacccaagaggcaaaggttgccgtgagtcaagatcaagccactgcactccagcctgggtgacaaagcaagactccatctcaaactaacaacaacgacaacaacaacaacaacaacaaagaacataaggaattttccaggaaagtgaaactcaaaacttgacatttgtgaaataaatgtgaacagcagtattcaatcaatttagctcggaaccgtcaatgacctggggagcacgtgagagtcagtggggcagatttccggtacatggacgatacctagagaggtcctagtctgaaagaatcttccggatggaaacagggcatcttgtttatacaagcccaggtctctcacagcaaattcaactgtatgttccttctcctctcctgccagattgccagttactttgaggggaggaatatcttctaaattttctgaacctcctggaatttgacatatcgactgtattctggatatttaatgaattctgtttgatgacacaggtagagtaaaatggtcttaaatcattttgacagaggtaaaaaacattttattccacactttacttattctttttctgcctgaagtgattacaagaaaaaaaaacgaatagtttaatttaaaatccagattggtatgtaattatcacaaaatcagtgaagttcttttcaatgaaaaaaaaaaacaccagttctataatttggacagacaaaatttagcaataacaaaattaaaggtacaacccttaatctattaattatttaaaaatgcatctcgaactatttttctttttatttatcccttgtatcaatagacatttaattggcaaacaagaacatggaaaaatataaactgtaactcactgtaataaactctaaatcaatacaaagagtctaaaatgtgttttgacgtccaaatgtagctacagccactgtgtcctgtgttctataacacagagaaataatacaaaatgattaaaaaaataaaataaattgaagagaggcctgtaatgtaaggggcgctgtgtcactctcaggcagcaacgtgagccagtgagtcaatgcacgaggctctcctgtttgttggtacttcctgttctttctttataaaatacatggagaactaaatccgcaggatgctcacacaaatgattcatagagaaagcttaaaagaatctcacgttgttaatgagcatcacaataggctctgctcatgagaaggcattttgtttccgcagaaatgttttttcttactctgtcctgattttgatttctgtttaaattcagtaaacacattaccaaaatttaaagaaggtgacttgttttccccaactctcagttcaccaaaggtatttcatctatttgttctgaaaatgcagctgctctctagatgtatgtgtgccctgataagaaatgttttgtgtaacaataaaaatcatttcttttgattaaaaaaaaagaatctccagtcgtttacactggaaaacgagagagagcgcttgcatactttcttcacatatattaatggtgggaagaaaatggatgtagagtaatagggcctgaggaactcatagaaggaaccggacatgtatgaaaagatgatgactgccaggtggcactgacgcagcctccagcccctctatcttaggctttcgggacatgtgctctcttgcttccgctggacagtgtctcaatactttcctccctaaaagcaggttttaccctggtcagaggtgctcttgaggcccaaagaagagatttccacaaatagtctataagagcatgtacatactataactgcttgataagtgaatgaatggatgactaaatggagtcaatgctttcatgacctaacgttgtggttatgggtgtcactattctcttggcaatagtgcaatagtgaaatagtaaaatagtctagatgtcattaagaaccttcatggaaaacatgccggtgggggaaggaaaacaacattcatgattcatgggaggagataaaatagcaacatgaaggggaatttggaagatgctgacgctagccctcatgggtgattttgaggggttcaagtcttcagtggaggaagtaactggaactagaattagaagtggggcctgaagatgtgactgaattgtggcaatctcatgataaatcttgaacagtttacttcttatggatgaacaaagaaagttgtttcttgagatggcgtctacttctagggaagatgccgtgaacattgttggaatgacaacagaggattttttgtttgtttgtttgttttttgatacagagtttccctctattgcccagggtggagtgcagtggcacaatctcgactcaccacaacctccacctcctgggttcaagcgattctcctgcctcagcctctcgagtagctgggattacaggcacctgctaccacacccggctaatttttgtatttttagtagagacggggtttcactgtgttggccaggctggtctcaaactcccaacctcaggtgacccacccagctcagcctcccaaagtgctgggattacaggcatgagccactgcgcccggctgaaagaatctgaatattacttgtagttagttgataaagcagtggctttgacagggtttgagaggaatgactccaattttgaaggaagttctaccatagatagaatgctatcaaacagcatcatggtatagagaactcttctttcacacatgaaaggaagactcaattgatgtggcacatttcattgttgtcttattttaacaagtttccacagctgcccaaacaatttggcagtcaacaccctgcctgatcagacagcagccatcaacatcaaggcaaaaccctctaccagcaaaaagattatgacttgctgaaggctcagatgattgttagcatgttttagcaataaagtatttttaaattgaagtatgtactttcttaaagaaataatggtaataacacttaatagactacaacatagttagttttagaagcactgggacaccaaaataactgtggacttgctttactgtgatgtttgcttcgtgagggtggtctgtaactgaaactgcattttctccaaggtatacccatatttaaatagaaaatggactttcttttactaaggagaatggtattttcatttgtctcatttttggagggaaactctagagaagaagccaagacatgcccactgtccctctcccatcctatggaggctgcccagtgccaaagaggaagtggtcactctggtcactcatatacacacagctggcacaattgtcacagtcgctcccctttgtgacaggctggtggaatgacttacagttcagcccaccaaatataatacagatgaatttagtcattcagcctcatgaggtcacacttttactgttttcaacaaagcttaaacccccttcccacattctgtagaaaaaaaagtgatgacttccggggttgttttctaggccatttctatcagaactcctgcaactcgccagatatttcaactcttcggaaagccaccttgtgtccattttatgtcccccaaccctggataatgtctctgttttccatgtacctaaaaacattgcaaaaaaatctgctattcaacatatcttggtgttattgtcactggaggaaaatggaaggagaaaagcaaacagagagtatggaaataaatacccgtcagtatagaaatgtagtatatcataaaaatggcacttcaaaccagtgggaagcaatgggtcattccgtaatacagtactggaacaggttaataaaaaattacaaagtttaatttagatctccattgtattccttaaaaacaaagtaaatcccaataaaataaaaattcaagtgcgaaaaatcaaagaaagcatcaaaagtataagaaacgatgggccaggcatggtagctcatgcctgtaatcccagcactttgggaggccgaggcggacagatcacctgaggtcaggagttcgtgaccagcctggtcaacatggtgaaacaccgtctctactaaaaatacaaaaattacccgggtgtgatggcgggcacctgtaatcccaactacttgggaggctgaggcaggagaattgcttgaacccaggaggcagcagttgcagtgagtggagatcacaccactgcactccagcctggacgacagaggagaatctgtcctaaaaaaaaaaaaaaaaagttggatgatgaaaaattttctaagattgcactggtgatatcttccttgagcggacgttaaaaccagaagccataaagtagtaggtgcaaacctctgactaccaataaaatgtttaaactatttctatggcaacgtaacaaaagcagaaataatcttcttgtagtctgctctactggtggtcaccagtaaaccattcttggcaaaaggcatgcccctgtacccccccaccctcgtgaatctgagctgggcctgtgactggccttcaccaagagaatgtgacggacgcttcagaacttggcctcaggagtgctggtaggtcctgcatttgcactcctggacacccctgaactaagaagtacagctgcaagaagaacacagcacgtggagaggtggtatggaggggccacgtggagatagagagccctggaggctacatggagaagagcacagaacccagctgacccaagaactgaggccccaggactacagccccagtcaagccattccagttggctgccagccatcctcacctcctagctgagctccagacacctaagcagatgaggtctctgagacaccacatctccagcagaactcatacaggaagagcaccacactgtcctcatggggccctttccaaattcataaccctcagaattttaaaaagtaatatgttattttgttttaaagacatgggataggccgggtgcggtggctcatgcctataatcccagcagtttgggtggacgaggcgggtggatcacctgaagtcaggactttgagaccagcctggccaacatggtgaaaccccatctctactaaaaatacaaaaaattagcctggcatggtagcaggcacctgtaatcctcccagggaggctgaggcaggagaattgcccagaggcggaggctgcagtgagctgagatcacaccactgcactccagcctgggcaacacgagcaaaactccatctcaggaaaaaaaaaaaaaaaaaaaagacatgggataatgtataatgtggcaatagatagctggaacacccaatagtcaaactcaaaagaaaatcagcaaactgggaaaagactaagcaatacatatgccaagagactaacgtcttaaatatgaaaaaagagcttatgtgtaaataagaaaaaagtcaactcaatacaataggactcaaaacttactgcaaagaacaaaaacataagtggtcaaaaatcatttgaaatatgttcaagctcactcaatcttattgaaaaactgagtaatattcttttacttgcctattggattggaagatatttaaaagtttaacaatgaataaaattaaattaagtgaaataaaataaaataaaaagcaataaccagaatggaggtgatgtgaggctcatgaaccacttgttgagagcaatcattgtttacaaaaaacctactatgtctatttattcattgacccagcaatataatttctaacaatatatcttataaacatgatatactcaaggatacagcgatacatgaactgttatggactgaatgcttgtgtctcccccaaattcatatgttgaaaccattacctccaatgtcatggtatttgtaggtggagcgtctgggaggtaattagatctatatgaagtcatgaaagcagagaacccttatgggatttgtgtccttatgagaagaggagaaaccagagctcactctctgtcatgtaaggacagcaagaaggcagctgtcaataaaccacgaagagagccctcaccaggtttccaatcggctggagccttcgacttggacttcataccctccagaattgtgaaaaataaatttctattgttcaagccactcggtctatggtattttgttaaggcagccaaagcagactaaggctagaacaaagatgctcatgaagcatcatttgtaatatcttaaatgttggaaaattctacatgtctacccttaacaacctcattcaataatttgcaacacagctatacaacgtaacactgtaaagctttttatcagaataaggtagtattatatatactgatctctgaggatgtctagatattggtaaagtgaaaaaaagaataagctgtaaagtagaatttactgtaggattctatttgtgaccttttatgaaaaagatataggcacatgtatattacacacttgtaggcatgcatacttctatattatatttctaagtacacattgggagctattcatggtgattatctctgaggatagggagtattagaatggccaacttggtatgaatagggaataaagaagacttactttttatactacacccatctgcactgttttttttaacgtgaaacatgtaacttttattaaaaagaaaaaaaaattgtgaaatgcttcatagtcctttgtgtcaagagctctgccataacccaaagcacaaaacctaggaggtctgttgatcttaatctacactttggcctcatacatggatatagcgtgttggttggtaccatgcaaacactgtccctcctttctgggttggagaggaatcaggagtgtttggagaaaaagaaaagcacatcccctgaactggcaagcgatactcatgaccatcagcagccacaggctccattaacaagcaggagagggatgtttccctggtctcaccagcaataaatgtgtctatggggaagcaaagtttctaagaagtgcttaaggaactctaggcattcctagacagcccaggctctgaatttagatgggagaaaagtaggcagatatcactgaaaatcatgttgttttaaaatgttcttttttgcgttgggtgcggtggctcatgcctgtaatctcagcactttgggaggctgagacaggtggatcacctgaggtcaggagttcaagaccagcctggccaacatggtgaaaccccgtctctactaaaaatacaaaaaattagctgggcgtggtggtgtatgcctgtagtcccagctacttgggaggctgaggcaccagaattatttgaacccaggaggtggaggttgcagtgagccgaggttgtgccctgcactccagcctgggtgacagagtgagactctgtttaaaaataaaataaaataagatgttcttttcaagtttatcgattaattttcatgaacctgaaaggtgtttgtgaaagaacaccctattcttattattctatgtacaaagagaatcatattcactcttaaccctcacatcaagacacttactttgatacatttttaaaggcttgaaatccaaaatagagttttaattttcttatcaaaaaatttcaagcctttatatcaaggtggtaggattgttcatctcttttgtgtcaaccctgtaaatgtgagaactgtaattgatctctgctatgcgtgagtgacatggaagaccctgaatatgttgtagaaccagaacattttcattacctacatcatgctgtgtgtcaaacaggcatgccaatcagtttgtggatctaagcaggccattgcacatgcaaacgtgtatgataggtatgacagtttaacttagcattctcatttggaaaacattctggaatatgtgaataagtaactggaaaattcccaaatagacatagcattgcggttcagaaacatgaatatttaccattgacagagagcaagagagaaagcatgcacacaagagagggtccccatcaaactgaacaatgtataagcaagaatccacagtgcaaattggaaggatgatcatggctgcgaggctacagttatgactaaacaaccattgataaatttattctcgactatatcaaatgataaagaaaatagctatgaatttactgaaaaaaaagcattatccctaattaataagaaaaaagaaaaagaaaggaacatccagctcaaacacttgtccaccaaatagcacaacagatattgagaacactaatatttggttataaaggacaagaaattgttaagaagaaaagtaatttccactttggtatttctggccttatgaagacataagatacattgggaggattatggaaacataagtgattgagagaaaatctcatgagaaacttaagaagatgggactgtttatgaaataggaataccacccataattggacaaagacaataaaaaatttttctaattacagtatcattccataagtatacaatgtgtattatcagtaggtgaatatcataggccaaatgaaaagcaaacaagtaagtaaaaatattaagtagaaaaatattctcatgagtgattgatatgattacatttgaattttagaagatgtcattagtggagatgtgaacagaatcaggatttaggatgaagtctgggaaagctgttatgaggctactgcaatggtctgggctcttttggcatttcctctttaagctaaaattggccctttacttactatttattctcttttccctgatatttgctcttcttgtttttaaaaaatccttcaatttaattttaaattttatggctttcctcttcttctacccggttccgttccttactctgcattgcaaattacacagatagtataaacatagacgacgttagtctttaattttaatttttctttttctttttcttttttttgaggcggagtcgcgctctgtcacccaggctggaatgcagtggcgcgacctcggttcactgcaagctccgcctcccgggttcacgccattctcctcctgccccagcctcccgagtagctgggactacaggcgcccgccaccatgcccggctaaatgttttgtatttttagtagagagagggtttcaccgtgttaggcaggatggtcttgatctcctgacctcgtgatccgtctgcctccgcctcccaaagtgctgggattacaggcgtgagccaccgcatccagcctaatttttctttttctttttttgagatagagtctcactctgctgctcaggctggagtgcaatgacacgatctcggcttactgcaacctgcagctccagggctcaagtaattctcctgcctcagcctcccgagtagctgggactacaggtgtgtgccaccatgcctggctaatttttgtatttttagtagagacagggttttgccatattggccaggctggtctcaaactcctgacctcaggtgatccacctacctcgtcatcccaaagtgttgggattacaggcatgagccactgcacccggccgattttttcatttttatttcaaatttctgccatatattttggattctctctttaaaaaaaaatctgtaacattttaaaagcaattttggcattaatatttgtggtagtaataaggttttacatgatggattaggatatgatgacaatacaattcttaaggttaacacagccaggagaattatatggccaagtgaatagatctttagacctctggctttggaagcttcttatgaaatcctaagagatttacagacaacaaatgtttacaacatttaggcacacaacagcataatactagacacaaatactaagcaatattcagagtccaaatacagccatactcattttgcttgtaaaaatttagtttttcaatttgcctcctgctgcacagaagtaatatagcaggtgattcatttccacgtttgaactgctgttaaccacaatgggtgaaggagagcgagatgcaggcttcgctgatcatgtcacccttggaagaaaggggaataaaattatagggcagaatgacctatcatatttccttgacaggtgctaattcactttgatctatccttcaccataatttcattggtggggaggacatacatatttataagtgtggaaacaggcgactgtttttctgtttgcaatttacaacaacaaagaattcatttcaattttcatattagaagtcccaaggtgacccgggagtagataccagtcccctgctgtgcgggatttctaacataataaggaataaagcacaacaacagtacattgtgacctgggctcatgggtaatcaattcacatatttaccatggaaacaacagtaccacgcagaacatcgtcattgcttcaatttgctgacgaaagccctctagaacccaggaagagtgtgcgtgaaagctggctgattaatctgacttacttatgctttgttaaagagttattgtcttaatcataattaacactaaatagttactcatggaaaagctgcaagagagattcagctctacctcttatgaggcttatggtctgtgattttcaaaccatgagtcatcgacaaatatatacaatgaaacagagattgagccaaatgggaggacaccagggttttgatttcagaagtcggatttagaatttcattttctatgcaaaatactgcatggtatacaaacacctctcaggttatataatcatggtgcattatctttgtacccacaaaatgcttaacgaactcagtggggtgagttctttttcttctaaggaaggaaaacaaaacttctatgcacgggaaaacaagccagtgcacggcatgactaacacaatgccatgtaattaggcaaaagctttgaatagacatttcacttaacgagatatacgactgggttaataagcacatggataagatgtttaatatgactagtaattagagaacgtctataatgaacaagttgacaaaatctagtgtcggtgaggaagtagagaaactagaaaccaacacccccgctccccaccaccaccttttgctggtgggaatgcaaaatattgcagccacttgaaaacattcgagcaatttctgaaactgttaagcacacgactgttagagccagcaattcctctcctaggtatccaactgaggagaaatgaaagtgcagatccacacgaagagttttacgccatgttcacagtgtaactcacaataacaacgcaaatgtccatctactggtgaatggataaacaaaaggtatcgtatccttgcaatggagttttgctcatcaagaagagtttcacgtacaataactttgagaaaaatctcaaaattacgctgagggaaataagactgacaaaagattacatagcatttgattccatttatctaacatttctagaaaaaaagacaaaactctataagcagacagttgatcagtgtttgcctagggctgaaggtgggagtgaggatggctcaaatatgcatcgaaaaactttttagggtttatttttctgaaactggattgtgataactggttgcccaattataaatgtgtattagaaatgatcgaactggacatatacctggaggatttgcatgatgtgtaaattataccccaataaagttattggaattcagtaagaacatagcttgctctagatggttaaaggtttcagttgttcctgttataggatcttaccattatgaactgtcatcttcccaaaccagtgaagtcttagcaagtgctggaaatacaaataggttcacaatttaaaggggcagctggagcctcagtactccatcagtaatatgtattaagacatgccacagagcaaatgctcacagtgaaaagtgctggggagactgtacaggggtctactacatgtgattaaagaactgtgtcagatggcatttcaacagctttgtaagtgatgacagggacacaggtaaagttgaaaaatcacattcctatcctccttaggacagatagtaagcatacgtttttaattactgtcatgagtcgcttaaccacatggatacattctgagaaataggtctttgtgtggacatcacagagcatacttacacaaacctagatggtatcacctgctacaaacctagactggatggtagagccttttgctgctgggttaaaaacctgtacagcatgttactggactgaatactgttggaaaccataacaccggctgggcgtgctggttcacgcctataatcccagcactttggggtgctaaggcaggcggatcacttaaggtcaggagtttgagactagcctggccaacatggtgaaaccctgtctctactcaaggtacaaaaattagctgggtgtggttgtgcaaacctgtaatcccacctacttgggaggctgaggcatgagacgtgcttgaacctaggaggtggaggttgcagtgagccaagattgtgccactgcactccagcctgggccacagagcaagactctaccagaaaaaataaaaaaggaaaccataaaacaatggtaagtagatgcacaatgtctatctaaacacatgtgaacatggaaaaggtacagtgaaaatacagtataaaagataaaaaacatggtacccctgggccgggcgcagtggctcatgccggtaatcccagcactttgggaggccgaagtggatcacgaagtcaagagattgagaccatcctggccaacatggtgaaaccccgtctcgtctctactaaaaatacaaaaattagctgggtgtggtggtgtgtgcctgtaatcccagctactccggaggctgaggcaggagaatcgcttgaacccaggaggcggaggttgcagtgagccaagatagcgccactgcactccagcctggcaacagagtgagactgtctaaaaaaaaaaaaaaagaaacgtacccctgaataggacacttactgtgaatggagcttacagtactccaagttgctctcctgattcagtgagtgagtgaatgtgaaggcctaggacattattgtataccactgtagacgttatgaacactgtacatctaggttacactaaatgtatacaacaaagttcctcaataataaactgaccttggcttactgtaactttctgactttatacacttcttaatttttaaaactctgacacttgtaataacacttagcttaaaccacaaacacattgtacagccatataaatatattttcttcctttatatctgtattctatatgctttttttctgtttctaaatttgtaaaactttttaaactttttgttgaaaactaagacactgacacacacattagcctaacagggtcaggatcatccatatcaccatcttccacccccatatattgtcccactggaaggtcttcaggggcaatgacatgcatggacctgtcatttcctataacaatgccttcttctggaaatcctcctgaagatcctgcctgagactgctttaccgttaacttatttataagtaggagtatactctaaaatagcaataaaaagtatacaatatacataaaccagtaacataattattcatgaccattatcaagtattatgtactgtacttcatatgtgctatacttttatatgactggcagcacagttttgtttacaccagcaccaccacaaacatgaataatgccttgagctactacattgcaacagctacagtgtcactaggcgataggaatttttcagctccactataattgtatgggaccaccatcctgtgtctgtcatggactgaagtgtcattgtcattatacaacaccttactgcactcaaatgacctcctgcttcacccgtaaaggaaaatcatcatcagtgtagcctgtagctataggatggtgaagttcactaacttgccagccagtcactgtgttgaaatttggtagaacgtcatcctctgagccactcctaaatcttagtgggaacacaagtagcacaggataggctgacaactgaagtgaaagcagatagaaggaacttttcaacctctcttgtagaacaacatttcaattaccagagaaagtggattctctgggatgctacaaggcagatgtcagcctcaattggttaaatctgagaaacattgactgaatttctcaaaaacaacagggaatcctgcatctaattccaattcatgtttaaaaagcccagaaaattaagttacatacaataaggcaagtaatacattattaccattttgttgccactcaggattcaaacaaaagagactccaataaaccccctgttgtcaaatgcagaagatgaaattggcagagtgtcaacttctacagaaggcctcacttctcttccttgttctagctatttcctgcttgtcttttaaaattcctattacgtcttatggttttgaaaaatattttcctgacccctcagtgtgtccccactttcagccaccttacttacagtctgattcagaggttccattgttttgccctggtatgcaaaatggatgtctatcatttctcacattgcatgcaaacaaatattagtttacttttttctctcatattagaaatctgttaagggaagggggaaatacatatgtgtgtgtatatatacttatatttgtacacgtgcacatacatataagtaaatttgcttaattacctaggtgctgaaccagaatttcataaattatttgtggggatataatataagtacatgaggtaattcctacatgaaatggagtaactaacataggtcagcattaagttgccattaaaaagttccaaagtatgcattactcatgtttggataccatgtaacctgtaatgagatctgaattctggaaatacaggcaatgattacaggagtctaagaataaagaagccagcataagcctaaaaaataaagagaaggttttggagaagttggagttttgtttttaattttcatacatcttggattttatagcaaactcaattaactaattaaaaattagactcaattaactcataaaaaatgcatgttcttatgctgtgatcatatttcacaattgcagtttaaacaaaaccatgactcactatgctgacgttatgtcctggtgctgccacctatggacaccaggtcacagctccctccaggctggcaggcatcttgcagcatggctggaggatcctcccatgtggcctccctgttcctgatctcagcagcttgtttcccacaccttcaagtgtacatttcctcaggtcactccatagcatacaatcctccactgagtgaatccccatcacacatataaagtagattctgcagttgggggccagtgccggggctcatgcctataatcccagcactttgggaggctaagtggggcagatcacctgaggtcaggagtttgagaccagcctggccaacacagtgaaaccctgtctctactaaaaatacaaaaattaactgggcatggtggcacacgcctgtagtcccagctaccagggaggctgaggtggaaaaattgcttgaacccgggaggtggaggctgcagtgagctctgatcacaccctgcctcaataaataaataaataaaataaagtagattcctcctcctcttctttttatttgcaaaatattgcaaactcataaaaagttattaaaattgtacaaaaaactgttcttcacctaggttaaccacttgttatcaattttgtgagatttcctctttctgtctctacttacatataatgaatataacatagttattactatatgtataactgtattgttattgttgctatgtagcgtctgagttcttagagagtaatttgcaaacatcacgatcctttaccccctaattgtttagtgcctcctaaggaggaggacactgttaggtaactgcagtacaatcacgaagttcagctggtgcagattctgaatggaacttgcgagacccttcagaacgtggcccacctggcttcctctttccctgtctgcctggtactctttgtactttgcctaggaaagaaacggccattccttgctatcctccattgctttgtacacacagcccctgcctttcaagcatttttcccattctctttcctcagctgagttcactattgtttctgtgtctggacttgaatccaggctctggcgcttcgtagttatgggacaatggggaagttacttaacctctctggggctcagattcctcgtctgtgaaatgggattagaaaaagaaactgtctcctgggatttattgtggggttaaagtcagatattttaggtcaagagctaaagaatacctaggaaaaagtaagcattcaaaatctacttactgcccctatcacactaccatcatcaccaatcacttctcgggcctcatctttaacctcacacactccaggaaggcctcactgatcctcaaatatgaatccaatggcccagactgtgtgcttaggtaccctgcattaaaatgacctactataatttactggaagtattttctatttgtttcctcctagtttgcgtttaatgtcttttccacagtgactaagtctgacttggtcaattttgaaaggctagtattcagcatagtgcctgacacacagcaagattttaataactactcactgaatctataaatgaatttcagtaattcagaattcagaatgaatttcagagtctaatggccgaaataattttcccaaactcggctgacaattgatttttcaggggaagtccagataggttaagagcagaaaaggtgactcattcttcaggggctcaacacccattccccactgcccagggaaagtgtttgcatgccatgtgaaacttcaagcaagctagtttttaagctgttaaaaaaaatgagggaattaattgttctgagcagtttctcaccatctccacagcattaaattcaacattcgatttgcttttcaaacacagttaacaggcaggaagatgagataatctatttcagtgaaaatgtaaactgtggaagtaccctgtgagtaaactaggggagagagtccctccacaaacaagaaccacggctgcccgtggggaggctgggaacatgcccagaattcacctggcatcactgttgaggtcaaatgttaagacttgctgggaaaaaaatattgttgttgttgttttttggtgaatccagaggaaggaaacatattaaaattctaatgaatgactaaagtgaaaatgctttacaggcttatgaatgaaaattttcccaaatttttccttatataaagattatgcatacaaatttaaataccacaaaatccaaatataaaacaatttatgatgggctaatataaaattacactttttcaatatgatagaattgcatctttgactttatagaaatgttgtttaaaaatgtctttagaggtcaggtgcggtggttcaggtgtgtaatcccagcactttgggaggcagaggcaggcggatcatgaggtcaggagatggagaccatcctggctaacagggtgaaatcccgtctctactaaaaatacaaaagattagccgggtgtggtggcgggcgcctgtgatcccagctactcaggaggctgaggtaagagaatcgcttgagcccgggaggtggaggttgcagcgagctgagatcgtgccactgcactccacgctgggcgatagagtgagactccatctcaaaagaaaaaaaaatgtctttagaaactcctatttatatacaaactgatatctaaaggaagatccattttatacttcattagtgtaactttcagttacatggagttgtaactaagtgcattaaagatacaattgaacttattcccagatgtcaagtgtccctgccaagatttaaatccaatcacaatatgaatgatgtttaggagattcaatggggataaaacaaacaaacaaacaacatggaagacatcctccttctttgctagttgatgatgaagaaaataagggcagctactatgctttactaggcacttaccacatgccagacactgtgctgaactctttatatgtctcgtctcctccccacgagactcatttaaggtttgtatttattattcccaatttaaaattaagaacattggagctgagagaggtcaaatagctttctctaaaccactcagctagtaaacggtgcagtagaagctgaagtaagttctgtaatctattttaggaacttttcaaaacgaactgttctgtttgaaagttacggagagtctacctctaagtaaatgggagtggtgaacacttagaatgacaaggaactgccacttcgttcttgacctgtagaaaggcagtcggtgagggagacatgctatgatctattcggtagtcctaaaagagactcatacttatatacctaaatacgcaggtcaagacctgggcgaatttccctattatatattcctgtagctgagtgatgattcctttgtagcgggagtcgcagattcagtttcatctgtctgttgtggttattagactgaggtcatctccctcacttgacttaccctccaagaaaacagggaacttatctggcttggcgcacactgtctcttcagccctggagcactttgtaaagatgaagtactgaataaatatttcagaatgaatgcataagggaaatgtgtgttcagagggctgcagcagttgagttcttaatacatcgaccctttcaacacattcctggggcctggtgacctctaccaaggctaccttcatgttcgtcttatccctgttgcagcaatttgcaaattgaggaatatataatctagtgagttttaggtctggttgcactctagttgcagtctaagaaacaggtgaaagagcatattttaaaatgaaaacataggagagttctttgaaactgaatctaagtccaacaagcctacgagagatataactgtctttctctataagacattcaaatgagctctgaagtggtacaacaagggcaagtagtggcaaaccctgggaatcttctagcagaggcaaataaattcagcctttagagaaaatccctctaaattttgcttctcctttttaaaagacaataagttacattttgataaacaaggctcagataaatgagaacatttaattctaaaggatacctgttctagaatgactggtgggcagaaaattacagttttagatacttcgtgtgtgtgggagaagatactatacactaaaatgaaaaaaaaatacacatacacatgggagttgttttctagtttgccaatgatagtttgttaaccagtattttccttccttagtaatctttttataagtgaatttgtgtattctccaaacccacttgcatgtacatgcttttactcatatattttgaagaggattgcaaagtgtctgaagaactacgaaggagcttaatcaaaaccgtgaatacatcactacgtcttacatacaggaaaattaggcctccatatttttaagctgaaaaaatgctgaagaataaataaggggtaaagaggaatacaaacactacattaacttacagggtaaaataacttacacttataactagaatagaagaaaatcaaaagtcatgttaacaaaaagcaaagatgataatagagtccactttaattatatttgaattagaaaatggctaagggaaatgttattagttttaaaacagaaaagacatttttacgactgaaatttaaaagaaacatattttaggaaatcaatctaaacaataatttcatctttaatggaaatgagagtagttagaattttttaagtggttactaaaaaattactttgcttgaacttgggaggcggaagttgcagtgagccaagaccctgccactgcactccagcctgggcaacaaagtgaaactctgtttaaaaaaaaaaaaaactttacaaaaataaacagtaccatagtaaatgtctcaatgaaattattttagagtgaagaactttagataaagttactgaagaagcataaaaaatattagaacaatctgtatatcattgttaaggaaaagagtgaacaaggataacatttatgtttgcttactgttgtagaccaaatatttgttccttccccaaattcatattaggaaatacacctactatgatggtacccctgggagacggggcctttggaaggtgattaggtcatgaggatacaaccttcatgattgggattagtgtctttatgaaagttgccttctgctatgtaaggacataaggagaaagtggtctgcaacccagaagagagctctcagcagagcctgaccttgctggcaccctgatcttggacttccagccttcaaaactgtcagaaataaatatctgttgtttataagccatttaattgtgatattttgttatggcagcctgaatggataatgacacttattattaatatttgggaagatagggaaaaataatttatgatggttaaaaatacagatttgtaggaggaaataaagcacagctttgaaagacaaatcatactcgatcaggtaaattccctttatgactcactgtgtagattagaagaggcaggagatttaatatttcttagcttcataaagtccttggttttattccacaggatttagtcataaataagtgaatatatatttcagccctacaagaagttaagtggttccgtatggactagggtgggaggtgagataagatagaaaatataacaatcatcagaatatataacatataacaagatactatttgccagacgccatagtatagtatcttacacattatttcctggaattacaacagctgacctagtgaggtaggtgtttttattttaactttcacctaggaataaactgagggtcagagtgtagttaagaaacttgatcaaggtcacataagtcccaagtggcagggctgaaatctgttgatttttcaaagcatctttctgcccctaagcctttggagttaacatggggactcatgagagcatttcttaaaaacttgtcttggatctaattggaataggctcaagcacctcaaaaagttaaacacacaattaccaaataatccattaagtccactcccatgtatataccccaaaaaagtacaaacgaggactcaaacccacacttgtatagatatattcacagcagcagtattcacgatacccagaaggtggaggtactccaaatgccaatcaacaggtgaatggataaacaaaatgtggcatatatataaatggaatattatttggccataaaaagtaataaaggatttctatatatgacaacctggatgaaccttataaacattatgctaaatgaaaaaaacacaaaatcacaagtattatataatacgattccttttatatgaaatgtccagaatagacacaactatagagatggaaaatagcttagtgattgccagagactgagagatagaaagtagcttagtgattgccagaggctgggaagacagggaaatggactaactgcttaatgtgtatggagtattattttggggtgatgaaaatattttgaaactagatagaagtggtgcttgcacagcatgggaaaggtacttaatgctactggattgttaattctaaaatgtttagttttatgtgaatttcacctcttttttttttttttttttttttttgagacggagtcttactctgttgcccaggctggagtgcagtggcatgatctcagcttactgcaacctctgcttaccaggttcaagtgattctcttgcctcagcctcccaagtagctgggtttacaggcacacgccaccacacctggctaattttttagtagaaacggggttttgccatgttggccaggctggtctcgaactgaccacaaatgatctacctgcctcaccctcccaaagtgctgtgacataggcatgagccaccatgcctggtctcacgtcaatttttttaaaaggctcaaaacacttcctaaaattatgaagcccaagaataatgtctgcaacccatgaatgcataaggcaaaggaaataatgggattccttgttttcataattgaataaacaaggaaggtgttccctttgccttgcacagactgcattttcagtaaaatggaaaattgttggcaatgccactgaatttacctgttggcaatgccactgaatttacctgaagccagcattctctcttggacagaaataaaacaatgagccatactggggttcagacagcctgggttccagtcccagctcaaggaagaactaggtgaactaaggagttcacaacctgacatcttggtgtctgtttatttatccatagatgtgagtgaaatcaggccagatggatgaatgattgctacattatcttctaacctaaaaaaatttataagttaatattttatgaaatgaaacaaattgtgatttcatcttgtatataatagatacaataataaatagtgtccagaaagcactgggagcaatacattaggagtgatgtatgatgtgcagacaaaaatgagaagattgttcttcaaacattgtctggggacgaaacaagtcatcatggatcacaggtttacacaatttagtaatctacttaaatgcaacagttctcagtagaatatagcatttcactcttcacctacatggctgagtacctcgttgtaatactaaatgttcttgcccattgtagaaactcatatgtattgctgaataatcctgacactgaatcattgtggtaggcagaataatggctcccaatgatgtctatgtccaaattcaaaaaccctgcaaataggaatatgttactttacatggcaaggggaaatcaaagttgtagataataatcagctgatcttcagatatgatgaggatcctgaatcacttaggtagtagcaatataatcacaggatccttaaaaggtagaaggggaaggcaggatagtcagtgtcagagtgacacaagaaagagtccaccggctactgttggccatgaggatgaaaggggccatgggcccaggaatggcagcacctccagaacctggaaagcacaaggaaatggactctccctgagagcttccagaaggaacgtaactctgccaacaccttgatttttaggacttctgacctacaaaacttgaagataatatacatgtgttatttttagccactacatttgtggtaattggttatagcagctgaaaaaatatatataataggttgtttttgaatgaacgaatgaatgaactcatggatgtgggaggtcaaagtagacacggcggctgggcgtggtggctcacgcctgtaatcccagcactttgggaggccgaggtgggtggatcatttgaggttaggagtttgaggccagcctagtcaacatggcgaaaccctgtctctactaaaaatacaaaaaaattagctgggcatggtggtatgtgtctgtagtcccagctacttgggaggctgaggcaagagaattgcttgaacctgggaggtagaggttgcagtgagcagagatcacaccactgcactccagcctccagtccagtagacatggcacccagcacccccagaggcattgtgtgaagttccaagaaggtactggaaggtgaatttgcatctatatctatcccttgatattgaacttcccagcctccaaaattgtaaaaagtagatttctttatcaattacccagtctgcggtattctgttatagtgacacaaaatgggctgaggcactgaccaacaaaaattgtcctgagaaagacaggggcacctattttaataatggcatgagaacaaacaccattctgaaagaaagcaaagggtttctctgagttttaaaagcacacaaaatatttaataatagattataagtattgatgatgaagactacttatggattatttgtactttcccctatggaaagcagaaagattttaactatggttatcaaaatatattatgataaaatgttggaggagaatttagcacaaaactgtgatttcaagagaataaaatgatttaatttcttaccgattaggagattgtagaggagaagaaaacaattcatccatcgaaggcaatgctatcatggagtttagcaggaacttaagtgaatgctttagtgaaaatcatcaaccatatgtgactactttaaaaagcctaaaaatgttttttaatgctaaagttcacagaaaataaacttctaatcctttaaatatgttagattaaaatatttttattataaaaaattcagaaatatttaaaaaaatctcagttaacataattaagattaatcttggcaatgtgaaaaaaacacagttgtcttttctctgatgtatcgtgttaattaaaaagcaaacatacatattgttttatgttgggttatgtttccgaaacagttcaaatatgcttcctcccacataatgtttaagatcataaaaaatataaatttttgttcattgaatatttatatttttatatcaactataattatgttttccagaatatcaccttaaaaatgctttccaagatctttaggcaagttaaaaccttgaagtaatattaaattaattgaaaatcatttgatactcagaaaatttcaaagtaagataaaaagaatactgaaacattaactactaagcataattttaagtttgtatacttttatttttatttttacatgctcgagggaagccaaatctttagcttatgttaatgaccattttcatttttgccactttgcaaagcgaaaaaaggatgtgtgtagctataaaaaaattatgttttatgtgtctctgacttctgctagtcagctagaatgcttatgtacaacacacaatctcaattatctgtcaagtatcttgctgaaatagcaattatagttatatagatggttacaactatactagcagaaagagtgagagaaaaagaaaaacatatttatgcttttttttttcaagaacaaagactggtttttgaataaagcagcagttctcaacatcttttctctccatccagtagattcttaaaaattactcaggaatctaaagatgttttgtttctgtagtttataatgtgggttataagtatcaatatttgatgttttaaatcactaaaaccagccgggtgtgatggctcacgcctgtaatcccgtcactttgggaggcggaggcaggcggatcacctgatgtcaggagttcgagaccagcctggctaacatggtgaaagcccatctctactaaaaataaaaaagttagctaggtgtggtgatgcacatctgtaatcccagctacttggaaggctgaggcaggagaattgcttgaacctgggaggcagaggcagcaataagctgagatcagccactgcactccagcctgggtgacagagcgagactccgtttcaaaacaaaaacaaaaacaaaactgagaaaataaaatatatatttattaatgtattgggaaataacaatgttgactccattagataataatgtaaataacattttcttaaagaaaatttgtatgagaaaaatgacaaccttgaacatttttacaaaaatatcctgaatgtttggcttaatagacaactgatgggttttcaagtctgcttctccatttaatctcttctggtcatatagcctctgaaaaactccgtagcttagtattgttatgaaaataactttggtgtcacagttcccctgcaaacatttcagggaaccccagaagtcttcagaccacactttgtcctaaagtgtctgtctgtcctacaatgtaaatgaagctcacagttcccctgcagacatttcagggaaccccagaagtcttcagaccacactttgtcctaaagtgtctgtctgtcctacaatgtaaatgaagctcacagttcccctgcagacatttcagggaaccccagaagtcttcagaccacactttgtcctaaagtttctgtctgtcctacaatgtaaatgaagctcacagttcccctgaaaacatttcagggaaccccagaagtctttggaccacactttgtcctaaagcgtctgtctgtcctacagtgcaaatgaagtacaccacttggagagtgaattggacttgtgttggtttataatgctgatatggttaggctttgtatccctgcccaaatctcaccttgaattgtaatccctgtaatccccataatccccaggtaacgagagagaccaggaagaggtaattgaatcacgggggcgcttcgccatgaagttctcatgataatgagccagttttcaggagatctgatggttttataagaggctcttcccctttccctcagcacttctctctcctgtcgctttgtgaagaagatgcctgcctcccttttgccttccatcatgattgtcattttcttgaggcatccccagacatgtggaactgtgagtcaattaaacctctttcttttatgaattacccagtcttaggtagtatttttatagcagtgtgagaatggattaatacaaatgcctacatatatctaaaaagaaactacaaagatacatcaacatcaaaattttagcaaaaattacttaacttcaatgggtttgcttcattggtttactgattaggccttgacccacaatatgaaaaaatgtccagtgaaagcaaattcctctgccttctgtctaatctgcctacagagcagagattctgtgtctcatcagaatagttttctgtgattttagatgactttattatgcccttgattatttaagggcaaaaaatgttgcctcacttaaggaagagctaagattctttacaattgtctttatcctctatgttttatgcttgtattttaaatatatgttgttactttgagagacaggttttttcccctcacttattcacgatcctgtattaatctagtaaaacaatctcctctgacaattattaattttaacttcccaacattgaaccccaaatttagataaaaaatagaagtttcaggatgtttttttctccctaaaactaactttgagatctcccaaatggccctggaaaatcaccaaagcttgttctttcaacttataaatagatgctagaaataattaggtctgtctaatgtgttattttaagagttgcacaggaagaattttcagatctgaagaaacactagcctcctctaggttaagtttgcaaaatcttattactataaacatttcagaaattgtatgctttatggaaagtctctggtgccctttctgcccaccatatgaggaaacttcaaaagttcacagaaaatgcatattatagaaaaactacgcatggattccaatttttgtgccaaaataaactcatactaatttgttacaatgtgtctgagtaggatccagtttgaggcactaaagaggataagatggtcaggtgtggttggttgctcacacctgtaatcccaacactttggaggccaaggagggtgaattgcttcagcccaggagtttgagatcagccttggcaacatggtgaaactccatctctactaaaaatacaaaaaattacccaggtgtggtggtatgtacctgtaatcccagctactagggaggctgaggtgggaggattgcttaagccggggaagttgaggctgcagtgagctgagatcatgctactgcactgcagcttgggcaacagagcaagaccttgtttccaaaaaaaaaaaaaaaaagaagaagaagaagaaggataagacgtgagtatgaaaagagtccctatcagagcaacatgaattctgctaaaatccaagcaacttacagtgaaacttaggtgaaaaaatagtgaaatcactgatgtttcttgaaaattttataacgacaatgccccaaagaaatgagcagtttacaaattgataactcctgtttagaagggatgagatgatgttgaagaggaagcctgcagcaatagaccatccacatcgattcacaggtgaaaaattcatcctgtttgtaccctaactgaagaggaacaatgactaacagcacaaacaatagccaatgccatagacttctcagttggtgtaatttacacaattctgagtgaaaaattaaagttgagcaagctttcctcttgaggggtaacaaaactcttgtgcctagattagtgacaaaagtggagctttcaatggaaattttaaacaaatgagatcaacatcctgaagtatttctttgaagaattataacaggagatgaaacacagctttaccagtacaatcctgaagacaaagcacaaccaaagcaatggctaccaaaaggtggaagtggtcgtcaggcaaaggcaaactgatgaagaacaaaggtcatggcaacattttttttttttttttttgagacagagtctcgctctgtcacccaggctggagtgcagtggtgtgatctcggctcattgcaccaccacctcctgggttcaagcgattcttctgcctcagtctcccaagcagctggggactacaggcgcatgccacaacacctggctacttttttgtatttttagtagagacagggtttcattgtgttagccaggatggtctccatctcctgacctcgtgatccacctgcctttgcctcccaaagtgctgggattacaggcgtgagtcaccatgcccggctggtaacagtttttgggaggctcaaggcatttttgcctgttgactttatggagggccaaataaagaaaacgtctgcttattatgagagtgttttgagaaagccaaagctttagcagaaacatgcccaggaaagctccaccagagactcctcctgcaccacgagaaagctctgataactcttctcattgaggaagggcaaatatgcaagtttcaatgagaaattattaggcatccactttacaatcctaatttggctccttctgacttatttttgtttcatatttttttttttttttgagacagagtcttgctctgtcacccaggctgaagtgcagtagcgtgatcttggctcactgaaacctccacctcccgggtgcaactgattatcctgcctcagcctcccaagtagctgggattatgggcgctcaccatcatgcccagctaatttttgtatttttagtagagacagggtttcaccatgctggccaggttggtcatgaactcctgacctcaagtaatctgcatgccttggcctcccaaagtgctgggattacaggcatgagccaccacacccagctgtcctaaatttaaaaagtgtgtaaagggtccccatttatcttcagtcaatactgtaaaaaagaatgtactgatgtggttaaatgccagcagcctcagttccttggggatggactaaacggctgctatcatcacttacaaaagtgtctggatcttgacagagattatgttgagaaataaagttacatttttcatcttttaattccattttttttccacaaacattttgaagtatgcttacatgttcttactatcaggagaaacactgatatcaactcatatacaacagaaaattttattctccaaactgaaagtattggtcgcagcagtaatttaacaacagcttttaagtctttatcatctatagtcacttgtttcactctgatgcttttctaaggctttgctttaaggtacagaccacagcttgtgtcttcaacaaaagacagtttcagagatttttggaaaagcgctctgaactactgacatttcaaacagttatctcctgggcatgggtttctgagctgagaatgcttagacaactttcagatatatcagtggactatgttacgatttctagaactctttttagtgaaatcagattattaatctaagatccagcaggagaagaattaattatttaggactgaatgagctgatgaggaaaactctgttttgtttgtttgtttgcatgatgttgttgtaatattccattttctagatatatgacaaagccttttgtctttcttcttaaactttctatcatgtacaagaatctagtagactccacttttctacaatcaaacgaaacatttctaaatgatccctgatttttactgacactccagatttcatacattcttcctaaatttcattacttttcatggcaatgtaatagtctgcacagaaatcagtaaaaatctgtcctactttttaccagaaaaataattggacaacctaggtcaatataaaataaattgggcaacctaggtcaatataaaataaattgggcaatctaggtcaatataaagcatcacatttgagaatggttcttatttcatcagatctgacattctgctcttaaggaacaactgttgattttgcatgggtccacagaacactctcagggaaactggcttaccaggctccagcgatacagatgggaagacaggtaaaatcctggcacattagaagcattaatacattttcaggacttcaagagagtttacccaaatttacatgttatacaggtataacctagtaaagacagccttgagcttagttttatagtcacagaataataaataagagcaattttaaaacacaatttgaaattccttataaaaacatttgtggttttagtagttacattgtatggttctagatggaagaagtaaagtcaaggaggcctatatagtaaattaacagtcctaccaccaccatataactaattaggcccaaacaaatgagtccaatattttttgtgattattaaattttgagattattataatcataaattgggatagaaagtaagaagaaattttgaaggacgttgaaacgaaagaaacaagatgagtgggtgtgttatgaaatgccaatcctgtcatctgatttatgggtatgtgccacttacagtgtttgagccactgtataactttaaaattaatgcaaattatttgtgtctgtagagacacaaatagattttgtctatgttttagaaatgtgagtgattctttcctcctcaacaaaaaccactttgcatttattgtcagatacgtttcagcatttgtgattgcctagagatgacttccctttgcaattcctttgaactggtttttaacatctgactagtttcctcaaaatttaaataaaatctttgatgtgttcatttatatttgcctgagagtcatgactttgttttaaaaaattatacttttaacaatttaaagaaatcaatattaggggattgttcttgattttgaaaaggaaaaactaagaatatcaaccaacttcaatccaggactgctcagaagctggatagaaaaaataatgaggccaggcacagtggctaatgcctgtaatcccagcattttgggaggctgaggcgggaggatcacctgaggccagtaattccagaccagcatggccaacatggtgaaaccctgtctctactaaaagtacaaaaaatggccggatgtggtggtgcatgcccataatctcagctactatggagactgaggcaggagaatcacttgagcctgggcggtggaggttgcagtgagctgagatcgttccactgcactccaggcctgggtgacagagagagactctgtctcaaaaaaaaaaaaaaaaaaaaaaaaataccgtcgtcgggcatggtggctcacacttgtaatcccagcactttgggaggccgaggcaggcagctcacttaaggtcgggagttcaagaccagcctggccaatatggtgaaaccccatctctaccaaaaatacaaaaattagtcgggtgtggtggtgggttcctgtaatcccagctactcgggaggctgaggcaggagaatcatttgaactcaggaggcggaggttgcaacgagatgagatcgtgtcattgcactccagcctgggtgacaggagcaaaacctcatctcagaaaaaaataaaagaaaaaaaggcagatgttaaaaacaatttcaaaagaaatgggaaattttaacatggtttatattttagataaaattactaagtaatttttttattttaaaaaattaataaacagttttcttaggggtaaaattggtactaaataatggagttattctctttttttttttgagacagagtttcgctcttgttgcccaggctggagtgcgatggcgccatctcggctcaccgcaacctctgtctcccgggttcaaacaattctctgccaccatctcccaagtagctgagattaagtcatgtgccaccatgcccggctaattttgcatttttagtagagacggggtttctccatgttggtcaggctggtctcaaactcctgacttcaggtgatccacccaccttggcatcccaaagtgctgggattataggcgtgagccaccacacctggccaatggagttattcttaggccatgcttgctgaagtattgaggtgtctagtatcacaaaatttgcaaatcatgttcaaaaaatatagcaaaaaaaaaaagaaaagaaaagaaaaagaaaaaagaaagtgtgtctttgtgtatgagcacaaaggaaaagaaagaggacagagccattgagaccacctgttaatggctggtgccagcaaggtggtgcctccatggctgctcaatgttgatataatgttgatgtctctcaacttctcttgaagttgaaaattttcaaaataaaaatggggcaaaataccagagagaaaatttgcatttatttaaaaaacactgagcattggttgagagttttagaaccagaggacataaaggttcttgataacatatgtatttttcattcctcagatccctagccagtctatactcctttgttccagacacactgataagagaataatccaacttagttcatgaccataagttaatgattatttcagatcctgaaaaagaagagccggaaagtgactgttcagaaatcagaatgtctatgtggcatgtggcaagggaagaaggtacattcaggctccctgcaggcgcacaatctacaatgcaggaccacccatttccagtctctgtgatgctgaccacagcctcttagagctggaactaatagcaaacctcacttggtgtttgtggtctcctaatgcattaggttctccccgcacacaccatgaaattcatcagtactaactgctttggacacagaatattattactgacaggacagaattgaaagaggccatactgatatggaagtgctgggaagggaatggcatggtcgctttaaccaatatggaaggtggggaagggaagtgctgggtagaggagggcatggtccctgcctagggctccactcttgggcctgtgcccagggacctaggtgtggacaattattttcattttcctgccccaatgttggcatttcccaagaccaccctggccttccacatccccatcctgtgcctataaaaaccctgagagcctagcaggcagacacaggcggctggacgttgagaggagcacatcagcagaggaacacaccgggggctggatgtctacaggaacacaccaacagccaccagcatgttggccactgactggcagaacgatgtggagtgtggctgaggcagttggaggagatcccaggctgctgagcagcccgactccaggtgaaaactatctctcttctggctcccccagctgctgagagctactcaataaaacctcactctcattctccaaggccacttgtgatccgattcttctggtacacaaaggccagaaccctgggatagagaaagtcctctgtctttgtgataaggcaggggtctaattgagctaacacaagctgtctacagatggctaaactaaaagagcaccctgtaacacatgcccactggggtttcaggagctgtaaacattcacccctagacactgctgtggggctccaacagccctgtctgtatgctcccctagagcagccgggcactaaagaagtgagccacgcccccatgacatgccctgggaggaggacaaggaaacttcctgtttcaatacctggttataaatattgctggagaccataataaagagatggatcatagaggaaagatcatgtgaaaaaagggtgagtgtacaattttagggtaaaatagaaatacgttattaatgaagcaggaggtgggtgttttaattttggtccaagttttcagttaaaactttttgcttataaaaataatatctcccaaaagcataagtgggttcttgcatgaacagagaagaaaacaaagatttacattcctataaattacagacaacctgaaatatggccctcgagctaccaaatttactaaagcacactggcagtcattaaaattgcagaacattttacttcagtggtacaaccacaggggcctctggggaaaggctgggcattttactcaccaaaacaactcattggaactaaaggcatttaaaattactccactcaggctgggcgcggtggctcactctcaatcccagcactttgggaggccgaggcaggtggatcgcctgagatcaggagtttgagatcagcctggccaacatggtgaaaccctgtctttactaaaaatacaaaaattagctgggcgtggtggtggatgcctgtaattccagctactcgggaggttgaggcaggagaatcgcttgaacccaggaggcggaggttgcagtgaactgagatcgcgccattgtattccagcttgggcgacagagcgagactccatctcaaaaaaataaataaataaaataaaataattccactcagcaagattttgttgttggatacttccttttgttccaattcaaatacagtgcatgacattggaattgcaaattgctcccattatacctacctgaaatgaaaaaactcaagagatttgaccaagaaatatgaacacctttacatcaacagagtaaatgggagaagactgttcatatcatttatttggaaacgttaaggttggaaccacaatctaacatttgacagaaaaaaattatatcagagatctgtaataaaaaatacagcatatacccctttaagagtaggcaaaaagagaaaatagctggagtatccaacaggagatattttgaggcaaaaaatttaaaatagacatttgcaaagatgatgattagggaagatggttttcttctaaagacacatgcagtgaagaaagaaatctttattcttatctgggttgcaaatggcactttttgcaaaagaactgctacttacttctagagtcagctaaaatgatatcaaacttttttaaagatgccttcttaaggcagaaagtgtcttaatttagttttaagatattttaggcttattaacctcaatagtgaacttgaagattttccattaaatccactgtccatcagcctattatagacatattacaattctcctcccaacatcttgccttctttatgaagttgacgcgaagctgaaaataattctgtcaaataagacaaaaaaaattaacaaaccacaaaattctatttcatgtcattcatcaaatgctatcaatacactctgtgccaagcactgggttagaagagaacaatgatattatttgtcatttattttaactttatctaattcattttttataaatgcacgagtaagtatcttttagacatgaaatgtaatatgtggatagtatgtatattttgaaggaatataacagtttaatgctattttcacaaatgattattttatgctttaaagaagtttttggtaagtgaatgtggaaatcctgaaataaagtcaaatgatatgatttgcattttcccagcagcctctaaggaagcagcctgagggatcagcctgaggaaataccctgagggatcagccttgaggaatcaggtgaggcatcagcctgaggaaataccctgagggatcagcctgagggatcagcctgaggaaataccctgagggatcaacctgaggaagcagcctgagggatcagcctaaggaaacaccctgagggatcagccttgaggaagcagcctgaggaatcagcctgaaggatcagcctgagggatcagcctgaggaagcagcctgaggaagcagcctgagggattggcctgaggatgcagcctgagggatcagccttgaggaagcagcctgaggaagcagcctgagggatcagccttgaggaagcagcctgaggaagcagcctgaggaaggagcctgaggaagcagcctgagggatcagcctgaggaatcagcctgagggaccagcctgagggatcagcctgagggatcagcctgagggaccagcctgagggatcagcctgaggaatcagcctgagggaccagcctgagggatcagcctgaggaatctggctgcagggaaaatagaagtcctatcattggactttatctcaccttctctcaccatgttctgtattgcccataatctgttttttgatataatttcaagatactgtccctgaaactctgcaatggggggcttaaggaatgtgatagcttgacaaaggtttggaggagggtttccaggataccctgtagtgctctttcaactccaggtcttaaacagggccacattccctgcaaggcccggcacagaccccatgctgaatacatagaagctgcttattgccttgttgccccatcaccatttttttttctgttctgcctccttcttggggccattgaaggttcctcagcattgggctccaaatcccttctctgtccttcccacccacttctgtgctaagtcccagaacctggtattgtcctttcccctagatgatgagtctctgagcctgcagactgtctggatcactttctgggggccaagcacagtgtctgctaagaaggcgatccctgagacttttattttattatctaaataaaaggtgaaagaatctgtccaaaatagttgctttaggaattgtactccttataaagcaaagaacacactgtcacagaattgattttatcatagtcatgaaatctatgttagaagaaaacagccctttttctcagccaggcagagactttgaagagttaacttttactgtatcacagtggcctacttaatgctatacaagaacacagaatacatgctgtatttacaaacttcaaaggaaactagctatttgcatttttatctgtaggagaggagagaaacatgtttcctttttgaccttttatcctcaagttatatatgaggaagattaaatttgtcagtattgtcagtgtaatctatttagggttttaaaccataacagtggaaaatatcaagattgactttaaagcctactgaatataacttttttaaaaaaaagctggatgagacgctgaaatggagagaaagccttagttatgggaggccggattggaagtttttcaaaataagcatcagaaataatgggccccctattgctcacatgcagacatcaatcttttgtttgtcctggcaaggtgagaaaaaaaattgggttaccatcaaagccaggtaatacggcccgctcatttgtaaatcacatggctttagtaagcaaagatgcttcctagatttaatgaatgtggtatcagaatgttttctttgaatgagtacagtggtcttctatccggttttcttccttccatatatctgtctctttgaatgacaccaagtggattaatcttcctaaagccccagttgggaaaattatcattctgccttctcccaagctttcaaccattcccactatatgccaaataagctcgttatgttgcattcaaagccttctaggacttaacagtaacctatctttctttttatctcaaatttctctcccaggtacaccaagttgcagctaaaccaaactgtggtttgttgcctgtttctggatctttgctcattcttcaccatcactgataatgttctctctaccccctacctttcaaaatcccacctgcacttcgagattcagttcagctcacagatccatcttgaagctagacatgacagtttccctcttttgcagtagcagagaaatatgtttgtactcacaatatgtgtcacaccctagattttaaagctcccgaaatggatgagccttcttttactatttttatatctcccactgtcctgccaaggacgaagaaatattttttatatttctatatattattcctactataaattccttagggtgatgagaacttccttagggtaaacacctagtttttggtattatacttatcccttacagtatttagaatttatttagtaaatgcttaataaatattttttaactaaatgagtagaaaccgtagaatgagtagaaaattttttcctaaaactacaagtaggaattttgtctatctcagagacagcagaatatgcttagtatttcaataaaggacagttttttagaataaatagcgtactttggaagcctgaaatagctggaaaagatgaagtttcttatttattatgcctctggatgtgtttttaatttatttccctagaagagctcttaggcaaagtgataacttggcttagaatctttaggagaaataaagatgaaaataaatacggttctttaccaaattgcatgcacatcacacacacacacacacacacacacacactctctctctctctctctctctctctctctctctctcaatacaaaagagacagcgctaaccctgtcttgaatccatagaatcctcaaatgcatgcatttcagagtattgatggtgacactgataaaacattcagaaaatgacttattctgaatctgctgaaggggtgtcctcacagtgaatgccttcctttccttctgagatccaccaaaaaacatactagtctgttcagagtgatcttagaattcagttatttttatggcttggaaaatctactcctggaaatctgttctttagaaatactggcaaggctgtaaagatacatgtacactgctgttaatcccaacatttggagaaggaaaaaaagtaagcgatctcaatgtctactaatagagcaaagctaaataaattacagtacaatggaatgtatactctgcagccgttgtgataaatcaagtatgtccataggggtccttggttaaaaggctgtccatgatgttttattaaatgtaaaaagcgcgttgcaaaagatggggaaatacccaaattgctgaacacttctgtagatctcatttttctaagagtaatattctatgtatctatgcacttatatttatagacaggcatacatatgtataaatttgagtacatatgttgatgtctgcaagtgcttatacatctgtttatgtgtagatgtatgtataaatgtttatacgtgttatatgtaaaatatataagctatatatatatgcatgtacatacctttatagatatttttacagccatagataaaaagatgtagaaagattcagaacaatttagaataattatctcttttattggcttaaaggagggaaaagtgaacttttattcacttaatagaaaaaaagaaaaaagtagcagaagttcaaaactgtggtgtttaatttgggggcctgttctgattcatgaatcagatttgaaatatacttgaagccttttcttaaaaatggtcattcttctgacttgatctgcagactttattgattccaaatggttcacaatgaggctgtgttctgtcatcttttacagcaattgttcctactttcatgtatctgcctgtgactacaggaggcagcggcttccccagaccactcacctccctccttcacacctgcctggcccgagtcccacagtgatacctgtcatggaactacatcttgtattcatgtgttaaacagagctctgtagttgattcgcaagaaagaaagttcctttcagtgaaacagagttgtagcataattgttgttttaaaacggtatttttcacatcaaaagatgatttaatgtagaattattttttaaatgagctgccttcatagatttaaaatatactttaacaaatatttgacttactctcacatacttgacattacctaatatgtaccttgtacaccttttttatggattagagtttgaaaccaaaccagaggcaccttctgttatgccatcctctgaaagcatatttcaggctgagaatatctattttgcattttcttattatgtatcttgagatgcaatttctttcttttcttcttcttcttcttttttttgagacagagtcttgctctgttgcccaggctggagtgcaatggtgtgatcttggctcactgcaacctccacctcccaggttcaagcgcttctcctgcctcagcctcccaagtagctgggattacaggcacgtgccatcatgcctgactaatttctgtattttttagtagagaggggatttcaccatgttggccaggctggtcttgaactcctgacctcaggtgatcctcccacctcagcctcccaaagtgctgggattacaggcatgagccaccgcgcccggttgagatgcaatttctataacagccctcaccaactattttaggtcttcctgctggactcatttgctcatttattcagcagatagttactgaatacctacctgcttcctgccactcacttttgttaagtgctggggatacagatgtgaatacagtgaacatagttcaagtctactgaggcaggcaacaaactttcatcctacagtctcctaaataaaggtagactagcacattgcattatgacacatgaaagaagagtaaagaaggaggtgagagttgtcacaggctgcaagaatcaggacaaggaactgttctctgtggaaaatcagataaacagagacctgagacctggacaggagtcagctgcatgaaaaaatgcagacaatttctctggccatgagacatgcgaaggccttgagatacagaaagatttggaacttgcttaggaatgggaataaggcccatgtgtttggagggcaagaggggacccagacacagagccgtgtcagtaagggcacatctgagtaaggctttcaagaagctggcatttcaacacagatccttctggcagtcagtgtgcatttaccaaatgggcctgccattatccgtacatgttctcatgtagtataaaaagtcgcaggaagctttttgggaacttgccccagaatttccacaaaagcagagctctctgatttctacggggaggcagagaggctggagggaagtggaccagtgagaagtggactgcagggctgcagggaagcctgatcaacacgtgggctccaggctgctggatgaacagagcctggggtggacttcagcggggtagttccatgcaggacatgatccacacaacgctatgaagtcctgttccctgcccagagccaccagaagtatcttcctaaagcataaactggtcactctgttctcctgacttaaaaactccaggctgggagtggtggctcacgccagtaatcccagcactttgggaggccgaggcgggtggatcacctgaggtcagagttcgagaccagcctggccaacatggtgaaaccccatctctactaaaaacacaaaaattagccgggcattgtggcaggcgcctgtagtcccagctactcgggaggctgtggcaggagaatcccttgaacccaggaggtggaggttgcggtgagccgagtttgcgccactgcactccagcctgggcaacagagcaagactctgtcttaaaaacaaacaaacaaacaaacactccaatgactccctgatgactaagtgatagagttataactccttgaaggacacaggaggccctctgcaagtggatcccccaaattctttgtctacttttacttccctgagatataactacagcttacttcctaccccatatgggccaagacagagcactctctgtgattcagcacatgggattcctcttccagggatgactaaccacctcctctgcatggtaacctactgctgataccacaagacagcctgctgcctctgtcctcctgattccacagcttttggagggcagcacacggcactggggagaacagcgggcatgcccctggctgtccaggtcagctcaatttaactggtggtcagtggcttacagatattggtaccagctatccctaacagctaaactctttgcaaagcatctcctcatggggcaaagtaaaaggaaggtgggagattgggaaacagttacaggtaactaaaacagcatgtgccaaggtcctgtgctgttttgctcaatgaactggagaaagaccagtgtctggaatgcagtgtgaagtaagaagaagccaacagtggcaggctctgattaaggttttaagaagtgcaactatcttttgcttttacaaaatattagtggaatggtgactgatggacatccccgtgaaatggcagcagacaacacagaaaacatgaatggacccaaccatatgttaaattggttctatctttggccgggtgtggtggcttatgcctgtaatcccagcactttgggaggccgaggtgggcagatctcctgaggtcaggagttcaagaccagcctggccaataagacgaaatcctgtctctacaaaaaatacaaaaattagccaggcgtggtggtaagcacctgtatcccagctacttgggaggctgaggcaggagactcacttgaacctgggaggcagatgtttaagtgaagccgagattgcgccactgcactccagcctgggcggcagagtgagactcagtctcaaaaaaagtggttctctctttgcaatagcaaagagaaagaaaacaaatggttacaaaaccaaaatacagtaggggacactgataaaattcaatttagcaaattcttcctggcctgtgaacttgctaagggtatggcgttgtagggactgtgaaagatgaatgggacctacagactggtttatcaggtatgagggaaacatttaaatatttacacaaaatgcaatggggtttcaatataaaagaaggttcagaaggcatcacagaacacgtgaaaattgtactgcgtcttcgagagttgtaaaagcctcaggcgaagggctagaagagggagtttcaggagaaggaagggcagcagagtgaagacactgaaacaagaatcggaatggctgccctattccaggggcattgagccatgtccctagagcaaaacgtgtctttttagaaagaaagaaaatcatcaataaattataatttttttttacatgtcaaagaggaaaggtacgggtgttaagtaatcagtctaaaaaaagttttggggcaatttcaatatttgttcataagaattcatgagtagggtttttacgttactattactttaagttgctgtaggcagaatttagcttgaaggaaatttaagatttcttgataattaaaatacgaaacagtatggcaagacaggctggggaactccaagtctgccttaattagatgctaaaaatagatgtttctaaaagtcctgtttcctttctaggccatccaacattctggagaagtgcttttaatctcagcaatgtgctaattgtttctaatggcctgtaaacaagctccctgaactattaaccttcttctctctttagccagagattcaggaaattagtctttgaaagaagagtctccagcaggttgcccaggagggtgtcccaaagtacagacactgtcactggtttggaggaaaatcaaggtcagatctgagcagcaagcttgtaatgtggaatagacaagctcaaaaccttaaaaagaaagatcactccactcctctctggtttagtttggttgtgttcctatctggaaggagaaatataaatgttaggctgggcacagtggctcacgcctgttatcccagcacttcgggaggccgaggcgggcagatcatttgaggtcaggagttggagaccagcctggccaatgtggtaaaaccccgcctctactaaaaatacaaaaagttaccttagctaggcatggtgacgggcccctgtaatcccagctgctcgggaggctgaggcaggagaattgcttgaacccagaaggcggagattacagtgagccaagatcgagccactgccagcctgggcaacagagcaagactccatcttaaaaaaaaaaaaaagaaaggaagaaggaaatgtaaatgttggcacctctccaatggcttccaaacacaaacacaagcccataatcccaggatttttaaaaaacattaaaacaatatccttcagttgacaagaatgttgaaaatttgattgtgctaagttaaaattgatgccatattgaaaatggcgttcaatttaatctcagaaaggcaatgcctacctgaaccctcggaaaggagctggggcattgagggtgccaccctctgttctgcttgtccttttcagaacatgacaaaattaacttaatttgtcatgaaagatgaatgatcacagagtagccaaaaaatgttgtgaaaaagatggtcagtgaagagaggctttatcaaacatatttcaaactttatttaaaattacaatagtcggccaggcgccgtggctcatgcctgtaatcccagcactttgggaagccaaggtgggcagatcatttgagctcaggagttcgagaccagcctggccaacatggcaaaaccccatctctaccaaaaatacaaaaaattagctggggatggtggcgcacatctgtggtttcagccagttgggaggctgaggcaggaggatcacctgcacccaggaggcagaggctgcagtgagctgagattgcatcattatactcaagactgggtgacagtgagactccatctcaaaaaataaatacatacataacataaataaaattacagtagtaaaactatgtgcctggcacagaatgagcaatggaacagaagtaaaagcctggaggggagaacccaagagagacagatatttatgtgtgatctcagcttataaaacctttccaattagtgaggtattagatgatttgctaaatggtattagaataatcaacataataaataataataaaagttggatctttttagcattcctcaattgaggtaatcaggaggatcaaagaatcacatgtataaaacaatgaaagggtaaaagtaggatgacgacgtgagtcaatcaagttaatagcccaagaggggccaagacatgcccacgtgagcagagaaaccaaaatccactgatcattgactacacacaaatgtaataattgatatggaaagacactctaaacagagtaaacatatggaaaagtgctagcattcctgacatctgaagaaatctcctgaatttatttatttatttatttagatggagtcttgctctgttgcccacgctggagtgcagtggtgtgatctcagctcactgcaacctccacctcccgggttcaagtgattttcctgcctcggcctgccaagtagctaggaccacaggtgtgtgccaccatgcccagctaattttttaattttaataaagacggggtttcaccatgatggccaggctgattttgaactcctgacctgggtgatccacctgcctcggcctcccaaaatgttgggattacaggcgtgagccactgtgcctggcccaaatttatttatttattttttaagacaaatatccaataggaaatttagggtggggggatggcaggtcaaaagaagtaattcacagaaggataaatacaaacagccaggtttaccgggaaatcacactcagtgtcaggggagcagctagccagcaaatggcccaacagctagcagcacaaccacgtccctgaacacctgccggatgccagccctgcaggtactgctgcaaagaggtgcccagataggataggtagaaacaagtgacacacacaagtcagagggcagcatgtgtgacagggtctcatcactacagcattctacacacacatgtacattccgaacacatcagcaggaagactgggcatcagagttacaagacaggtgtgagctagcacgacgcaccctgaatttcagatccatgaataagccctttcctacttataatcagtggtactgaggcagaatggggcgcacctaggaatacacactttagtacaaaacctgggcttgagaccctactgtaacttattgactatgtgacattgaattacattccaagcctcttcccacataagtcttggtgacttacgtgaggactgggacactaatagtatctacctcccaatgttattctgagcatttaaggaggccctgcatgtaaacacagttagcacgcactaagtttgggcaggaagagatttttcacagttgggtaaggcttccagcagatgcgacttggttgataggaatctcagccgtgtagctgaaacgtagcttctataatacatcgaagcgaagcacttagaggcatatggcttctgtgaatgtgctgcagcgctgagcagtatcttcttcatcagttccactaaagactggaaactcattataatcctggcaagactgaggtttagccaagaatgttctaataccacagaagctctgtatgccacatcactgatgccgccacagtgagacagaattcgaagtacagccagatgcttttagtaaggttctctttggcctgaccttttttccactccattcgccttgctttctgtgggaataattctctcaacttaaaattaccaaatagcattaaaaattctgcaatatttctgaaatcatattgacacataatggaggatttttcagaataaaattagatgactcttgtaattgttttattaaggaactgcaaacttgtttccattcttcctgaaattaagtattcatttccactgtaaggcaagaaaaaccagctaacattatacagtcaaagggtgacacctattaaacctgatcgaggtttttggaatttatttaaaatacagaactaaattacagtttgttggttctggaaaatgactttcagaattgctttatctctgtacaaccagactcagcctctccttcacagtgcaggcctcctaatcactgcctgtttaccatgaagcatgttttccagtattggctcagccagtttttcttccttcctttatcaaaatccaatggaaaagagccagccccatggctcaatgtgaaaggccaggagttcacatgcacaatcttaaatttggaactaaatgtatttctcttcagaccatgaaacaatggagaggaacaggagagtttggaatgtacatggtttaagcagtctcggaggaagtcatcgtcctgtctcacaaaatcattcctgggtcagccccacctcttcttccacctagagcaggctttcctgacctcagcatcattgaaagttgggcaagataaccctttgctgtggggctgactcgtgctttgtaagatgctcaacagcagccctggcatcaacacaccggatgccaggagcaccacccttcattggtgacaaataaaatgtctccagacattgccaaaggtccccattgggaaaaaactaccccggatgaaagccactaacttacagctatttaagggtattattatatctagattcttgcctcatgtcatattatcaaaaaagaaaacagagttacagagaatatttactaaattttacattatcataattatattcataaaaattacataattggccttaaaaacattattgttttcataggaaaaaaaatttcaattcaactcgccaaagaagggtttgtattaaaatttccttggaggccgggcacagtggctcacgcctgtgatccctgcactttgggagaccgaggtgggcggatcacctgaggtcaggagtttgagaccagcctgatgaatatggtgaaaccctgtctctactaaaaatacaaaattagccaggcatggtggcgaatgcctgtaatcccagctacttgggaggctgaggcaggagaatcgcttgaactggagaggtggaggttgcagtgagccaagatcacaccattgcactccagcctgggcaaaaagagctaaactctatctcaaaaaataaaaataaataaataaaatttccttggacagatgatatctgggatgtgaaagcatgcgtgccagtcacagtaaagattatatactctttcattatgcttcatagaaccatggctgtggtaagtttggagaacaaagtacagataagtcaagacctgttggttcaagtaaagacttacctacaatatccccctttcagttagcaagtcagggccaaaatcttggctaatatttactgtccatatgtgatcagcactgttcaagttttatctcttgtaattttcacaaccttttgaagaagttgagagactggggaacttgcccaggaaacaagacaactagaggtagaactgggttttgaacacaacattctttctccagggcctgtgctcttgattccagcctgttccatggaaaatgttcaccaaaggctaactcagcgggtgtccttgagcaccactgagccattcaagggcaaatcaatctatgctcagaaacaaatggaaatgaagactggaaaacaagaaaatcagatatggtgagaaactgggggaggagagaaaagtctgtgccttctgccagtctcagtgcaaaatcagtatggcataaaatagcacaaatggacaagaagcaagtgagagagtacagtgctctctcaggaaagcattccactgtatttatggaaaaataaactctctcaattaagccaaattttcaagataaaaggatagttccatccatctataatttagtaagggatacaacaataaatgttctgaaatttattctttaatttcctgaattaaaatctctctccatatggactaggagttgcaaaaacatatacatatatatgcaattatatatataattccagaaaaccagattagagttgaacagtgacacctatgtaaaaaccaatgtgtgtgatggagtcatcctatttcgtgcattttagcattttcctaggatactgttctatataaattctgtaatagagttatatataatataattactgtagctattagtgatttgaaaggccactttcttggaaaatttcaacttagtgttgtcaccggcattcctggtcattttctttgtgcatcctgtacacgtgtgcaggtgtactggactctgtggtcatgggaacctccgagtcttcagacacccgctggaagaccagccatcatcactcaagtctgcagccagctgcccaatacagaatggagtgagatggcaccttccttactgtcatacgtgtaaagtcttgcagtaggagaggatctgagagggagcagcaattccaggggaaactgttcattgataataacatctgaatgacatttgacagtttcctaagcactgtcacgtgaatgttgtttctgaactatcaccacaaccttgatactccttttaagtaggtaccatcaacatcatatgacagagaggtagctgagggtaagggtaaatgactagttcaagtttatatggcaagcaatcaactgcagatgcaaatccatgtctgtttttatttttttgttgttcttgttgttttttttttgtttgtttgtttgtttgtttttttgagccagagtctcactctgtcatcaggctgaagtgcagtggcacaatgttggctaactgcaacctccacctcctgcgttcaagcgatcctcctgcctcagcctccctagtagctgggattacaagtgtgcgccaccacgctcagctaatttctgtatttttagtagagacgaggtttcaccatgttggccaagatggtctcaatctcctgaccttgtgatccacccgcctcggcctcccaaaatgctgggattacaggcgtgagtcaccgcgcccagcccatgtcttctcttgattttgtttgctttctgttccaccatgccatgtttctgacagtatcgctagacaccactccagaccaccagcaaagaaagcagagggcttgcgctcagggggcaggtcctgaggagtctcctgaagtcctcccgtgcaggtcaaggctttcattaactacgcggatcaatttaaccatctctcttgtagaggagtactttaaaacctagtcaatgagtgctaatcacagaaatcatttcagattaatcttagaaataatcattaaataaatgtaataccctttaaaaaggggcataaaaacagattcaagttaagaaagtctagttgacaacaaaatgcaattccacatcccagaagcttactgaattgcattaagcttaggatgctaatattggatgtcatgtctctatatggttaaaatgcacaaagagataaagacgcttgcatttattttaaaaacttattataatacttgggtaatttatcagtgacgttgtttatttgtactgtggttaaatttttagcgcaataattgtatttcttaaaagacacgctaaattgttcctctcttcttatgcctgggaaaccatatgaagattcagtaggaaactaaattttgaagtttattccctaacttttctttaagatacattttgactatttgaatgttttatgttgttgctatttttaagggaatcatttatatcagatataatgagagaaatttaaagtaatttctacatcaaatcaatattatggtatttgtaaaaaataataataataattaaaactctgttttttctttgcagttgttttcattgtaatatgatacctgaattttatgtaagaatgtgagagtgggccaggtgcagtggctcacacctgtaatctcagcaatttgggaggccaagacaggtggatcacctgaggtcaggagtttcagaccagcctggccaacatggcaaaaccccatctctactaaaaatacaaaaaattagctgggcgtggtggtgggtatctgtaatcccagctacttgggaggctgaggcagaagaattgcttgcacccaggaggtggaggttgcagtgagctgagatcatgccattgacctctgaactgggcaacaagagtgaaactccatctcaaaaaaaaaaaaatgagagagaaaaaagaaaagaatgtgagagtggttagtttataatatagttaacatagttgaatctgactgttttttgctttcaaaacatgtattattccactaagtggtatcagttccctttgcattacagcagtcactggaataagttaaatattgttatttttgttatttcttgtccaaaaaatacacactgtacactttctcttctaatactgtcctaaacaacttttcgcaggattcactggttattctcctgcctgttgcccaagggctgtagaagatacagagagaagtaccacccagatcccgtttcaaataagtatttgctgctcagatgtgaggcgtgtggccagggatggcctctgctgtcagcatcggcacctgtccctggcagccgcaccgagaggctgagcgagctggggatctagcggttttccctttgcaggcctcggttccgacggataagataaactcacaccaacttctgcctcaatttctgcctctggagaagtccgcccataacagtctcctgccacagcctctgcagcagccacatataagaggttaaactctactaacatttccaaagcaatccttttagagaagtcttatctttcccaaatacttttctgtcaccaatgcccaatttcttccaaaactacttcttatacaattacgtgtccacactattcctcccattaatattaaaatatatttgcttgtagcaacatggtccctcctaactcaaaatatttcctctgaggtgatactcagggttagatactcccaaatgaataaatgcctcgtttctaaaaataactatttatgacatatatttcccgagaacaggattattaataatcataagtgatttagatttgtgtacagatctaaaattttcaaagtgtgttcacagaaattaacttatttgatcctaccaccacctcaggaattaaccaaatttaggaaattaaagtcacagtgattgatctgcccccagtcagacaatgaaatcggtggtgggttcaggagggaaagctgttcttatgacctccatcctggagtcatctgctttctgtgttacaacctgcacacctacagaccttctgcaaagtagaatgtgctccctgggggattggggtatatgatcctaaactccagggcttcagaatctgtaacttggatgttgccatttgaagctgaaatggaaagggagggctgtgctaacttggctccccgctttggtgccaccacactggaaaaaaaacatggttccaagtgcttactgcatggactcacttcatccttacaataactgcaagaacaagaagatgctcttattatctagaaggacagaggcaaaagatggcagagccaggttctgtacacacagtctggcttcaaaggcagggctctgaaccactgtgcttcatgtgtatcttgggaattggaaagacggctggagacaaacgcaaaagacatccaaatcttagcagtgagtaaagaatgaaaatgaaagggaaggcagaagcagaaacttctttagctgttggggataaatcacgcgataagaatttaagaattcaggggatgatttaagatcacctacatagtcacacatgtctataaataactcttggattaatggtctatgtatacttccatatttataagaataatgcaaatcagaagagccttcaccagacgaggccatttgaaagagatgggttttaagcaaactgggaaggtgatgtggagtgacgattagttactattagcaaaagggtcagtgctgcaatgatgtaggactgcagcttgctggggacagaaagtcaatctgtcttgctttgttagaacaagaaatgaaagtcagtctgtggatttaagaacagcaataccaactcctcacctacatggtagacagcttgcttttccaattgcagtttaggaacaaagggaaggagaattcactttgtcacagaattttcactaatgaatatagacaccaatgcaggaatatgtgttatatttgtgtgtaaccctaatcactattacctatgctacctctcctgaaccccagtggctgtggcactgtaaaatgggtataaataacattcaaaatgttaagataaacatacatgcaaaatatctaacaaatggtaagaacaacttgttagcaatagttggaccttctccagccttgtggaatatatactgatgtcacattatcctgacgtacacatgtgtctggactgagcgcacaagaaaacagtcctgtgcagtctggaacaccacaaagtcacttttgttccggctcagagaaggaatctaatgtggagacctgcaatgatagcaacaggtgttcaagtttgactttgtggtcacggtctggtcatttccagggtaatatgcaaggaggaggtacttcagcagaaacggaagctacgtgggatggcttggggttaggcaggtaatgtacgtatctagccggttgggtgtaaaagaaaagggagtgggaaaactggtgcatgctctgctcaaacacatagcaaatgattctatgtatttcttcaaagttctgtcttggccaagtattataaaagaatcttggggaaaacttagcctaaagaaataaagtttgggtccctgttctaccacgatacagtgaaaatgaacaagaggtgttcacaccttctgccttgcttgaactagcccggttccgtcacaccttcacctgctagagagtgtccccgtcgacggctttccctgccatcgacagaaatgcatcaggcttgatcagaaacgcaaggttttatctcagcttgaagcacctggaatagtttcttgagccacggatgaactcagtaaatatctgttgaatgaacagactaatctccttttaccttatctttgatggtagaagaggtattaaagatctcaaatgcctgcatgagactgcgttgcctgtgatactgatataatagaatgctggtatatctgtgtagcccagtgcctctcagtgttgtgaaaatccacatcgagatctagaaactcttgaaattccacttccggtgcacagaagatacagcacatgaggtcatgtttcctgtgatgcagaatgtgtcaaattcacaaggaacagaatgaacacaccacggcccttgctgcgataaatgaatttgcactccgggtgtctgaaactattgcttattttgtcacaaatagctctacaggctttgaaagctacaaaggacaactttgcaaatacttaattctaaatgtcatgagaaaatagagctacataaaggatgtttatagagggcaaggtagatcatattagtgctaatcactaaaaagtgtcccagcagtttaaaatttctatctgaagatatgaactggcacaaacattatttgcaatgaaaagtaacttcttcccctcacctagtttatagcaaattgctaattataaggataaaattgccattagaaataaatgcacaagtaatgcaatagttttctttaaaaaaaaaagttatttaaacactgtgggtatttctttcagatgaaaatggaccttaaacacaaagcttaactgttaacaaagttctagcaagggtctcttagatgcttcaggaatgtagcaccttttttttttttttttttgagacggagtctcgctctgtcatccaggctggcagtggcacaatctcggctcactgcaacctccacctcccaggttcaagtgattctcctaactcagcctcctgagtagctgggattacaggtgcacaccaccatgcctggctaatttttgtatttttagtagagacgggggtttgccatgtttgtcaggctggtcttgaactcctgacctcgtgatccacctgcttcggcctcccaaagtgctgggattacaggcatgagccacctcacccggccgctccatctttcttaatatccaccaacaggccaggcatggtggctcacacctgtaatcccagcaatttgggaggctgaggccggtggatcacctgaggtcaggagttcgagacaagactggccaacatggcgaaaccccgtctctactaaaaatataaacttagtgggcatggtggcatatgcctttaatcccagctactcaggaggctgaggcaggagaatcgcttgaacccaggaggcggaagttgcagtgagccaagattgagccattgcaccccagcctgggtgacaagagcgaaattccaaactctgtctcaaaacaaaaacaaacaaacaaacaaacaaaaaacacccaccaacagaaaatgaagtgcttaagatccagacagttacaacacgcaaggttgaccctaacggatacaaaattggtccaggatttgcaatattgccctgctcttcccagcgggggttgctgcgcacctgcggtgacagttaaatgaaaaggtaaggcataagaatttcatgcacaagcacctgtgacatctctaggaagctctgctgacgcagctgctcacatctgaagcccacaggttcaccacgggagaaatgaaggtcactggctgacattaaaactgaatggttcacatttcaaagtaccagtggggataaaatatttcttctatgctttcgtaagtaactgaccccagataatatggcagcataatctatatcctgtgacttggacttcaaaattggacatttccccttatttctaacacctccttaaaaatctccattgatttctgactaattcattgttttatctgagttaaataattaactcaattagtctattaaattcagaagggatttttaaaaggagattgtttcatgtgaaaatagtttgctttctgtttgttgcactgcatgaaacagattttcctttaagtcagcatttatttaaacctctttgatgcaaagtcttgtgctggccacggtagggaggaccagtcacactggcatgtcagtcaatttgggtcttgccctgcaagcagcctgcaattttgcagagcagcagacttggaggcagctctgtatttttctactcttactggtttttaaagacagacacacaggacaacagcgagttcaactttttcttttctctgaatctcactttactgctacattctccttttcacatgcaaatccaccttccggcctcaccagatagccttgcttttcgctgtacagagaaagccaggaccatgcaggttggagggtaaggtgtaatgaaagaatagcaatgcaagccatgtagactttggtttgtagattggtttaaccacttccttgtggtgtgatcagatgtaatttttttaatgtgatagattcaatttcttcatttataagatggaagccctaattattttaaatcaatgtagctaaaaaattacaggtcattaagcactgcatctgaatctcaaagggagcatggtgatcacctgttattgaaggctttatgcaaagattctttctggaagggtttatagcagctctccctcaagactggattagatgagggtgtgtcacacttttcagaaaagaatcactcctggcataaggagatagaatttactcctatggggcctggggcacagtgtgaagtagcctgcttcaagctagaagatatatctttgaagttttctctttcatcttaaaaagttgtaagattttccattcgactctagaacatacccttgtttattataatataaacatatttgggtctactgggagaaatatatagctctgtgtgcacaaacactggtgctacaacacataaaaatcttccaacaatttccatgacagaaagaaaaccacttactgtgaaaggctatgttaaagattccagtttaactttttgtacgtatacctgagtttctcaccatgctcctcagagtctgatgactggataaactatcagatcccatctgatccctaaattttaagaaaatcttaagttgatggaaagtagctattggtaatgtcaaaaatcagactgacaaagaacttacacagtaattctaagtcacaacagaatgccagctatagccagaattaatatgtgaattgacaaaagaagcttaagacataacaaatgcattcaaagggaattgtaactaagatctccattccctatctctctttgttcaatgaatgaatgaaagcataccaaaatccagtcaaattatctttaagtcattctcccccaggaacacctggagaaagtacaaatggactttgagataaatctttgctaatccccaggcccaagtaaatcttttaagtctgcaatccattgtggcattgcttcaataagccgaatgaattttattttaggacaaatttgaaggcaattatgaaaccatttatatcaaacaacaatgacatcaaaaacataagtctttattggaagggttgagggaaataacatggtagaacagatttttaaatttaatgcccaacagggacctgggttttcaaacatgtgtctcgaaggttaatttccgactaagcaaatcgggctatttttcggtctgcttcagctttggaaactaaggaataatgattaaaggtgagataacatacagagattcactagctgccttctatcgatgaaaagagtcaaactctgtaaaatatttaaagagatttattttgagccaaatatgagtgacaatggtccatgacacagccctcaggaggtcctgagaacatacccaaggtggctggggcacagcttggttttatacatgttaaggaggcatgagacatcaatcaaacacatttaagaaatacattagtttggtcgagaaaggtgggacaactcaaagctgggggcttccagcctataggtaaatttaaacacttccctggttgacatttggttgagtttgtctaaagacctgggagggatagaaagggaatgttcaggttaagacaaaagactgtggagaccaaggttcttctgaggtcttataatggctacccttagagacaatagaggacaaatgtctcctattcagatctttaaaaagtgctagatttttagttaatctctttaggattgggagggcctggaagaaaaatatctagctatgttatctagatagaaaaatatctagctagctataaacagatgcaaattttcccccacaaaggacagctttgtagggccatttcaagatacagcaaagaaacatgttttgggctaaaatattttgtttttcttccttgtctcataatgttatcccgaagtcagtttggaaagtagtcacaataaatagggttaaataaaacctatctgatgagaatatacgaattgtagggcatgactccccagactccttagatagaaatttgggtatgataaaaaaaatcagagtttagtcctcaatatcttgataaggatttttctattttgtatgttttcaatttttaccctttaaaaaatttagaaaactggcactgtaaagggagattgaaggagcagaaatatcaatttcgtttgggagacactgacagagggtgagccccaagacacacatgctggctagggaaagaattccggtatccctttggcttacctgtgccatttttatatgacttaggcacccaaaaaagtcctgaaccttctgttgtaacttctattggaaagactaaacaaggcagctattttgccttcaagtgctagacttactgtgcttaatccagttcttgctttttgttcagcttgttatgcttatattcataaacctcaaactatcaactgacaaccctgaagggtgaagagcaagtcactactgttggtaaggagaggagaacacaaggcttgatggccagaagggaacctgcagcttcacaaaaaacctcaggacattctggttcccagatagttcactttttcccttaagaaagagtaaaatattttgtttgtttgtttgtttgttttgagacggagtctcgctttgttgcccaggctagagtgcagtggcacgatcttggctcaccacaacctctgcctcctggattcaagcgattctcctgcctcagcctcccaagtaggtgggactacaggtgcacaccaccactcccagctaatttttgtatttttagtagagatggggtttcactatgttggccaggctggtctcgaactcctgacctcgtgatctgcccacctcagcctcccaaggtgctgggattacaggcgtgagccactgcgcccggcctaagaaagagtaaaatattttatgtcaaatgtaaactcaaaggacacaaatcatgtacctgaattaaactgtaaacctaaaatctggccatgagtcacacatgtctcttatacatcggcctacatgttacaacatatatgtgatttggtaggcgcatcattgcagacttcatctttgatttctgcatttgtcaacagacagaactaaatacaagtatttttgcaactgtctcaatcaatttataagctatgaagaagtcttattcctccctcctgcagtccttagaaccagtcagagccttggagatgacctacttaaaatcctggattttacacggaaaccaaaggccaaagaaattgtggtattctcttaaggtcaaaaagttagctttgtggcattagagcacttgaattattattaaaaaggtaaatgaaagagttatcagtctcttactatatagaagtatatttgtaaagcacaaaaacataaaattcttactttcattagtactgacaaccgaaatgagtgactgaggcagaaggctccgtcatcaaggtctattattccagcttgagagcatgcctgggaaaaacccaagtcacagctacctttgtggctgctttttccctaagaggttctcaggagatttagcatttatgcattttccttaaaagggggaggcaatgagacatacttgtgatgattatatacttgtgagcctttagatagtgcccagtaaacctacattttacataagataaggtgaacatttaaagaaaatcagaatagaggaaacagctgtctcagggagggtgaaggactgatttatcttatcttgcctttattctgtacctgggaagatataagccagtgatggacattatcagtgtggggccttttttttcttttgagacacagtttcactctgtcacccaggctggagtgcagtggtgtgatcacgcctcagtgcaacttccgcctcccgggttcaagcgattatcctgcctcagcctcccgagtagctgggattacaggcgcgcgccaccatgcctggctaattttttttttttttttttttttgtattattagtagagatgggatttccccatgttggccatggctgctctcaaactcctggcctcaagtgatctgcacacctcagcctcccaaagtgctgggattacaggcgtgactcaccatgcccagcctcagtgtagagtcttttcgaaggcctggtttctgtttagcccttagggaaggaagcctagaggtggttagtgagggtggggacatgacaggcctgtctgacctcccaccccatcatggctggaactcagcttccaaggtgtctccacggtccccttgacaaggagggattctgttcagtcagttggaggcttacaattttatttttatttctcagtataaggagtacgcagaaactatatttacagataaattaatactatcctccgattttcatctattatgtggttaattatgtctaatttgattaatgatgtatgattaatacatatatatacacataagtaaaacaattataagaataaaaaatagatttaaaacacccttttatttttaagtctgtaattatgaatttgatttatctccaggaaaatataatattttaaaataaagaccaaagcaacatatttaaacataaattcaaaagacagtaaactgtatatttataaaggacaccgtgatattatgaatagtgaatgagaaagcaattgctgaaaccagatctgttttgtagactttttgtatagctttcatatggagaaagtttcacattgttctctcacaataaaaatgcaaataagccagtgagaaattcttgtattcataaataacaaaataataaaaaatctcctttatcaaataggcaaagacaaaaattatgctgaaagagaggcaggagggagccctctcaaacatgggaagccagatcagaactagagcagtgtttctggaaaggaaggtgacaatatggatcaagaacctcaaaaatgtccattaccgtggacctgcaatcactgttatgaccgtattcttagagccaaggcatgcagtcaatgatgtctgtaaaataatatggttttcagtcttatttgttttttttttttttttttaactgtgagtaaatgctcaaaagtggggaaatggttaaatagaactgagacagccaaggtacccaagggggtacccggagaaagtgaccagcctgtgcactgggagaaagggatggagccttgggaagttcatgctgtttggggtggggaggagcctggcctctcctgatctgggtagtacctgggatttcagctggtgaggtgggaaaacctgcctggtttctgtttagcccttaggaaaggaaacctagaggtggttagtgagggcgttggcataacaggcctgtctgacctctcaccccatcatggctggaactcagcttccaaggtgtctccacggtccccctgaccaggagggagtctgttcagtcagttggaggcttaatattttacttttattttccagtatgataaggagttcacagaaactatatttacagataaattaatactatactctgattttcatctattattttaatccatattcattttgccttatagattttcatctatattcatcttgctttgctgagagtccctgttaccctttttcttttcctttttgcccaataaattccatttttctcacccttcaaagagtctgcgggcctaatttttcatggttgtgtgacaaggactctgtttttagctgaactaaggagaaagtcctacaacagcatatccccacataacggaattttaggtacctatttttaaaaaactgttttcatggcagagaaaatttattatgattttcattttttatttttttgagacagggtctcactttgtcacccaggctggagtgcagtggcacaaacagctcaatgcagccttgacctcccaggctcaagccgttctcctgcctcagcctcccaggtagctgggactacaggtgcatgccatcatgcctggctaatttttatattttttgtagggacagggtcttgccatgttgcccaggctggtcttgaactcctgagctcaagcaatctgcctgcctggcctcccaaagttctgggattacaggcatgagctgccacgtgcatgcctggcacagagaaaatttatcataatgtcctgctaaatggaaaaagcatgatacgaaactatatatatatatatatatatacatacacacacaatataattatacagcacacacacactgcaaataggcataatcaagatattgcaaaaaaattaaccagaaattttactaagcatgagggtaaaaataacttctaacactttttttttttcttgagacggagtttcactattgtcaccctggctggagcgcagtggtacaatcttggctcactgcaacctccacctcccggattcgagtgattcttttgcctcagcctcccgagtagctgggactacaggcatgtgccactacgcctggctaatttttctatttttagtagaaacagggtttcaccatgttggccaggctggtctcgaacttctgacctcaggtgatccacctgcctcggcctcccaaagtggtgggattacaggcgtgagccaccgtgtctggccacttctaatgctttttatagtttattgtgaattatttctaaatttaaaaagaaagcattatcaggaaaaaccccacaatgatcaccaaactgcacggagtgtccgtgcaggcgctcataatgtccttacacgtggatccctcgaagtcagaagaaagagttcttctctctttcttacatatggggcacttggctgccttacacgagaagggaccttattcaatcaagtggttggttatatacacacacccttaagatgcatctggatatagtcgcttctatttataaattctcccaaaggcaatcatatgaacaaaattaatgtgacaatattatttttccagcaattatcaccctgtgtatctgggaagtaagtggctcattctcttcgaaagatgttgccagttattaatacgaaagtgacagcataacagcaggaaacggggagggcaacgctcttagtaagataataccatcatcaccacatattttaatgtcatgtttaccaaccttaatggaaagtttaaaatactggctgatgagctgttttctgacttacagaagagtattttgaatttttcctttgaaaaactgaacagtgacttaaattacctgctgctatcagcgcagtcaagccctcgcttttagcacttttcaatccctttcccgaaacaccagaatccccatcttagctgttcttcttgcatgttgaaagcgttagccatacacagtcattcaccttgccaagagaggctgaagcgctatattttaaaggcaatgttgtggtgcttcctgccacagcagtgactaaacatgcagcaaagagaaaatcacgtctcatttttattccttcttggaaacaggtttgttcaacagatgctgttaaggtttttgggcttctattaatcaacattttaattttaatttattagagaatagaaatagcctgataggagtgtgaatatttgcttatcacgaaatcacagagtttaaagcaactttaaaagaccatctaatacagttccaaaagccagagagagacaacacttaaaatgattagggtatatgactatttttgcttaaaagtctgaaacaatagattctttgactttattcattaattcattttggcatttcattaaaaagttctttctgggctgggtgcggcagctcacgcctgtaatcccagcacttggtggggctaaggcgggcggatcacctgaggtcaggagttcgagaccagcctgaccaatatgaagaaacccccgtctctactaaaaatacaaaataagcctggtgtggtggcgcatgcctgtaatcccagctactcgggaggctgaggcaggagaatcccttgaacctgggaggcggaggttgcagtgagccgagatcccgccattgcactccagcctgagcaacaagagcgaaactccttctcaaaaaaaaaaaaaaaaaagagttcttcctgatatgagggctaagttctcactattgcaatttgagcttcttagccaacttcaaagaacatgtaacgaagctaatttcttttctctgtccattcggaaagtgtagagtaaggaattgtactctgaattgcctactctgcagagcaaacagactcagtttcttccactttgtccttggctcctacaccgcaattcgtattgagtcgttttccctttttttactaacaggccatctccacatttgcttgcttttcttgtgttcactgggattagaaataacaaggtcccaaactagctacttgctttcattttgagtgcatgaatgtgtgcgaagcctcagcataaatataggcaaatatggagaactgaaatgtatggaaaagacattttaaaaataaaatgtatgggctacatgttgtggtgttcataaattttttttccattcctggccgggtgcagtggctcacgcctgtaatcccagcactttgggaggctgaggtgggcagatcacctgaggtcaggagttcaagaccagcctggccaacatggggaaaccctgtctctactacaaatacaaaaaattagctgggtgtggtggcacatgcctaatgttaacattttaaatgttagcaccatattttaattttattttggaacttaatggatgagtttacattttatactcaaatatgtgagcttatattttaatatcaactaagattacatacactattttagatatgccatctcccatcttaggaccctatttacctacttaaactaagtcactggcattttaaattgtttcctcacattaaaatatacccaaattgggcagacgcatcaaaataaagcagacactccccaggaaagagagttcactgaggaaggctcgtgtggcagaacaatattgggaaagtaaggaggggggagtgatgctatttttagatccttacctcacgtccgtggagggaagtgacactatttttagatccttacctgacgtctgtgcacgtaatgcaagtgatgttccgactatttgttgcgatcaggtgcaaagctactgatgtttccttgtcagaggtggggtgtgctccacatttaaagaaaaattcctgaaagaaagataaatatgatcacacacatggatcccggctgctcatttttcctctaaatgtttccacagtaaacaatctctttggacaagagaagaaatctgttacgaggtgtgagatggaaataaatcagcatcaaacctttcccaggaacggatgaccttgtgccaaagtggtcaacaattctgttttagaagggccctgagtctctgctattcttttgctctttaagcgagggagctggagaaatacgctgtgaccttctttaagccatgcccctcgatgataataagtgagtctagaagaatcacacgatgtggaggtgggaggaagcctctcactaatgaggaaagggagacgtgaagccatgaaatgaggtgcccacgggtcaaacagtaagaggtgaagccaagaagtaacccaagctccccgcagggaaatccagtgctttttctccagtatcactacatggttagtcatttagcggagtcaggaattgagagagccctactgtaaatagccacacaagtacacatggactcctggtagacacagaagtgcagcagaggcccggcgcgttggctcgcgcctgtaatcccagcactttgggaggttgaggcgggcggatcacctggggtcaggagttcgagaccagcctggccaatgtggcgaaaccccatctctactaaaaatacaaaaattagccgggcatgacggcacatgactgtaatcctagctactcgagaggctgaggcaggaaatcgcttgagcccggctgaggcaggagaatcacttgaggttgcaatgagctgagatcaccccactaaattccagccgagagtttagcagagcatggctctcccagccccatctggagtctgccccttttctgcctggcatcaacaccccagcattcctgcgaagactctgccgcccaccctctgtgccaggcaactggaatgctccaatccagtatcttgctgcttcttagttcctttccccagccaggtcctgccacatactccctcattttagcttttcacataggtcacgttcttttgattgataatattctcccttctcaaccacgttttttcttcacttttttctgttctaacttctgtatttgttctcactctccttctgttcactcacacaccaaggcgtttggccagcaattgctttacttcttgtcccacagtctgcatgccttccatgatactaacatctgtgaagctaaattttttgctactgaaaaaaaaaatacatatattttactggatgacagaataacccctgcataccacacatactcctaattccacttgcgtttaactacctgaaatgtgggaaggattttcccttaaaacacttgatctggtattgacaaactttgatgtaaagtgccagatattacgcattaagtgcttttggttttgtagggtatatggtctttgtcacacttctcaacttggccttgtagctaaaaacagccataagcagtatgcaaatgaatgggtgtggctgtgtcctaacaaaaccttatttacaaaatatgtggcaagttggatttttccctgcaggccatgatgagacatttgtagaatgctttattcatatttgtattctaacagtgactgacattaggataggcatgacatatacttcttttttttttttttttttttttgagacggagtctctgccttccaggctggagtgcagtggcgcgatctcagctcactgcaaactctgcctcctgggctcacgccattctcctgcctcagcctcccgagtagctgggactacaggtgcccgccaccacgcctggccaatttttcgtattagtagagacggggtttcaccattttagtcaggatggtcctgatctcctgacctcgtgatctgcctgccttggcctcccaaagtgctgggattacaggtgtgagcctgtaatatgcccagcctgacatatacttcttaagtgaaaaacaatagattaatcaacgctatttaatcaatgttatttatcatttatttaataaatgctatatgttatccccttatacgtttgacagcaacatttgatttcttcttttcctgtttataatttactaacctcatcctcctctgacatgtgacaccatgagcaacagcccttggtctgaagctgtagtgtgcatcagaatcactcgggtgggagggggcacggacttgctaaaccagagatcgctgaacccaccctgggatttttgtgatttctgggatggcatcaagattcgcatttctaacaacttgccaggtgatgttgttcctaccgctcaggggcccacacttgggaaacctgagctccaccaatgtcagaggcaaagtgagtaaactctagttactctctcgcaagaccgctgctgtggcaggtcgcttaccgtgtctgaaaataatgctacatcttacgtaaaatatgtgactctcaaaaatctggagtgtgccattttactttttttttgagacagagtctcactctatcgcctaggctggaatgcattagtgcagtcttggctcactgcaacctccgcctcccaggttcaagtgattctccctccttggcttcccgagtagctgggattacaggcacccgccatcatgccaggctaatttttgtatttttgtagagatggggtttcaccgtgttggccaggctagtcttgaactcctgacctcaagtgatccacctgcctcggcctcccaaagtgctgggattacaggtgtgagccactgtgcctggctgagtgtgccattttgatgagagtatcccaaagccagggatttggaacccaggctattcttcactacaagtctcaccaatcccaggtggtataatttagttaactaaacctatcctatctggggcagtggaatatcagccggtcctcacacctgcagtcctcagcccatggaggcatgtgtgtggagtcttgctggagtggacaggatgtccagtgtgtgtgatgggcccaggctcaggcatgcctgtggagtcctgcccatgagtccaggaccttccccacagcagcatggaaatcatgctggctgatgtttttgtttggttatgttttgttttcctgaacataggatcccattccttttactcaatcttttgaaatgtgacaaatccttcaatggccagctcaagggtattgagaaagagatttaaaacaatgtctgaacaccaaaacgaaaagtctgaaggacatgactgacccttatgaaatacgctgagctagctacgactggtttttgcagacatgaaaaaaatcctctttcaaaacataaagtaattcctccaaaacagctgagttggcaggactattgaaaaagtatttcatatacagataaatagatagaaagcacttacgttttttcttagcttacagaaagctgcagtggacattcagctaacaaatcacaaattgttctaacaccagataaaattcagccagataaaagcctttttattgggggtaggtgtttatagataatggtttaagaaattacagatagttgaaaaattctagtaacacatatagtgttgataaaactaaaactcacattgccaaccctatattaaatatgtatgcctcaacagtaaatttcagtgctttctccaccaatttttatgaaagaatgtttttgttgtagtactagaataactggcaagaactgtgaagaatgtgggattttacccagcttgcaagttagcaagttagtttgctgcagtatcataaaagctgacagaagacaagagactcctggatcagagacaaaggactgcagaactcagagcacagggagaaagaagcatgagcatcatattacaccagttcccctccacacgtctctctcagggttgaagtagataggctaagtcagattctacaggtgcagtggttttgcatcacaaatgagaactctgaacttaggaaactcaaatcttctttaagtagttctaagcaagtcatcttttcatcctgaagggaaacattgtctttattatactgcataataagcaaatctgccttttgatctggagagaaacattatcttctctactttctgtttttttggtttttttttttttttttttttttaagacagagtcttttctgtcgcccaggctggagcgcagtggcacgatcttggctcattgcaagctccacctcccgggttcacgccattctcctgcctcagcctcccaagtagctgggaccacaaggcgcccgccaccacgcccggctacttttttgtatttttagtagagacggggtttcaccatgttagccaggatggtctcaatctcctgacctcgtgatctgcccaccttggcctcccaaagtgttgggattgtacaggtgtgagccaccacgcccggccctatcttctctactttcaaggtcatttgctctaaaacttccttgaaaagatgggtcagaacaagttggtgtctccctcagagatgagcggacaaatgacagacccatggagaattgcttctcaataataacaccttttcttgcaggctaatttgcagttattttattgtattttattttattgtattttattttattttattttattttatttttttgagatgggagttttgctctttttgcccaagttgtagtgcaatggtgcgatcttggctcactgcaacctctgcctcccaggttcaagtaattctcctgcctcagcctcccgaatagctgggattacaggcatgtgccaccatgcccaaccaattttttatatttttagtagagatggggtttcaccatgttaatcagctgatgtcaaactccagacctcaggtgatccaccggcctcggcctcccaaagtgctgggattacaggtgtgagccactgtgcccggccgatctggtcatttctgctcctgtacaatcagtgggctggattgttgaagtcttttctgacacttccaatctgtattcaaaaccagcagacaataaaggaacacacaatagaagtgagaagggcctttttcgaaaattccaccttgggtgtctgagatggcttgttcacacatgggtgtcatctcacagacagtggcatgattctttgggattaactgcctctgaattctgttttgtttctcttaattactcagtttaaaaaattaaaaaagtcaaagacaggaaagctttctagctggagtccaagaaggctggtcagaaggctggcaccactgcaccactgtgaggtcactggggcatagcagggcccaagccaagtggccaagaaacatctccagctgtgctgagcgacagtggttatgcctgaggcaaggctgctcaaggtggcattgtttgagttctagcgtgtgcaggggttggccggggaagttgcttctcggtcactagggaagcagagtattctgggggagcagccgggcagtgtcctcttcatcaggaagcccagctgtcaattctagtgtggctggaacagaatcctttacggcgggtaaactgagtctcagagcggcccaccccacctcttacaaatggtagttcacagataaatcagctacagaaagattcccccacctaaccaggagctataattcccaggggcttactcacatcatttgtataccaatagtcacttctgggaaaccttaattagcgaagagagctaaaatctataacagcaaatggccagttttttgtttttgtttttccaaatgatagcctaaatgattttatacttgaaaaaaataaggctttagaaaatgtgcttggctttatattgtgacactgttaaatgccataagcgttttcaactttatttatttttttgagacacggtctccccctgtaacccaggctggaatgcagtggcacgatcttggcttactgcaacctacgcctcccagtttcaagcaaatctcatgtctcagcctcctgaatagctgggatcataggtgtgtgccaccatgcctggctaattttttgtatttttagtagagatgaagttttaccatgttggccaggctggtctcgagttcctgacctcaagtgatccacccacctcagcctttcaaagtgctgggaaaacaggcaagagccactgcgcccggaccgttttccacttcattagtattaaatggaaaacccaacaaagttgtattcctcaagttcttagaaaggctactcatgcttttaccatttctctggacaaggctgtgatcccttccttccattcttctctttcatcataactcacttgccctctcctcctcactgtcgaagcctgaccctccaaatcacatcagacccatacaaatcaaagggggaccaggggagaagagcaggaagatgtcaactggactgtggtattcctggaagccactcctgctcacttatgtcccttcacccatgactcataagcagtgccactcacaaagaggaaaactagagcaagaagaatggaataaatagcccagcaaaatctgaaaattagattgacaccaagaatccaactgtataaacacatttacgatcagaagcgaattagccaaacccaaatacaatttgatagatttcaaattactataaaggtagatgacaactggcttgaaagccctgcttatcacagtcctaatatggtcaaatctgaaaaaatcattagcagtaagacctgacttagttacccatgatccttccaatagcttttattgaacatcctaaattttatgtttatagatattgtttaacaattatgttttccaaacgaaatattgtatctatcttcacaaagagttaaattccattcttgtctccaaatccttcttagttaatatttcccaaaagaaaaaaaaactatccttctcttgataaagtaatggggacacacactttccactaacaaggttgcaaagggtatagggtttgtacttaacacgtaactgcatagctatttgcatggctcagggtatagttaggaaaacagggcccacaccaggtagttcaactgacggaattgaatgagattagttatagaggagtggaagcacagaagaactaaacagagaaaggaagccacttgagattagcgtcattattgcacagctgccatctggggctagaggacaatgggagaaggtattggagtcaccacagctctgcagctgggctatctggttgggagtctgacaatgaatgggatgaagccactgccagagatgtcccctagagagagagggagaaatgcccctggcttctgccttctcttggccctcccatctccagaaacagccccaacttacagagcagagagggggaaaaggtggcttgggtctgaaagccaccagcagatgactgctgcaccaccacgaggtggaccctgtgtgagatcaaaattctccaagtgtcaccctttgttagtggtgacacattctaatcagcctccactaaaaacaaaaatacacattcagatattgttgtgaaatatgtattgaagatacagaaatactcacacaaatatacattgtatattgagattaaactcaactatactcgtcaaaagactatccatccaaattttccgatgatattaacaggatacagggctgtggttactgcttatgagatgaactcgtaataagtatcttacatctatatcagaaagattctcacagttaccaagttaagacagacagcctgtcacttcaaatcaatctaaatgcctctcacaaacctaaaatcctgtttgtagctaacagcaacagatattccccagttactctctcctcagaaactgtccaggctagaatagttcctcgttagtgagatacagattcttttctaagacacaactactagttttaagtcttcctatccatgcagaggtttcattattaatcttaataataaagttttaattttctttaagttaaaacatgtcagctgggtagggtggaacacacccattgtcccagctatttgggaggctgaggcaggaggatcgcttgagcccaggaatttgagaccagcaagggcaacatagcaagaccctgtctttaaaaacaaacagaaactccacaaaaacaaaccaaaaaatgccagataaagcataaccacaacattctctacctaatacataaaaaaagcctttaaaatagccatggcaaagcctgtttatcttgtgacttctttattgtgtcttagccttcatactgaagtgttcgacttactgggtattacataaacccagtaactgaatttatcagttctgatacaaagtaactatgcaaactggaggactatataataaatgtacactttgttaaattaacaatgccagttttacaattaagttacacctagtcaaacagatcagacctaaaaagttaatgagtctatcaccatgttcaattacaagtttgttttctctcaagatgtcaataaagcctctagatgatgtgcaaagtttatcaggagaaagaaaatcaatatactccacacaaagcaaaaccatgtcacaactttgctgagaaggaggctgtcagtttatggtacatgtcttcaagaagtctaacttaaaacaaaagttggctaatataacaacccacatccgccccttctctgcctgattgtaagttcttcagtgtgccttgaagtttattccaggtgtaatgccactcagccataatttgatgtttataactttaagagcaaaagggagattgttaaagaagatgttaaaagtgattcctgaaaagtaaaataaaaggtttgcccactgctcaaggaaataaaagaggagacaaacaaatggaagaacattccatgctcatgggtaggaagaatcaatatcgtgaaaatggccatactgcccaaggtaatttacagattcaatgccatccccatcaagctaccaatgactttcttcacagaattggaaaaaactactttaaagttcatatggaaccaaaaaagagcccgcattgccaagtcaatcctaagccaaaagaacaaagctggaggcatcacactacctgacttcaaactatactacaaggctacagtaaccaaaacagcatggtactggtaccaaaacagagatatagatcaatggaacagaacagagccctcagaaataatgccgcatatctacaactatctgatctttgacaaacctgagaaaaacaagcaatggggaaaggattccctatttaataaatggtgctgggaaaactggctagccatatgtagaaagctgaaactggatcccttccttacaccttatacaaaaatcaattcaagatggattaaagatttaaacgttaaacctaaaaccataaaaaccctagaagaaaacctaggcattactattcaggacataggcgtgggcaaggacttcatgtccaaaacaccaaaagcaatggcaacaaaagacaaaattgacaaatgggatctaattaaactaaagagcttctgcacagcaaaagaaactaccatcagagtgaacaggcaacctacaacatgggagaaaattttcgcaacctactcatctgacaaagggctaatatccagaatctataatgaactcaaacaaatttacaagaaaaaaacaaacaaccccatcaaaaagtgggcgaaggacatgaacagacacttctcaaaagaagacatttatgcagccaaaaaacacatgaagaaatgctcatcatcactggccatcagagaaatgcaaatcaaaaccactatgagatatcatctcacaccagttagaatggcaatcattaaaaagtcaggaaacaacaggtgctggagaggatgcggagaaataggaacacttttacactgttggtgggactgtaaactagttcaaccattgtggaagtcagtgtggcgattcctcagggatctagaactagaaataccatttgacccagccatcccattactgggtatatacccaaatgagtataaatcatgctgctataaagacacatgcacacgtatgtttattgcggcactattcacaatagcaaagacttggaaccaacccaaatgtccaacaatgatagactggattaagaaaatgtggcacatatacaccatggaatactatgcagccataaaaaatgatgagttcatatcctttgtagggacatggatgaaattggaaaccatcattctcagtaaactatcgcaagaacaaaaaaccaaacaccgcatattctcactcataggtgggaattgaacaatgagatcacatggacacaggaaggggaatatcacactctggggactgtggtggggtcgggggaggggggagggatagcattgggagatatacctaatgctagatgacacattagtgggtgcagcgcaccagcacggcacatgtatacatatgtaactaacctgcacaatgtgcacatgtaccctaaaacttagagtataataaaaaaaaaaaaaataaaataaaaggtttgcagtcattactgacccttataaaatgcgtgaaaactaggaaaactaatattctctttcccagctcaaggtacttgctccaataagctcagatggctgtacctccttttcccctccccagcccaggggtgaacaggcagctctggcctcagcggtcagagtaaaacaggctcatacatgtgaccacaatgagatacctgtctgagaaccaagccggtgctcagaaggaaaaagtgatgagagaaagacagtctccaagaaagagatcacttgtaccctggatccagctatgcctgatgtttccccagttacttattaatttttatttatttatttattttgagatggagtctcattctgttgcccagactggagtgcagaggcgtgaccttggctcaccgcaacctccgtcccgtgggttcaagcaattctcctgcctcagcctcccgagtagctgggattacaggcgtgtgctaccatgctgggttaatttttgtatttttagtagagatggggttttgccatgttggccaggatggtctcgaactcctgacctcaggtgatccacctgcctctcaaagtgctgggactacaggtgtgagccaccctaatccctggctgtgtttttcattctttaatttagcagtgcccataggcacttccaagactgatttccatattatctgtcagactgcaaaacaaggattttcctttattatctttattatcttggagaaagctttgaccttaggcgttgtcccctagataatctatcactggggaatttttcagagcaaatgcttccactatgtttgttgctatttctttacttgtgcatatgatcttgctgttagcatttcatgaagggtccctgactccaaacgctttagaactatgggacagttgtcaaagttccacgctgcacagcctccctgagagtgagcaggaggaccctgctggccagatgaagcagccctccctgacctctgactcattcctgggcaggaatggccatctcaggggaaactggatcgggattacacacaacacagcaaccatgtttttttctttccttaggttttggactagtggctctggtgtggtaccagcttcccctgcatttctctcccaattccaacaaacgtttggagattgtaacttgtctcacctcaacataatcgcagtgacttatgcgatgtcatctgctcagtttataaatcgagcatatctcttccctttcaattttgtagcctagcccgacaataaaagaacatttattattctagctgttctttctctcctttagaagctaaaggtttcacatgctctcataatatgtcagcttcaagaacataacggcacccaaaacatttgctagttgcatgtttaggccaagctttccagcttttgtgctcagataaataagatgttaaaatatctggttgttaacatggaatatttccttttgtaatctcccaccaccgagtgttcgactccatgatttgacctccaggagaggacatataaacgaacatgtgttagctggtaattatttacgagaaactgaggagacaggtcacaattttgaaaattccttatgactcaccatccctagatgagttactatattcctaacattttctagggagtctctagaagacagtattattttacatttatttctaaatgtgcaaaacacttattctaattaacaatggcaaacaatgtagacgagctatgtaatcatttcactgtctgggttaattatcttccaggccaagcacactggccgagcaaggccttgtagactttctaacctccttgcctcactgcctcccacctcacctgcccacctctcccttggcctgccatggagaccctttgaggaggggctggacttccccccttcactctggccccttgcttgtggtttgagctcagcaggatctgtcttcttcctctgctttgtccactcattttgcctttcaaagccctagatgtctttcggcctcagtgtatctatcttcaaccctggaggccttccttgatcctgtccctgttttagctagtcctcaattatgtccggtgcctaagctctccataagatacatccaccagtgtgtcatgtcagtttaccattgccatggcaacatccaggagttaccagccctttccatggcaatgacccaatgacccagaagttactactcttttcctagaaatctctgcataaactgccccttaatctgcatgtaattacaagtaggtataaacatgactgtagaactgccctgagctgctactctctgcctgcagggtagccctgctctgcagaagcagtcacagagctgtaacaccaccggagctataacactgctgcttcaataaagtggttttcctctactgtcagcttgttcttgaattctttcctaggtgaagctaaaaaccctcttgagctaatccccaatttaggtcttccctccccaacatcactattcttgggaattaagtaattcactctgttctctccctgctctttggttagtctgcagtgtcctttttttttttttttttaagactttgatattccatcttttgagttacaattgggacaactgagagaggggaagagctggagtggggtgagaactaggagggctcaacagctggaggtgtagttcacttagtttttgtactggaagggttcatcactggtttcattgagaagtcaggtgcgacgagagcttctgtcacctacatattcctcctaacatttactgctgctgttgaatccattgtgctgtttatttggaaaatcccccccactccctggaccaagtgagagcggaacagccagacctgagaaatgcagccacagcaacttcacagtgtccagtctaggcagggaaagtgcaagagaaacataccttttgatagcaatacttcacaaaatgataatataactggtttgttggctatgagcaaaaagaaatattgagcaataaaaaaacagcctagctttaaaacattttaaatgactttagacttggaatctaaacttttttcgttcaaaagtccttgtttctttagcaagtagaatttaaagcttctttttattcgtgtcttctttattgcaggcagcacaagccatcataaacattccactcaagataaactgggcaaaggcaagtgcttaacacaatttaatactttctcacattctatatatttactttatttcctcattaggaaaagaagaaaataaaatgtaatttgtaaatttacctataaaccatataccggaaaactaagatgaataaaactggaaaataaatgttacactgagttttttcttttaacatgccagtacaagtgataaccaatggaagaattaaaaactcaaccagccatcctacttatgtaaaatatatatcgatgggcgtagacatgtgtgctttatacatatgatcatccctcagtatccaggagggactggttccagaaaccccctgcagacagcaaaatctgcagatgctcaagtccctgatataacatggtgtagtatttgcatataacctaagcacatcctcctgtgtactctaaatcatctccagatcatgtagaatacctaatacaatgtaaatgctgagtatatagttgttacactgcattactttttaaatttgtttttaaatattgtgttattttttgtttttatttttgaatattttcagccgatgattgaacccaaaaatgcagaagctgtggatatcaagggctgatgttacatagattgactgaaaaatttcggagtccaattaatactgcatctaaaataagttaaataacatcaaaccttttgtgtcataaggacaccattaaagttatttatttgtttatctctcctctattttttgagaaatgtatgctgtgttggagaggcaaagaaggaggatggcaaatagtgcagcatcatccggttgctaagaggcatatgtaaaaacaaagaaacatcccacaaggcaagaagaggaactgttagagtgaacgatgctccctcttagcccaggcttatcattatagaacaattctcaggcgatggcatctatgggcacagtttgtgtgtgagggcaaaagactcctgtacagctcatgcccccaccaggagagaaaagttggtggccccggccttccatcactgttggggaaaagtcaggaagagtcagttcttccaaaggggaaaaaaaattttttttttaatctaaagaaaattcttcagggctgggcatggtggcttatgccagcactttgggaggccgaggcaggcggatcacctgagatcaggaatttgagaccagcctggccaacgtggtgaaaacccgtctctactaaaaatacaaaaaattagctgggtgtagtggggcgcgcatgtaatcacagccactaaggaggctgaggcaggagaatcgcttgagcccaggaggcaggggttgcatgaggcgagatcccgcactgcactccagcctgagcaacacggcgagactccgtctcaaaaaaacaaaataaaataaaataaaataaataaataaaaagaaaaattttcaggaaacataactaggacacaataaagtgtttcaatcaggtttaaacataacttgagaatataagaattttaaaatttaattaaaagctaaaaaagaagagtaaaaacagagaaaacctattaataaaatggaaatcatgagtgaaagctcagagccatgaacacgacagtgaggacatcaatatataaatcataaacacagagaagcggaacccaaaaaaaaattgcagaaaagatcttctgtgggttaaagctacccaatggataataccagtactacagagcattttcattgactgcctgattattataacatgtttggtaagttacttaatcaaatttatggtagctgtctttatcatgtttaatttagctgatttttaaaaaaatatttacaatgagctttatcttttttttatactttaagttttagggtacaagcgcacaacgtgcaggttagttacatatgtatacatgtgccatgttggtgtgctgcacccattaactcatcatttaacattaggtatagcattaggagacatacaatgagctttagtacaaacagcttctaagtttgatcaagtgatttggattcactatggacataatcacacacatctcttttaagctttagatagcatgaattaaattgatggatatgtgaagattatgatatcctgacactttgaaataaacacttactcctttcttactttcatagtgcctggaaatatatatatacaccatccagggcctggggatcaaacagccttacccgttacagctggtgcccatgcacatcagggggcctgaggacaggtctgccttcctgctgctgttcccaccagtgcgtggatataccatcaactgggagcctgggggtcaacctaccatacctgttgccactggcaactgtgtatgattgcagggcctgtcaacaggtctgccctgtccttgatgcctgtgcataccatctggggcttgaggataggtcagttacaccccccaccacctctgctggcacccaagcatgctatatggggacctggggaccaatgtgtcccagccgccacagcctgcacccacacacactattggggacctgaggacaggactgccccacctgatgctaccactgacagtgcctgcatgcttcatctggagacctggggattgatctgccccacatgctgctattaatggctatgagcaccttccagggccctgacgatgggcctgctcagcctgccggtgcccacatactttgactgtgggactggggaacgaccctccctgtctgctaccaccagggctcacacacaactcccagaggactgaggatgggcccactcagccggctgccatcaccactgctggccatctacccatatgcatcacctggaggcctgagcactggcttgcttaccctgccaccaccaccactggtgcctgcatatgctgactaggaaccagagatgtggcttgccactactattgccatgaatgatgccacacaccacccaggagcccaaggaccagcctgccctcccagcccactgccaccactgccagcacataagcagactatctggaggcccaaagtttggcatacccaaaccactggtgccaccactgtgcccgaagaccagcccacttggtgtccctgtccccacaaaagcttcactgcaacctctactaacaagtgctgcccgagccactgaagagatcacagacacaactgatgctgattacagctgaagaaatcattgagacattacactgctgtgcccagctagaatcaaagccaaggtgacctaccaaagcaacattataaatacatctgtagaaaaaagtagtctttttctaaaaaagccaatccataaaattggaagaagcaactgctacatcagaggcactgtaaaaagctcaatgagatatgatagaacacaaataaaagatacgaaatatcagaaaaacaattcatgatctgaatgagaaactaaacaaagagaaagatatttttaaaaatgtctaaacaaaaatcctggatctggagaattcaatgaatgaaataaaaatacaattgagggcttcaaaaaaagatgagatcagggagaggaaaaaagaattctgaacttgaaaagagatcatttgaaataacccagttaaaaaattttaaaaaattattaaaaaataaagtaagcctatgggatatatgggacaccacaaagcaaacaaatggaatttggggtgttccagatggtgaagtgatgatcaaagacatggaaagcctatttaacaaaataatatctgaaaacttctcaagtcttgcaagagacttagacatccagatacaaaaagctccaagaatcccaaataaattcgactcaaaaatgtctttttcaaggaacattagagtcagactgttaaaagttaaagacaaacagaattctaaaaacagtaagagaaaagtgtcatgtcatatataaagctatccccatcagacaaacagcagatttcacagcagaaaccttacaggcaagagagaataggatgatatagagtgctgaatgaaaaaacatgctaggaaagaatattctaccaacaaagctatctttcaaaaagaaaggagaaattaagtctttcccagacacaaacagaaggaattcatcaccactagacaagtcttatgagaaatgctcaaggaaattctacatctggaaggaaaaggacaatatgtaccatcacgaaaacacacaaaagtgcaaaactcaatggtagagcagacacacaaaggagaaatgaaggactcaaatgctactattacagaaaaccaccaaaccacaatgataaacaacaaaagggaaagaaggaacaaagcatatgcgaaacaaccagaaacaactaataaaatgatggaaataagtctttactcattaataataacttcaaatgtaaatggattaatttcccccataaaagataataaatggctaaatgaattttaaaaaatggcccaactggccaggcgtggtggctcatgcctgtaatctcagcactttgggaggccgaggcgggcgggtcacctgaggtcacgagtttgagaccagcctgcccaacacagtgaaagtccatctctactaaacatacaaaaaattagcctggagtggtggtgggtacctgtgatcccagctactcaggaggctgaggcaggagagttgcttgaacccaggaggtggagcttgcagtgagccaagagcacaccactgcactcagcctgggtgatgagagtgaaactccgtctcaaaaaacaaaacaaaacaaagcaacaacaaaaaaatggcccaactatatgatgcctacaagaaaaacacttcacctataaaaacacataaagatgacagtgaaaggatagaaaaagtcattccatacaaataaaaaccaaaagtggacaatagtagctatacttacatcagataaaacagattacaagtcaaaaaatctaaaaagagacaaagaaggctgggcacggtagctcacgcctgtaatcccagcacttgggaggccaaggagggcagaagtcttgaggtcaagagttcgagaccaacctggccaacatggtgaaaccccatctctactaaaaatacaaaaattagttgagtggggtggtggcgcacctgtaatcccagctactaggggggctgaggcatgagaactgcttgaacctgggaagcagaggtttaagtgaactgagatcgagccacagcactccagcctgggcaaaagagtgagattctgtctttaaaaaagagagagagagacaaagaagatcatcatataatgaaacatgtatcaattcagcaaaaggatgtaacaattctaaatatatgtgtacccaatagcagagcacccagatatattttttaaaaaattatagattgaaagggagagatagaccctgatacaacagttgggggcttcaatgcccctatttcagcactggatagatctatgagatagaaaataaagaaacactggatttaaattgcacttatgaccaaatggaattaacagacttctacagaacatattattaagctgcagaatacactttcttctcatcggcacatggaacactctctagaatagatcatatattaggacataaaagaagtctcaagaaatttgttaaaatcaaaatcatatcagatattaatatcttttcagacaacaacagaataaaactagaaatgatagcaagagaaactttgggaactgtacaaatacacggaaatttaacaacatgctcctgaatgaccattaggtcaaggaagaaactaagaagaaaaccaaaaaatttcttgagagaattaaaaatggaaatgtaatatattaaaacccgtgaaatacagcaaaagtactgctaagagaaaagtttatagcaataaacacctacatcaaaaaagtagaaagacttcaaattaacaacctaacaatgtaccttaaagaactagaaaagaaaggacaaaggaaacccaaagttagtagaaggaaagaaataataaagaccagagtggaactaaatgagatagagacaagaaaaatgtaaaaaggattacaacaataacaacttggtttttgaaaaagataaaaatcacaaactactagttagaataaccaagaaaaaagatagaagactcaaataaaaaaagcatacacgaataggagacattaccactagcaccacagaaatacaaagaatcattagagactattataaacaactacatgccaacaaattggaaaatctagaggaaatatataaaccttggacacatacaacctaccaagaatgaagtaggaagaaagaaaacctaagcagacccataatgagtagtgagattaaagcagtaattaaaagtcccccaacaaggaaaggtccaggacaagacggattaactgcagaattctatcaaatttatatagaaaagctaaaagcaattcttaaactatttcaaaaaggtgaagaggaagagattcttcctaatgcattctacgtggccagcattacattgataccaaaaccagataaggatacaagaacaaaagaaaggaataggccaagatcactgtcttagtcgatttgtcttgctatattggaacacctgagactggataatttataaagaacaggggtttatttgacttacggttctgcaagctgtaaaagaagcactgagccagcacctgcttctggtgaagggctcaggctgcttccaaccacagcagaaggcaaaggagaaacagcatgtgcagagatcatgtgacatgacagaaggcaagagagcaggtgaaggtgccaggctcttttttaaacaaccagctttcatgagaactaatacagccccttacctgagacagggcattaatctattcatgaggaactgctcccatgacccaaacacctcccactaggccctacctctaacattggtgatgaaatttcaacataagatttgggtggtcaaatatccaaactatagcaacccgttatgaacatcaatgcaaaaatcctcaacaaaatagcatatcatgatcaagtgagatttttctcagggatgtaagaatggttgaacataaacagatcaataaatgtgatacatcacatcaagataatgaaggacatatagaagcatggtgtgcagaaaaaaaaaaaagaaagtgaaggacaaaacccatataatcatctgaatagatgtagaaaaagctttcgacaaaattcaacattccttcatgataaaacatcaacaaactaggcatagaaggaacatacctaatggggaaaaggtgaacgtctatcctctaaaggactgaaacatgactaggatgcccactctcactactccaattcaacatagtactgaaagtactagccaagtcaatcaggtacaagaaagaaaagtcatccaaactggaaaaaagaaagtcaagttgtccctctttgcagacaacatgatcttatatacagaaaaacctagactccaccaaaaaactcttagaactaataaatacagtaaagttggaggacacaaaatcaacatgcaaaaatcaatagtgtttctctataccaataacaaactaattgaaaaaaaaataaagaaagcaatcccatttacaatagctaccaaaaaatctacttaggaataaatttaaccaaggaggtagaagacctttgcaaggaaaactacaaaacactgatgaaagaaattgaagatgacacaaaccaatggaaagacatgccctgctcattgaccgaattaatattgttaaaatgactgctcaatgcaatccctatcaaaataacaatatcattcttcatagaaatagaaaaaaaaaaaacagtcctaaaatatgtatggaaccacaaaagaccctgagtagccaaagcaatcctgggcaaaagaacaaagctggaggcatcacactacctgatttcaaaatattctgcaaagctatagtaaccaaaacagtagggtactggtataaaaacatacacatagagcaatggaacaaaatagtgaacccagaaatcaattagtgtatttacagccaaccatcttcaacaaaggtaacaatgacaaacattggagaaaggacactacaataaaaagtgctaggcaagatgtatacaagaagaatgaaactagacccttatctctcactatatgcaaaaatcaaggcagaatgacttaaacataaaaccccaaagtatagaactactagaagaaaacaaggaaaacattcaggacattggtctaggcaaagatttttatggccatgagctcaaaagcacaggcaataaaaagtacataaatgggactatattaagcaaaaatgcttctgtgcagcaaaggaaacaatcaacagaaacaacctgtagaatgggagaaaatatctccaaactattcattcaacaagggactaatacccagaatacacaaggaactcaaaaaactcaaaagcaaaaatacaaataaacccatcaaaaagtgagcaaaaggttagaatggacacttctcaaaagaagacatacaaatggccaacaggtatatgaaaaaaaattaaatattactaatcatcaaggaaatgcaagtccaaacagcaataagatatcatcttacctcagtatggctattatcaaaaagacacaaaataacaaatgttggtgagaatgtggagaaaaggcaactcttatacactgttgtaacctgtaaattagtacagccattctggaaaacagtatgcaggcatctccaaaaactaaaagcacaaggtggcttacgcctgtaatcccagcactttgggaggctgaggtgggaagactgcttgagtccaggagtttgagacaagtctgggcaacataccaagaccccattttcacaaaaaattaaaaaatccccaaaattagagctaccatatgatccaataatcccatgactaggtatttatccaaaggaaggaaatcagcatatcaaagggatacctgtacccccatgtttattgtagcacaataggtcaagatatggagtcaacctgtgtaaatccaacagataaatggataaagaaaacgtggtgtgtacacacacacacacacacatacacacgagtactaatcagccacaaaaagggtgaaatcctatgcttgcagaaacctggatgaactagaagtcattatgttaagcaaaataagccaggcactggacaaatacctttccaaagtcaaaggtgaacattaatcccattctggttactggacctttattgaactgacccaaataaaaggttcctatatgtttcttcaagccagcagtatctacatactttactttaaaccccgcttattttctttttggctgatttgccaaaatgtggttgactgatccatcaaaaataatactgtaatctctaatggtattccaaatttactgaaattaatttgcgtctttattttccccaatttttagctcctcttaatcaaatttacatgtaactggtataagtaatttcagctaattaaatgaagaatagcagactctctatttgttataaatttaatagttacgttaacatgtattgctatttcaatacttttatatttacatagataacaacactattcagcattagttagtatatgtgaagggaacagtataagtatgaaaaacagcctacccccaaaatatatttttagatacaggagaagtttatgattaagttgtacaattttctaggggaaaaacgttttattttttttttaaattaacatggagaaagcacctaaatcatcatgcttcaaaaggaaatcacgctgaaaacaacccaaccacttacatgtgccccttgacattggactcatatcagcgggtagctagctcacaactgaaatgacccataaatcttgcaaacctagtctacctctatacacataaaagagcaagcttcaattgcgttctcgaatgacaataagtatgtacaatgaaatacgtaataaactgagatctaggtggctagcacattcgacgcaacgtgctctattccatagacaattccattctacttcttggtgcattaaatgaagttattttccttatatacatagatctgtatactcattaaatatagtgacttctgcgaaaaaatttatttctaccctgcagtggaagcctaggaaaacattaattttatgttactgagaggtacaaactacaaccttctccttagaacaggaggtataaaaatcagcctcctggggttctgttgctaattcctctggacggctgggaacttgatctaagccattccacataactggacatcatttacaacttgtgggttttgtgcagtgtctctgtgccttcctacatggggactcaatcacataagcaagaaatttcttttccccagtcacctaactcagtaccagccagctagatggcatctctcaaggcactgtggtagaggcatggtggctgttactcatattacacttttccaatcagttgggtcaatctgtctactcagaacatactaagtgatatcaggcacctgctattctgtggtgactgtgaaatactcttcctcactctacatgtacaaatctagtttcttttcagaaaaccagcagttagtgatagaaacaccattcccaaaccaaaatacatgagggtaaactcaagttggacagagttatcaatattttttagctgcaaacattcctttcatcaccaacacctggtgctcaatgaatgtatcattacttggctggttatatataagcccatctgtgcaaaaatggccaaaagccctctcgtagttggctggacctgtgtcctaaaatacaggagccaggtaatgacgagctttgatgaccttcataaccatgggaaagacagctgacagaaatggtttatatggcaataatgtggaaataaagaaccacatatactgcaaaatatattaaaaaacataaaacatatattatatggttattatatagcccttttaaatacaatagtcatcttttctttatagggatttttgggaagtatgagatttcccatctaagatttagtgaggaagcagtaactatatcacttttggatagtctatgaatatgagaataatgagttgactattttcagcccatttatcagccttaactcctcaaacacacaaagtagatacactgtcataaatctttattcgtgctatgatggttgccaagaaacgcttcatttctcagtaaatcatagttggcatgaagtcatgtgttgctaaatattttataacctcctcttatgaacctggaaacaatctattaactacacatatgaaaacccccatatatttgcatgtaaataaatatttatttgttttgtccaatttccatctttatctgacaaagataaaatgagtgtaacctcagcaggcaattcacatgtggccagggctccatccagttatcctagttacagctttctactctggtagcaggtagctactgtttcattagctacagtttgtatatcaggcttagactgccattcctaaaaaacaacaacatttatttacactttcaataagaggaagtttcagcgaattgcctgggctccaggaaagtcttgagagaataaaagatagtgtaagagaaatccaatcccgttatacatacttgcagtgtaaatttgtcatcgggtcaatttccagtatatttcctaacccccaaaatgcctcaatataaatgggatcttcagggaaatcatactgtggaaataagtaatttatggtgtcagtttgtttccaaagatgagtagtgtgaactgagtatgtgtgtttaggtaattttcctcacaatcccataatcattttctagtcttttgagaatgaaaaacattctactttattttgtcctcttaacacacaaaaacatttgatagaaagataagtagattctcagtagatttaggaaagggtgaagaaggatttctaacaaccgcaacacagaattatacacagcttgcctccaccacaagcgattctcctataaacccctcttcacacctctcagaatcattgccacagtgagctatcaagtctcagcaataacaacgaacaaaatcagtgtcaactgcttagagaagaggcagtctggataaatgtaaaattgacaacctgcttggggtggggcggaggagatgtcactgcaattgatttcaggaagtgaactcctcttgtgcccatctggacactggactttactggtgactgttgctgtaacagcatcatgaaaaagagtgactgtccctacctcggaattgctccacaattcctgaaaaataaaaacgtgtcttgtagtgaaaaggtgaaagcacaagcagtgaatccccatctatgcatgagcaaatatttcatggcacgtccatttatgcaatggcattcattttgcattttctatgtgctaagcaatgtgcgaggtccaagagtcacacgaaataaagcacaatgcccgagccaagaaggtggcaagaggtgaggagtgattgcactatggtgattgttagctgcagtggtaggcacagataggaatgatgaaatggaactacttttgttaccaagactaatgcaccaaaacatgaatgtgggaaaacaggacactttggtcagctaatttccgcaaacaagctttagaggacttttttacttgatgcatatggatgccagattttagattccacagaccaaaataataatagcaataacaataataataaatgatgaactgagttactagcaacttgaaaaatactgataattatatttcaaagaaatactaatagtaacaagatgcttatattaatggtaaaattaactatgcgtgagttctttagaacaaaattttgttttaaagacttacatttaaagacttgttatatttttccatccatctactgaaggacatcttggctgcttccaagttttggcaattatgaataaagtcgctataaatatccatgtgcagtcttttgtgtggacataaacttttaattcatttgggtaaacagcaagcagttaaattgctggatcgtatggtaagactatgtttagttttgtaaaaaactgccagactgtcttccaaagtgatgagaccatattgcgttcccatcagtaatgaataagagtttttcttgattcccatactccccagcatttggtggtgtcagtgtcctggattttggccattgtaatagatgtgtactggtatctcattgtttgtttgtttttttaaattttaatttccctaacatggtaagacgttgagcatcttcttatatgcttacttgccatgtttatatcttccttgagaagtatctgttcaggtcttttgcccatttttaatcaggttgtctgtttttgtattgttgagtttttaaagttctttgtatattttggatggtagtttttcattagagatgtctatttaaattttttctcccagtctatggcttgtttcattctcttgacagctgcttttcaaagagctgaggttttgtattgtaataaaatccagcttatcaattatttctttcatggattatgcacttggtatcgtatctaaaaagttattactatacctaaggtcatctatgttttttccagtgttactttctcggagtcttatagttctgcactttaacagtgaggactatgaaagttttaattttgtaaggagtacaagatctgtttccagatttttttgtttttgcatgtttgcatccagttgttccaataccatttgctgaaagactacactttctccattgtatattctttgcttctttgttaaagatcatttgactatgtatgggtctacttttaggctgtctattgtgttccattgatcgatttgtctattcttttactattaccacactgttttgattactgtagttttgtatagttaagccttaaaattggatagtgtcagtcctctgactttatacttctatttcaatactgcaatggctagtctgggtcttttgcctcttcatataaacttttgaatcagtttgttgatattcacaagttaacatgctggactttttattgtgattgcattgactctagataaaattgggaagaattaacattctgacaatattgagtcctcctatccatgaacacgggctatttctccatttatttagttaatttctttcatcacagttttgtaattttcctcatacagatcttggacagttttgttagtttacctaaatatttcatttttagaggagctaataatatttttagaggagctaatatgttattgcgttcttaatccgaaattccacttgtacattgctggtacagagggaagcaattgacgtttgcacattaaacctgtatcctgcaaccttgctataattactaactagtttgggggatttttttggtcaattcttttgtattctccacatatataatgatgtcatctgctaccaatgatagttttatttcttccttcccaattttatatgttttgttccattttcttttgttcttgcattagttaggccttccagtaaaatgctgaaaaggagtggtaagaaatgacattcttgcattgttcttgatcttaatggcaaagagtctagcttctcaccattgagtatgatgcccactgtaggttttttgtagatattccttatcaagtttagaaagttcccctgtatctctagtttgcaaatagcttttttttttttttttttttaaatcatgaatgggtgtttgattttgtcgaatgctttttctgcatctactgatatggtcatttgatctttcttctttagcctgctgatatgatggattatattaattgattttcaaatgttgaacacccttgtagatctgtcatagatctcagttggctgcatgttataatttttcaatacattgatttgctcatattttattgaggaattttgcatctatacgcatgcaagatcttggtctgtagttttcttttcttgcaatatctttctctgttgtttgtagtagggtaatgctggcttcatagagggaattagaaagaatttctgcagtttcatccttctgaaagagattgtatagaactggtaaaatttcttccttaaatgttttgtggaattcactagtgaacctaactggagctggtgctttctctttggaaggttattaattcctgattcaatttttaagataggtaccattcttttcagactgtctatttcttctactgtgaattttactagctgtgcctttcagggaatttcagctacattatcagattgtaaatatagatttgttcataatattcctttataagcctttcattgttcatgagatctattgtgatgttcttttatttccaatgttagtaatttgtgtttcctttcttacttaacatggatagtcttattgattttttaatcttttcaaataaccatttttttttttgcttcattcatttttctctattgatttcgtattttcaatttcattgattttttgctctaaatttaatacttctcttccacctttggatttaatttgctcttctttttctacttttctaacatagaaactgagatgatttattttaggtctttttctcttctaatatattcattcaatgctgtagatttctcaaaacactgctttcactgtatccacacattttaataagttatattttcattttcatctgatttcaaatactcttgtgatttattatttgactcatgtgttactgagaagtttgtgtttaatttccacgtcttttgggattttccatctgtctttctgtcattatagtgtaattccactgtagtcgagagcaaatattctatgatttctattcttttaaatttgtaaaggtggctgttttatggcccagaatgttctgtgtcctggtgaatgtttcatgatagcttgagaagaatatgtattctgttgttgttggtggtggaagtggtctatagaggtcaattatatccagttgatcaatggctgcaatgagaaaatcccagaatcatacagaaaaaccttcccccaaattgggaggttgttgacaaaaaaaaaaaaaaaaaaaatttggacatgtccagtttggcgagtagatgggttataaggacttatatatgaggacctcctggatggcagcaggacagctttagagctccacaccacctcttgttcttaaactacttttaagcgaattttctgaatttttgtatattgtgtttaagtgctgagactatttttcttgctaggttctcagacactttctaggatgcttaggttctcaggaacacctgctacttggctgagccccatagccttggctcactgcctggtcttcaaggtttaggtggtagacatatacccttggctaatgggtgggagactcatcatgctacaatggtgctgctgagttcaactatgtccttactgattatttacatgctgaaactgtccatttctgaaagagggtattcgttcatttttattgcagtttactatatcactgtataaatataccataacttgtttatgcattgacctgttaaagatcaattggaacacctcataatatagcctaccatggtaaatatgcctggtgtacttgtaaagaatatgtattctgctgttttgcacaatattttataaaagtcaattaggtcctgttgattggtaatacagtttaaatcttccatatccttaatgattttctacctatgtgttctattattgaaagagatgtattggaatctgaaacttgaattatggatttgtctttttatcttgcaacttcaacgtattctcactgcagcaacttgtttctaggcctgaaacacttaaagccttggtctcgtcacacagataaattaggagttgatctgaaaaagctgggatttggtttggatctgtatccccacccaaatctcatattgaattgtaatccccagtgttggaggtggggcctggtgggaggtcaccggatcatgtggttgaatttatcatgaatgacttagcactatcccacttggtactgtcctagtgaatagaaagtgagtgagttctcacaagctctggttgtttaaaagtttgtagcaccagctgcttcacccgctcttgctcctgctcctgctgtgtgagacacctcactttccctttgtcttctgccatgattagaacttcttgaggccttccccaaagcagaagtcactatgcttcctgtacagcctgcagaaccatgagccaattaaacctcttttcttataaatccaattaactctcttttctatatttctttatagcagagcaagaatgcactaatacaggccaccatagacctctgaccagcagttcatatttggtgcttactgcttaattatttgcttgaagataatgagcatttattgttgcagtagcaattagcaaactcctcaacaccagcgtaggtaatataaacataatgatagcactgaaagttttctgaagatgtctgttgcaaaattgtagcttcagaaagaaactaatgaactcatagaactgggagcacttggaatccacatggaaactcatttaccacactgcagatggtatgtctcccctgtgatgagcaacagcttttgcaaactggctgttgatcaggttcacttcctaagtggctcctcaggctcacatatgattacgaatggaaagaaaatttcaaggaaatagtgttgatgttgggctcagtgggataaattgtatttaagaaaaatgttgaagataatgctctatttgaattggcattattttgcaaaatactaaacatatacatttttctttccataggaaaatattaattaattgtctgtagggacacaaaggaagacttgcctgtaaaggcacttaaattaaaatgaaatgaatctcagagtaatagcttttgaaatctgaagatatgcctgaaaaagaaagctaatataaaaatcgagctaacgtttaatattaaataagttagtacaattaagtaagaaaaagggaaatgacaacatatttcaagcatgtgcttcttccaggataaagtctcaaactttggggacttttagtttggtgtgcatttgactctttattggtaataaaagaaataaagtataggacaatatagaataccaggaaagttgttcacattgggaattttgtaagaaatatgtccaaaaataaaaacaaagactgttgactcataatatatgctacatggtaagacattttatcatatcactaaaaattaagtcgacctcttcactttgattaagcaggagaaatgctgtagtggaaaagattcaactcaactctcaatccacctctgactcttgcacatgcttgctctctctctctgtctctgcaggactattaaattggtagaaaaaaaaaaaggaatgaaactcttgagcccttatttgtgttcttgcttgagtgttgacagcccgaatctattgccctgccgagaatgcctcgggctagagagaaaaaagccttcattcatgataaaagctccttaggctcagtttacttttccaagttagctttaaagtagttgagatacagaactgcagggtctttgctaatatatcaaatctaaccttttttggggggaaaaaagttaactttagaaaaccggtgctagatgtcagggttggaagatgggaaggagaaaggttgtgtattatttctattatctaaatctatttaatcctataatctgagtccaacacttgtagaattttatagccatttgtgaatttaatataaaaggatagtgtatatatatatatatctactcacattttatgatgatggtgacattgctaaatttaaaaaagcatactaaaaattgctatcttatttgaacaatattaagtaaatctgcatttcttagaattactataaagtacacgagagctttgaaacatttaaaatgaagttatatatgtgtgtgattttattttgtctaatgacttgtttgttccatctttgtttcccatcactcagcactgttcctagcacccagcagttgcttggcgtttgttgattaaacgactgacaattcctgggactttaaaagagttccaattcaatttccattcaatttaaacactgaatggaaaaattctcacaccactaattgatgcttttgccccatattcttcccacagcaaaatgagtctttcaacaatgtcaaccagattccacattcaacattgtgcactcaatttaacattccacattgtaaaccagattccacattcaacactgtaaaccagatcatattcttcccctactgactatcctctagtgttccattccacttggaaaacacaatccagatttcttgccatggtctacaagaccaacgtgagttggcccagtctgcactccactcctgtctgccctcttcaaagcactgtcctcctttcagctcttcagataggccaagctctttctctgcttacgatgccttgcactagctgtctcattagccgagagagctctgccccctggtcctttgcacatctggctcaatcttgccatttggggctgagttcagcatcctaaagcagcctcccacccttctcttattgtttgcatgatgacatcccatactgatctccatcatggcacttattggtacctagtattaactaagaaatttatttctcttgacatactgcgcccaatgaaccccagaatataagctccataagtccagtggccccctcctttttacaactgtactctagaacttagaagagcgccagcacattgtatggcttcattatctatatatacagttaaaaaattatatatacaagtaaacaaatgaaccatgaataactgaatggataaatgaatgggaaatatactatcagccaatatccaaaaattatacatatttagaagaacgatggaaaatgagcatttaaaaaaacagttttaattttgcctgaaaaagcaaggttgctattagtcatttttcaatatttaatgaagggctgtgcatttaaagaaatgtcactgctctcaggatacagtgcagtgagtggtcatgttgaaataacacacagtaaaagatgtctcatagaaatttgactatatgacgttttaaaaaggccatggggttcattctttcatgctaagaatttagagaaatattcactaacaacaacaatgcaagtataatagcagacacatttcaggcaagaaatcaaaactgttgaaaaaacttcaccgtcccagagtataatgtgatagtatgacacatgtttcttgagctagggataggggaagttttgtgaatatacttctgaaaatgaaaaaccaagcttaatgggcaagagttttgcagggtctccaagtctaaactttaataggtaccacttaaaccgttgatggcagaatcatcaattaagttttatagcagagctgagtaagaaatcaatcaacaaaatattagtaatccatctgctcatcacaacaaattctggcagacaacattattaccttaatgatatgatattggaaggaaaaaaaataaggaaaacggcttagcatctcccaaaggcatgcaatatggttccaaatcaattcgaatttatagctatcctgagttctctataataacttcattccacaaacactaaattttgaacacctttttaaaaagccagaatcaatatacatccaaaacaaccaggtgctctatttacatgtcattccaatacagcagaatgaaaagctttcatattcaacccaagtttgaaaattatagctgtggatatattttcagatgtcgctaggggagcatttataagataccacacacttaagcaagatactaaaataataaatgaagttcaactgaaaaaactgcaaagggataagaggcataactggattacctaagaccaaaaaattgaattcctcctgagggtatccaggaaagctgagctgcaaagtttactatgaaaattcctgtaaactctcaggagactatagaagtcaagaaattagagaaagatgcacatatatgtgtatgaacatttggcaccagatagtgagacacggagacgtgtgcttggaggcagaatgcctgctatttgtctcttcagccccatttcccaccattctccacctgcttcgtgccccgggggccccaggacgctaccctacatgggctacatgagcttcttactgattttggtcaattggtagcagctacaaaagaaaatggagaaagaggtaattattcctcaggcctcactaagtactcaagccaaggctgagaagagaacagtgtatcgaaatgcatcatgttcagtgttgttacacaatcatttaccaccagatagaagctgcagcaggaacttgaacaaagtctggtggttaatgaaccccaggagaatctggaaaagctaagggtatcacacctcagttatcagtcttccttggatttaaaacaaaattctgtatggaacacttcccaatttaaaataaaaggaaatagaccatgagaatagaaaaatacatcctgagaacttattatatgagaaaaagacaccatggccccagtgaattagatcctggcattagaataggaatattatttatttagccttacaatatttgaaggggattttaacaggaaagataaaggaatatgactacagtagagaaaaatttaacagtctttgagaaccaaaggaatctggctggatacccttgtaagagttatgtgggttcaggagcaaaataaactatgtaaaaaggatcataaacaggtgaggtgtggccaagcgcagtggctcacgcctgtaatcccagcactttgggaggctgaggcgggcggatcacgaggtcaggagttcaagaccatcctggccaacacggtgaaaccccgtctttactaaaaatacaaaaattagccgggtgtggtggtgtgaccctgtaatcccagctacttgggaggctgaggcaggagaactgcttgaacccgggaggtggaggttgcagtgagctgagatcacgccactgcactctagcctgggtgacagagcaagactctgtcttggagaacaaagcaaagaaagaggtgagatactacattgtctagattcaaccttggaaggtaagtggaaattttgacataaaaattgggaaaaatggaaatcaaagcaatgaattcccagaacactgtacagaaattatcaaactgcataagctaatgaaacacctacatgacaatttcagcaaaatgaaaaaacaaacccacaaaccacaaccgtcagaatcactattcttcaataacttatggcaaaaaaggaggtaaaaagatgtcatttttccacaaagaagaaaagctgaagctcaaacacagactcggaggttttttgtaacctttgcacactaaatataaaaattgcccttcacaggcacacaggatgcatgcagtgaaataaaagtcctctcgcggctgggcatggtggctcatgcctgtaatcccagcactttgggaagctgaggcaggtagatcacttgaagtcaggagtgtgaaacgagcatggccaacatagcaaaaccccatctctactaaaaatacaaaaattagctgggcatggtggcaggcacctgtaatcccagctactctggaggctgaggcatgataatcatttgaacctcagaggtggaggttgcagtgagccaagatcccaccactgcactccagcctgggtgacagagcaagactctgcgtcaaaaaaaaataaagtcttctggttcataactaggtgtacttgtaaaagttgtttataacttcaacatctgcatgctaacttcacctacgcttggagttactatttaatgaaacaaacaacaatcttttagaggaagcaatggaacattttagaaatgggaacaatgtctcttgtttgcctttgctgcagatgtcacttcctctggctcgtgttagcacagggagacccctcgcagaatcaatcaatttgctttggaacaaatttctgatatatatattatatatacataatatatattttatatatttattatacataatatatattttatatatattatgtatgataaatatattttatatatttattatatatattttatatatttataatatataatatataaataatatacatttattatatgtaatatacatttataatatataatatataaataatatacatttattatatgtaatatacatttataatatgtaatatttatgatatataatgtatttataatatatattatataatgtatttataatatatattatataatatattatattatatattatataatatattatataatgtattatattatatattatataatatattatataatgtattatattatatataatataatatatattatataatatattatattatatataatatattatataatatattatataatatattatatataatatactatatattatataatatattatattatatatattatattatatataatacatattatataatatatattatataatatacaatatataatatattatataatatattatataatatattatataatatatattatataatgtataatatatacaatatattatataatacataatattaatatatataatatattataaaatatattatataatatattatatatactataatatattaaatatataatatataatataatatataatatataatatataattaatataaataatataaaatatataatatatatttataacataatatatttataatatatattataatatataattataatatatatttataatatatattataatatataatatatttataatatatattataatatataatatatttataatatataatatatttataatatataattataatatatattataatatatactatattatatataatatagtatattttataatatatactatattatatataatatagtatatatttataatatataatttataatatatataatatagtatatatttataatatatatttataaaatatgtaatatagtatatatttatgatatatttttataatatatataatatattatatattataatatatatttataatatatataatatattatatatttataatatatattataaatatataatatattatattttataatatatatgttatatatttataatatataatatatatattataatatataatatattataatatatataatatatatttattatatatatattatatatatatataaaactttccagactgactttaagattggtttgatatttttattttctattttactttgttttgcagtgctatgaataattgacagatgactaaaataaccatctttattgttacagcaaaaaccttgatagcggtgtttgttccatagtgcatatttaaaaggctgtatttcagagggtcactctgggctaatgacctttcttcagattaaatatatatttttaaattttacaaagttctgggtattctaaccataagaaataactgaaagtgcataaacctttacaaaatagcaactatcaaattattttacttctacatataaaattagttttattgactaggaaaattgtactataaatgctgtgagaactttggagaaataattgatggatagcagagatttaggtagatatatatttagatagctagctagctagaggatagatatagacaatactacactacactgtgctatgtcatattttaataatgacacgcaaaatgctttccatgcattgttaaatacagggtcttcaacaactctaccatgtgggtactttcctttgatcacgtcatcctgcggagatgagaaatcgtttaaccatgatgtcagccttagtctgatgccaaagcccatatttgatttctttgggaattataaattttaaaacaacttcagatatatagaacagttgcaaaaattgtacaaagaactcttacatattcttcatccagcctcctcaaatactggtatttttttcacgtttagtttatcttcttctctcaatctttctctatgtacattatatagagaaagtaagttaaaaaagaaagtaaactaaaacaagtaaatgcaaagtaaatatatgcatatatacatatttaactatatataatgtacattattatatatctttatgtatgtaattactttttctaaaccatttgaaagtaactttcagataggatgtccctttacccctaaacacttcacttgggatttcctgagaataaaaacattcatttacataaatttttacacaatacttttctcaaaatcagaaaatactgatagaatgctgttaccttattgagcaaatctgatccttacttgtaaattgaaccaattatatctgtaacacccaagccccccaaattgaaccgaggaccacctgctgcattgagttttcatgtactttcagtcccctctgatctggaacagtccctcaatctctctctcatagccttgacattttctgttgagtgtaggccagtttttgtgtagaatgttcctcaatctgggtttgtctgatgtttatattaggagacacatgctatcgtttgtcccaatatttcagctttgatcatttggttcaggtggttcctgccaggtttctccactgttaaggttcctgatttttatttttatgttgaataagtgttttctggggcgacaaggctatgcaaatattctgctgttaatcaaacctctacttaccagttttagtatccattgataatccctgcttgaatcaattattagtatgatggttgccaaactgcagtttttctaaatgaatcaatccttctacatgtggaattttacagagaggaagagacttctaacatttatttatgtatgtatttatttggttatatcatacagacccatggattcctattttttactgggttaacatctattggtcataatatcattatttattttgatactcaattcccctagagtagccaatgggagccctctgaagctaaatcccttgtcttttggatacgtcctcactgttacatgcatccttctttcttttctggtgtaagaaaaatgttccagcctcctattatacttttccggctccaaccccagaatcaaccatttctatgaggagccctagtatttttagtggagaaaatgttcagaaactgagtgccaggtgtattcattcctagtgggatgtcattgcttccagatattctcaaagacgaagctaggaaatgtgtgtgttatacacaaaaatatctttatgacaaccccaagtgcatagtgataactgtgattccaatcaagcatcacagtgtttattcgagactcttctttttcaatatctgtagcttccttctgtgacactgataaatctgactctggttatctcaatatttgttgtttatcaaatttagaatacacaggagttatagaaatgacaactcagaacaaaaacaaaactacttattaaattcatttttatattgagttctgactttatgctaaaagtatgtagtaaataattcagtgggtaaagttatttggaaatttccttttccctttcactgtgccatattatctatttgaaatactattaagttcatttgtttgcatttataattggttttagtttgttttattctgtgtccttgctgatttttttaaacataatacattaacaaggttccaaaggtcaaagctatacaaaaagattcagagaagggtcactgtcctaacctgggccctggctgggcactgctaccccctcgtacctcccattcagttcctactcaccccccatcgggaaatttatctcacttgtttctggtttattcttcccatttctttgataaaaatcagcagacatgcatactttcagtgtggggcctggttaaaaacccacgtgtgacatttcaggcggagcatgggcagttgagcaaagctgccctcccacatgggattcagagcacagccagagccctgcacagtcaaggtttcagagcccccggccagtcaggcttttttacgtactcacactgctacatacctaggtctctagctgaggccctgggcaaggccctcttcaggcgcctctgcagaggcctccttccaggaggaggggaaaccttgaagacatgcttcctcactgtgactcagtccactttgagctctcttcacctggccacagggtccataaaactgctggagccttttgttgggtcacgcatgtccgcacggatccacctgacccttgaccagtgcaccattccatggaggaaacaggaacggaagcgagctggtgcttcctccctataccactccctatacactgcagtgagtgatgaaaggtttaactcattaagggcttgttgctttaaatggctactctgacacctggctctctctcccagctgaggggagctccttactccactccactcagtccccttcactcctgcaaataagataacacaatacagatcacctttcgtattttttttttcactcagcaaggtagtccttaaattactccacctcagtgtgtagaggtctttctcatgcctttttcccagctgcatagtactctattgaatggttgtactctcccggtttaggcaacccctaggttgtttctggtatttttcaataacaattactttttgtataatatcatattgttgaaagacaacatgttcacgttgtagaaaacatgaaatttaaaacatattatcttgagtaaacttgcagcatgattttaagaacagcaacttttgcgattgatccttttgaaaattggaagccaaccgttcaaatttattgtcaagtgtttcctctagtgaagtggtggggaaggtttctttgactgtgagttctgaaatgttaggctaacaaatcgctaaactgtggcagtggagaaaaggaactcacacaagtacaccgctgagcttcattcttctgggagaaaaaaggcttctttgagattatatgattggtttcttttccctcaattgcagtaacaagtatatgggctaaggatgatgatcagaaactagagaaaaaaagagctatgtatcaaaggtaactgcaaagggaaaagtagtatggcaatcccagctttcaggcagaagcgcagaaccaactcaattcagggctgtaatattctcccgttcaaggtccagtttcagccacagcctaattttcaacaggaatggcatttgtaagctggagattgtcagctacgctcttgctgctgaatcctgttttcaatgcatccctcctcccttcctttctcccctgtcaccttccactgctcacccttctactctctgaaattgaagcaaattacaatgtactctatagcattccagctagaagaatgaaagagttattcagatataaagaacataatacaggaaagtccttcagtgagaaaatggtaagccgagaactttcaaatttcaagactgaaagtatgaatgcttatatgttacaatcaatatataaggctgaggtcagaaatcaaatgtaaatgacatattcatggaaagtatctactcgcagggtaggatattcttagagatggaaatcaatttgttgtaaattgactgaagttcatttacacgaaacagaacctttgtacaatagagcataaactgacaagataagtattcattctgagactctaaaatggaaaagaacagttcaaaactgccaagatgaaggtctccatctggcatttcaaatttgctgatattttatgaaagtcagttttatgttatagggcaattttctgccaaagaaataaaaggtgggactaattcttgtttaaaataataataaaaaaaaactgaatccatagcaaaggcgacacatctgttgttgttccaatttattttctgtaagccacattaattatacatatgaatcacatacatgaatttaattcaaattaataatagactcttgaaaatacaggccgattagaaaattactgagcattttttccatcactcactttccatacacaaaatgtaacttgccttggaacccctgcagactgccccttggacaaaatatcctctttgaaaggggataaaatgctcctcctgtctttcttcttgtcttgataggtggaaagtgcacaggactcctgaggtcctctgactgtcccttgccaactttcatctcccatcacgaggagggagaaggttcttatgatggacaacatttgattccttagttgggccatgtctattgctagcagggccaactagaagtagggtattagatccatgcaagttaccctggaacactctcctcgtggctgacccatccccactggtcactcaatagtaacaaccctgagatcacaatttatatatggtgagagcctgaaggttgtcttcggtctcaagcccaagcatgccatggagtcctacctcgcctttaccagggagatgtcatggagctttaggcacaggatcctggcgataaagcagccctcactgctcatctcacagtagtcccttctgcatctgatgctttcaggatcatgcagtaacaagaggggatgggcaggatggatgcctacccaacacgccaactccaccttccgaaacctcacacacgcggctctgaaattcacacacttccactcagtcaactgtgtgtgtgcaactcaaacatccgcctctctcccgggcctgctcaaatggccccttattaacaaagagtttgtcttaaatatctaagatcatagcatgtggattaattttttgtgttttacattttgtgaagctcatttcattattttgtgtggcttcatgaaaatgttgtaaatagctatttttagaacttccatagggagatatatcttatggagtcagctccctagggtggttaagagtctgtacttgggaatccatcagaactggtttgaaattcaggtctgggaatcgctagttatgtagcattaaatgtttgctaatctaggcctagtttacatgcatgtacatgttacaatgaggaaaatgacccttaccacatagaaactatgagggttaaatgggatccaatatgtgtatagaaggcatgtggcatggtgcctgacaatattaagtgccccataaatcatatccattatgttcatgtcataaatattgtagaaaaatctaattctgactaaatgatagaaaatcaccacattcaatgtaacactgaaaattttaaccattgtaactataactaaatatttcaagaatgtttgaaaaaccatggtttaacatttcatgcgatcattcttcacgacaaatatagtttttctcatcagaggctcaacagtatgggcttttgtatctaattaattcagatattttctccattacagtaaaagatccccttgggaaaatcacatccatcatcttctgaaacgttgcctgtcacagcaagggactatatataggcttcaaaatttcatacttaaccttttctgtcacttagcgtttctatttcttttttgatttctataagacaagctgcattcatcttaaaataaaccaataccaagcatgaaaaaagaaaccccgagagagcctctgttgttcctatgtgtcttgctgaggtagctggctgtctatgtgcaatgagcaccatgaccctgcgggaaagatctggaacagagatgaagaacacaggccataataacttttatttttatttttattttttttgagacggagtcttgctctgtcacccaggctggagtgcagtgacatgatctccgctcactgcaagctccacctcctgggttcacgccattctcctccctcagcctcccaagtagctgagactacaggcgcccatcgccatgcccggctaattttttgtgtttttagtagagatggggtttcatcgtgttagccaggatggtctcaatctcctgacctcgtgatccacctgcctcggcctcccaaagtgctgggattacaggcgtgagccaccgcgcccggcccataataacttttagacagacaaagtcaaagtcttgaggctcaatagctggtttaaaacaaatgcacatgtgctcatatcccattcttgggagatgtggttaaaataagaaaaactaatgatgagaggagccatttttgaattacttggagtctaaattatcaaatattttgcaagaaaagcatgtttttattattttcagtcttttatggtaatacgaattaagctctcataatcttgacagatgtgttttaggacctgctttaaaacagcaacaggaatgatttacaattagtatagaaaattgtaatgtgcgaactgatcatttcaaagtgatttctcagtgtgctcagctttttataataatctctaattgtatttatatacttaggatgcttttttgtcctcccaagagccaaaacctatcttgagtatagctctctaccattaaataaatcctacatgagtgggctctgcaataatgagattactatgtaatgactttatgttatctgaaactctaagttaaatataaaatctagagcactacacttagcaagtcacctgtttttatattattattttctcataatttagccttggtgcactagctgaatatcacatcattctttgcctattatatcactacattaaaatatcacaaattcttcttatgtaaagcatcacatgcttccttctagaactttggtgatcaaccatacttagatggtttactgactcatacaacatttcaggaagagctaccaaggtattttctttctactatcagaatgaaacactagggctaaaattctataatcaaatttacatttttatggagaaaaacatgaggtacacagagaccaacaaggttattcatgacttaagcattaagtgccaagtctctccctaaatatcttcctcattcacctttccattgggccctgcatgcctgtgtgttgaataagtaaataataagtgctatagctgttagagtgtcattagaatctccagaaccatgtaagacatgggctaaggagctgaaagaatactttgaggggcactgaagtgtttccaactctggcatgcctcggtgcaccctcaagctcagagatggattgaaaggcaccgttcaaaacaagtctcccagcagcctgctatctacagatcattgaaatgatatactgcaataacttcccctggaacgcttatggcttattgcgctgatgtgtaattaatctgctgagcagtgacaggacccagctgaagagtgcttctggagcttttaagatctggcatgccaaagaacacttggggagtccttggtccacgctttgttagcacaacagactacaacgagcctttaatctgtgattgcacatatgctagataactttatgtattaaaaatcatggctgggtatggtggtcacgcctgtaatcccagcactttgggaggccaaggtgggtggatcacctgaggtcaggagctcgagaccagcctggccaacatggtgaaaccctgtctctactaaaaatacaaaaattagcctggtgtggtggcgggcgcctgtaatcccagctactcaggaggctggggcaggagaattgcttgaaactggaaggcagagatttcagtgagccaagattgtgacattgcactccagcctgggcgacaagagcaaaactccgtctcaaaggaaaaaaaaaaaatatcacaaagtggttttgctcagccttggtctaatgtcagcagcacctgtaagtgcatgtgcatttgtaacctgtgctcaaagttgagaggatggagggacagcagactcttcctgcggagaacaactgtgtttttgtggcttggtcaggcttagagagctcattaggctccagccctgcaaatctgtgactgcagtgcacttctgacttgcagtaaacatggatagaatatagggagagcttggatggaactggaattgtcagtgacagaatgctgactaagtgaccaatgaatcaaaaaaaaaaaaaaaaaaaaaaaaaacagataaaaacaaagaaacatacaaatgatgtctgaaaagagcaaaatcctatttaaagatatgaatgtttttctagatattcttttgtacatgatactgaaaatattttcatttgaatatcaaaaagtggttgatgaagttggatgtagctgataggctaaacatacatatcttggttctttcacaatttcaaagcagttggtaagggacagatatatatgtaggtaaacaaaaaagttcaagcttatcagcatctactaactcgagaaaagcatttcaaaaaacatcttaaatgttgaaattggggagttaacagttaatatgtagtggaattcagaaattgatttttttctcacatataggactaataaagattctccccatatttctacattttaaaatttaggaatgccatgacaaacaagaatagctctctttgaattttctgttaaaatatgtaatgggcccggcgcggtggctcatgcctgtaatcccagcactttgggaagccaaggcgggcagactgtgaagtcaggacttcgagatcagcctggccaacatggtgaaacctcatctctacaaaaaatacaaaaattagccgggcatggtggtgcgcacctgtaatcccagctactcaggaggctgaggcaggagaattgcttgaatccgggaggtggaagttgcagtgagtcgagatcataccactgcactccagcctgggtgacagaacgagactctgtctcaaaaaaaaaacaaaaacatatatatatatatatatatatatatatatatatatatatatatataaaatatatgtgtatatatattatatatataatatatataatatataacatctatatacatcaaatatatatataatgtacttaattgataagaaaacagataattaaactatcatataaaaccacacttaaatgactaaaaatctgatgctttttaacaaaggctttcaaataattggtcagtacaaattcaaggtcatccaatccctttatgctttatgaagactagaatctgttcctctcatactttttgatgtcccggcattacagggaatatatatatatatatatatatattttttttttttttttccttaagctcttttttaaaataatcttttaatttcgtttccatgaacattttgaagtcccttcctccgtgactaaaatatccccacatgctcagataagaaacatattactcatccgaagtttctaggatattactgtgcgtacaaatcacctgatgatcctgctaatatgcagattttgattccctacttctgggatgggttgagatcctgcatttcttctttttaaattttaaatccaggtggtacatgtgcagttttgtacatgggtatatcgtgtgatgttggggtttgggctaccattgaatccatcacccaaatagtgaacatagtgcccaataggtagtttttcaacccttgcccccttctttccctccctactttagaattctccagtgtctattgtacccgtctttatgtccatgtgtacccatcgtttagttcccacttataagtgagaacatgcaattatttgattttttgtttctgcattaattcccctaggattatggcctgtaactgcatccacgtcgctgcaaaggacaggattttgatctttttttttggctgcatagtattctatggtgtatatgtaccacattttctttatccaatctaccattgatgggcatttaagttgatttcattactttgctattgtgaataatgttgcaataaacatatgagtttttgatagaatgatttcttttcctttgggtagttacctagcactgggattgcagggttgaatgggagttctatttttagttctctgagaaatctccataatgttttccatagaggttgtgctaatttacacgcccaccaacagtgtataagcactcccttttctctacatctgcgccaatatatgttattttttgacaatagccattctgactggtatgagctggtatctcatgtggttttcatttgcatttctctgatgattagatgttgaacatttttaaatatgtttgttggctgcctatatgtcttcttttgagaagtgtctgttcatgtcctttgtccccttttaaccggtctttattgttgttgttgttgatttaagtttcttatagattctagatattagtcttttatccaatgcatactttgcaaatattttctctcattctgtaagttgtcagtttactctgttgattgtttcttttgctgtgcagaagctctttagcttgtcaatttttgtttttgttgcatttgcttttgaggatttagtaataaattacttacctaggtcagtgtccagatgagtttttcctaggttttcttctaggattttaataaatcagtgccttacacataagtctttaatccatcttgagttaatttttgcatacggtgagaggaagcgttccagtttcacttatctgcatatgcctagccagtttcccagcaccaattattcaatagggtgtattttccccattgttgatttttatcaacttaccaaaggtcagttgcttgtaggtatgaggctttatttctgggttctctactctgctccattgatatatgtgtccatttttgtaccagtattgaaatgggaaaggttcccttgtccccctagcagggcatgcggtgggggtgtggcttgcttcttcagagccctgctgctccaacctctaggtgaacatacagacgggcaggctgtggggctcccaccccacagcagtgtctcggggtgactgtttacagctcctaaagccccagtgggcgtgtgttacagggtgttctcttagtttgcctacgggcaccttgtgttaatcaactcaattagagcgtctaccttgttacaaggacagagggctttctgtatccccagtttcttgccttggtgtaccagaagaatcagatcacacgttggcttggcgaatgggtgcaaagttttactgagtggaagtatctctcagctgatggggcagcaagaaggaagacggtttttccctggagtcgggctgcttcggggccagggctctcctccgaccgccccagccaaactccacgtggttctgctggtcgcctgccggtgtttgtcggtgtgctcttctcctagcctgctcctctcctcgccctctccacgactagcggcttgcatcttcttccgccgatgtgctcctctccatgtctggccgtctgtgtgtctgcctgctagggtatcgggtttttagagacccaggatgggggtgtggcggaccagggtggtcttagaaaatgcaacatttgggcccgaaagcaggactacctgtcttcacctaggtccatgggggtggagccgtagccagggaccacgccctcctttacccagcacttcccttccctccctatcatttagaaggaccatactcttccctttccagtactcctgtattagcatcatgctgttttggttactataaccttgtagtatagtttgaaatcatgtaatgtaatgcctctggctttgttctttttgcttaggatttctttggctatttggactcttttttggttccatatcaattttagaattgctttttctagttctgtgaaaaatggcattggtatattgataggaatgacattgaatctgtagattgttttgggcagtatggtcattttaatgatattgattcttccatccctgaacacaggatgttttccagtttgtttgtgtcaggtacgagtccctcccttcctccctccctcccccaaccctttttttttttttttttttttttgacagagtttcactctgttgcccaggctagagtgcaatagcacaatcttggttcactgcaacctctgcctcccaggttcaagcaattctcctgcttcagcccccaggtagctgggggtaattgcatgtgccaacatgcccagctaatttttgtatttttagtagagacagggttttgctatgttggtcaggctggtctcaaactcctgacttcaggtgatccaccggcctcggcctctcaaagtgctgggattataggcgtgagccacagcgcccagcccacttatttctattttaaatttttacatttaccacttttttgttaaaaattaaaacagagttttgtagttctccttaaagagatctttcatctccttgattaaatgtattcccaggaatattactttttgtgtgtaaggctcttgtaaagcgaattgttgtcactatagtgaacaatttttagactcaggaacttctaaaaccacatagatgcttcagttctgaactctagtgaccttggtgcagtcccaaacaaagatctaacttttacacctaagaatgaattttgagttcatcgaagacctgaagtatttgcaaaaacaaagagaaagcagtcttataaattagactaaactgtaagcatctcaaaaataagtccagtgtttcattcctttgttgtttatagtcagcacgtgcaccaaataagtctttttttatattatgaaacatttattacatatttttatatatgtatataacttctatacgtttctatgttgtgttcatgtccagattgtatttttttttttttttttttgagacggagtctcgctctgtcgcccagcctggagtgcagtggcgcaatctcggctcactgcaagctccacctcctgggtccacgccattctcctgcctcagcctcccgagtagctgggactacaggcacctgccaccacgcctggctaattttttgtatttttagtagagacggggtttcaccgtggtctcgatcttctgaccttgtgatccgaccgcctcggcctccgaaagtgctgggattacaggcgtgagccaccgcacccagtctgtatttttaaattatgtattatttataaataatttcagaagattagtatactctcatttgaccatcaaatctgcaaaggtacttttgttttcttccttcctgtgcagtacagaaagtgagccttttctaatccgtgtcatgtctctccctatatactgtccaattcattccatctttttagtgacttccttctattgactaccctttcttgcagtgtcaactttttaaggaaaccttgtcagtgaattctgtgatctcccagtggccatatccatggtgctttttttttttttttttttttttttgagacggagtcactctgttgcccaggctggagtacagtgccacgatctcagctcactgcaacctccgcctcccaggttcaagcgattcttctgcctcagcctcctgagtagctgggaccacaggcatgtccacacctggctaattttttttcatatttttagtagagatggggtttcaccatgttggccaggctggtgttgaactcctgacctcaagtgatccacccgcctcagcctcccaaagtgctgagattacagacatgaggcactgcccccgggccatggtgtgtttaatgtgcttttaaatacaggagcaatcaaggcttggtagatagggagatgagggccaaacaagcagttgcaaaccactattgcagtcaaggaaaggttaacaatcctttcttagcagaacagacatgggctcgcaggtcctgtcaaatgaaattacttgtcagcatagctacatgcagaatagttcaacagcctggaagccagaaatctgagcttcttcatttcttagttctttcagtgaattgctttgaaatatgttgacatctgtgtaactttgtggactatcacttccgcaactccgtgaagacagagaactcttatatgtattcgcgtattcatagacacatgacaaatggaaggcaagttggctttccctaaaatgcggaggcacacgtgtgatgccttctgctaacactgcaattatgtactcataatctctcattgtaaatagaggcagatgaagccactccagctctacgtcaactctcctggaaagaaccagaatgtaggtcctgtaacctactgagttttcattggcttcatgaacacgtatgtcctgcaatcttgtggacctgtaagctcttcatgcattaagacacattcactttcagccacctcaactttcctaaaagagatgcttttgctgtaaatattctaaagctatttcagtcaagatgttctgaagctatattacttagaaaaatgcttttagtagggaaagtggagctccctaaaggcatcttaatatgtacttatctgctttgcttttttttccccccacaaatggcattcatcaaaataagttaaatagtaatggcttgaaacgtaattgtgctgttgtacgttctccaactgtgtacattcaacaaaccttggaaaatttcagatcacatgaagagcaaattattggtatgttgttggcaatcaggattaagttgccagagtcatgttgcttaatagcttgcttttcataaaataatgatggtgagaagttaatatttattgagtctaccgtatgtgtaatggactgtacttcaggcattttctcatttaatcatgataacaaacctataaactagaaaccactttgaattcctagttaatagataatgaaactaaaaaagagagataagcaattttgcctgtggtcacgtggtatgctgcggtctagagctgggattcaaatctgggcttctaacttcagaaccctcacttatgacctctctacaaattctgctctccccaaaacccatgtcaatcgttagtgtttcaagactctaagcattattctttctatatcaagaaattgactgtatttttagtctccatacttcataggaattcatcttatgattcctatgtttttggatatcctcctctgtatgtttaaccatgatattaatcttgacatgtttcaatgttataatcacagaacaccctaagttgatgttttgcaccatcctcataaagtaaccatgtttgtggtccctctgggcatctatcctgtcagagaattgctctgatttccacttattttcagttcctgcgagtgcgacaaacctctgtatattcttgtgtagaaaaaccagtcctcaggcaaaagtagaataagtaagcaatacctttatcctgttacaaaactaaagaaatatcagcaatttcttcaagagcaagctcatgtcacttcatctgttaatccttcctgactatgccaggtgaagttaaccacgcccaaatttgtgtttccagatatgccatataacactgtaagtgattatactctgcaatgttttaatacatctgcctttctcataagacaataaatacttgctggggggtgggaaggggcatgcttatttctatattcacagatcttagcacagttgctgaggttgcctccgtgcttaatacatggttgtggaaagtagggagaaagtggagaggaggaagaaggggcagaaaaggagagagggagggaagaaggaaggtggggaaggaggaatagattaattacattaacttggagtgtggtttatattcatactagatgttttgatttttccataatttcccatattgccaggataaaaaaaaatcacataagaaatatactccgaatactgcctctgacccagattccaaagaacagaaagaaagatggtcagaaacactgagaactgtcatgtcattaggctttccaggagaattctgtacagcttcaactgtgctcttttagaaaagccaggtgttataaaaacttggttgtttattgacgtattttatctaaaacatggttttaaagtgtgtgcgtgtttttaacctgataggtagaagctagaacagctgccatttaaacattgccatcagttttctatcttctataatgtggaggcttaaattcccctttggaacaagtatgtcaatgttttcagtgaaccatctaaatggacattttagttaacacaaagtgaaagcaaagtctgtgctctgaaacggagaggtttggggcgaggcaggggaagacaagctgcaggtgcatctttgctggttctatctccattgatgacggagccctgggccggctgctgtgtgctcctgtggaggtgtgcgtggaaacttccgggcacggaaatctttctttaggaaataagcagtaggcaagagatggaagaagctgcttcctttgagagactctgaggagctacgggcacaagcattattgctttagggagctggctacaaaatggagcagtgaatggagggaaggacgctgtccaaagccacacagagcccagcatgtctgggcacccacaggcattggcttgggaatattgggagctactaacctggaagtggatattggtgttttcacatgggggacccgtagcaaagccaagagggtggcgtttgactggcttcagggtgacagcaaacagtggacatcgcccaggaggagagctcaggaatgaaacatggcacaagccatgtggaaaccaaagagaagagggtgctgtgaacgcacatttcctgagctctttggagagtcccataaattattactgtggtgatgtttagaatgataggatggaatgtaccagaaattcaggtggaacaaacatatgtcattggaagtttagcatcaaccattaaagtgactgtatttgtgcccaaatacaatcagaactcctgtggcaggccagttatttgccctgcccttactagtagctcccagttctccctgcacttcagaatcacccaaggagctctgcagaaacaaacccacccacctccacccccacacatgatacagagaaattcagtcactgggtctgacatttctattttttaaaaaagaaaactttccaggtaattctgtcttacagatacttttattaaaaattgggttaaagtttgcagaaatcaattggggatacgcaacatcaaatatttaccatgaaggacctttcttcaaggttgtattttatgtctctcaatcattagtaaggcaagttcctgaagttaagggatgtggctttcacatccttgtatttcccacaggaggtaatgtgtggggaaatgaaatgcgtacttgtgctgctgaaatggcctatttgctcatcccagtttcctcgatggcaccgtgcaccgcactctagttcatccatgccagcgctctttgctctgctgagcaaagttgttcatgaggtttggctccctctctgctgggattttgcctcatcctttattctcaaccttgaccctgtccaatttgttcccactaaacgccataactttgtatttgcttaattgtcctggattatcttgggcattatttttgttgttgttatcattggaaggtgttaacaactccttcctagtatacaccataatataaaaacacattaattatgacatctcagtaatttatgaaaatagcaaatgctagtcccatgctttgtgacaggatcttgctctgtcacccaggtgggagtgcagtggtattatcatagctcactgtaatctcagactcctgagctcaagccaaccttctgctttagcctcctgagtagctgttactacaggtacacgctatcacacccagctaattaaaacaaaaaatcgtagagatgggctctctctatgttgcctatgctgtgctaaaacacctggcttcaggcaatcttctcacctcagcctctgaaagtgctgagattacaggcgagaaccaccgtgcccagccgctgcacctttctgttccatgtttttctcagaaccccccaaatttcccagacagctggctgaaacttttaatacatccctacaactaataatgccactttcttcccactccttgacaaatgatgttgcctcccatgttactgcagctccccgttatctgcccatctccactgatgaaatcactgctgggaattagaggtactctgaatgtaaaacggccccagttactggaaagatctcagaaactgtcattagtcatggctgcctcatgctctcatctggctggtcttcttaatgtcactgtaacatgtcacagtgatttgcatctttgcacctttgcaggaagccccttcctttcctggaatcaagccttctttttacccttgtacagttacaagccttcctccaaccttcatggtttaaggcctttccagcacttgccaaaacccttccctgcacactccctgttctaagtgcaactttttctgctgtctcagaatttgggcagaggctctgagtctgagaatcattgttcctaggcagttacagagaatgaaatgagagacctgagaccctgggctcacaccctgaagacaagggagcaaggtgctttaagaggaccgcagagagagagctctaggtactggaatttgtggatgtacaggtgatggacaccctcctggagaattaacgaaacatctctatcaagagcagattcttcaagagtgcagtctatgaatactgttcctgatcattacctctcctcagctcactccagcccctccaccctaattctggaggagccacgaaaggagtaaatggggaaggaagaatgagagaacaaagaaattaaaaagaaactatagcgcatttcctcctctaagataagactgagtggtgagagaggaagaagttgacattacataagtaacactttgatgttggccaacttgacattttgataatggaaaataaacaatgcagctgagatgtccagctcggatgtcctccaaggcctgagaaggacaattctagagtgatctaggaatggtgagaaagcctttggcttctttctgcacacacctttccaagggcacctattttttttttttaatgataacaaatggtgacaagaatatatgttatcattcaaattagactgcatgtttgaaataattgcccagagtgtccatctgctgctgtgggtatggaaggtactcgatcattattggttgagccccatcctccacatccctctcaacatctaatccttttttttatctctcataggcaagagcagcatttatagtcaaagcttatttacaaatattatgatgcaaaagtaagattatattcaaaaggctgccaaaagagtcacttttctttttcttttctttttcttttttttttttttgagatagcatttcactcttgttgtccaggctgctgtacaatcatgcaatctcagctcactgtaacctccacctccaaggttcaagcgattcttcttgcctcctgagtagctgggattccaggcacgtgccaccatgcccaactaattttgtatttttagtagacacaaggtctcaccatgttggctaggctggtctcgaactcctgacctcaggtgatccaccccactcaacctcccaaagtgctgggattagagttgtgagccatggtgcccaactaagagtcacttttttgtggatcgttgcatgtcctgaggatatatgaagtcaggcaacagaaagaaataccatgtcaagataattcagaacccagttagctgaaagcttgttctactaactacatgtgaagtaatgttctagttatttcagctgtaattccaaattcaaaattgtttacaccctctggttgcctttgtactcatggataaaacataactgtgtcatcaatattatctggctcataacagcttgctactaatgctgcaaggttttcaaacagctttagccgacagcacaagcagcgcagagtttcttaagggttaatttaaatgtttatatttaagaagcatattcatctccccttacaatatccatcagccatcttgcataaatgtatttctgctgctgtcataccactctttggagaattttatttttaacaatgaaaataataatattttaaaaccaccaagcaaaaacaaggcaaatatgatcataagattacctagtcatatacttttctctaaaaaccatacctattttgttctgtagaaaaggaattctaaggcagagatgggagtgaaggagagaacattttaaaatcaggagacaacagaaaacatgtctgaatcttgaggcaaagtgggggccactttgcagcctaggccagtttgtctgtcaaccacctctagagaggacaaaataatttcatgtttactagctactatctgctggttatcttacgtatataacctcattccttctccttgaaaatactgcatgattatcgcttcatatcgatgaaaaaagcgaagctgagagaggttaaagtaaaatgccaaggttctgcagtatagctaacggtcactgctcttggctcctttttcagagaaagcatggctagaagatcttgaaagttacagaaagccccatgagacaatgactcatctctgatgtgtggcagaatgagaaaccacacttacagtggtatcctcatcactcttccattgaaatgaacccaatgctcccacatgcaatccaacgagagataaatatgacaaaacaaagaaagctgcatgtttgaagtgctttccaagatgtcttaccacactcctgattgggactgtaatatccaagaagcttgacccaatttctctgagatcctggctttcccctaacctgacactcttgttttattcttggtttagagaattcttgcccaatctttctgcctcttttattccagacactggctcctctctcagctgtctcacatgttatgaatgatctcgcctccatcacttttcacagctctttacaagtgctgaccatggatcatattcgagtgtatcagggtctaggacaatgtgtttacattacagaaatatgactggctttcacccttctgaaacatctctttttatggaagacattcattgataccttcagtcttaaaaacttgttggcatagaagaacaggaaactggaagaggagttttttacttttatacttttatttgctaaatgtgttaaacccttaaatgtgctacatatgtactataaggaatgcacaccattggtcaactatcataatttatgctctgtaattcacaatgcatactttatatatatgtgccttagttataactaatatgcttctttttttctttaaaaataatatagatcaatgatatttaatgtttaaaggaattttaaagatcatctagccccaaaatatcatttcgtaggggaatttggtcaatatctctttaaagaggtagaatggaaagccaggttcctgagttctaatcattcccagaggttctcttgtagttaaagcatgattttttaattaattagctttcatcttagaaatcgttttttatcataaagctaattttcagacatttggaaaactgtgtgagttatcaacagatgaaattatgctgttcactcatttaactgttcattgtgtgttttccttccatcttttctatcttgtttatttattaatctccagaatttagaattatgccttgaaaacaaatatttgtagaatgcatgaatcaatatgcaaagtataagaaaggtctctctttgaattctgacatagccctatgaaatattataacatggaagctgccctttgatgtaactggtcctaattaaatcaattcagataatgtagtataaacgatctttgggaatacagtatcataatgtttgaaagttatgaaaaataaaggggagcagcaaatatgcatttttaaaagctatacacaaaattggcctcgctcacagggtcattcaattgtgtgtgtgtgtgtgtgtacacatacatatatatatatatatatagagagagagagagagagagagagagagagagagtgtctactacatgtcaggtactatattagttactttatatatttagcacctcagagcttgctgaaaacaacccttatggaagatgctattattattccctatgttaaaagtgcagaaactgttttcaaggtcactcaaaaagtagtgctggtaaaacagctagaaactgggtgtttcttgctccaatgcctttaaggctatactgtgctgtcttcataaattgatccacaataggtagagacaagtagaaacaagcatatttcctgcagtttattcatttccttcctatctgtttttgcataaagtttcacttataaaaattacacaaaacttgaaaggtgaacaggagatattaggcttagaagaattccttatgatgaagaacactttggtactgattttgttaacacacttttccaagtagccttataaatcaaatagaaataataattttaaaaaccctaatgactcaacatacttcattccaattgaaacctactggatacatgtaattcagagaacagattcttctcagttaactttatccaagactctaactttttcagtcaggaaaaatatagcccatatggaatgttaaccttttatcacggaattatgatttcatagcttcaaattgctggtccatgaggaataacagccgagagcttacatatggaggtaacaaaatgttaatgtcttagtccttttgcattgctataaaggcatatccgaggctgggtaatttaaaagaaaagaggtttagttcgctcacggttctgaaggctgtacaagaagcatgtcaccagcacctgcttctcttaagagcctcaggaagcttccactcatgatggaaggtgaaggggagtctacatatagagaccacatggcaggaagagaaagacagacagagagaaagagaggaaaggggcccaggccagagagagatatatatatatatagagagaggctaggctctttttaacaatcagttcttgcaagaactcatcaagtgagaattcactcattaccttgaggaggcaccaagccattcacaaagggtctgtccccatgactcgaacatctcccaccaggccccacctccaacactggggattaaatttcaacaaaagacttaaaggggacaaatatccaaactgtatcaactaaagaattaattttgggggtgctaggttttctcagaaactaaaaaatgagatataacttgccattatatgatctgtgtttaaagtacattctctctcgtccatatttctccaggatgatatgcttaacttaggtgttaaaaataagtccatctgatttattttcaaacttcataaaaaattatagatcatgtagaaaaattaatctgtgtgactagtaaaagaaaatgtgacagcaatttggagaatttactatagcagatattaaatatgttacaatgtattaaatgttagagggatcaaaataatacagttttcagggcagaatgagcagaggaatggaatagaacagactcgagagataagaccctcaaggttaatataataaaaagatgagatttatttcaagtcaatggggaaacatgttttattcaataaatgatgcataaaaagtaatttgtagatttttggtgagaaataagtaacattagattcatagaaacccttcacactaaaataaaatctgtatgaatcaaatatttaaatgttttaaaaagtgaaactgtaactagaaaagattttcattaaatatctccaagtgtagagaagatcctcctaataatgataacaaagacataacgccataaagaaaacaatacggccgggcgcggtggctcacgcctgtaatcccagcactttgggaggccgaggcgggcggatcacgaggtcaggagatagagacgatcctggctaacacagtgaaaccccgtctctactaaatatacaaaaaattagccgggcgtggtggcgggcgcctgtagtcccagctactcgggaggctgcggcaggagaatggcgtgaacccgggaggcggagcttgcagtgagccgagatcacgccactgcactccagcctgggcaacagagcgagaccccgtctcaaaacaaaacaaaacaaaataaagaaagaaaacaataattacatcaaaattatagtttaaataattttgttttgagatagagtttcactcttgttgcccagggtggagtgcaacggcaggatctcggctcactgcaacctctgcctcccaggttcaagcgattctcctgcctcaccctcccgagtagctgggattacaggcacctgccaccacgctcggctaattttttgtatttttagtagagacagggtttcaccatgttggcctgacttctctggagcttctgacctccagtgatccccctgcctgggcctcccaaagtgctgggattacaggcgtgagccaccacgcctggccatctgaaataattttgaaacgccttaaaaagacctgaaaattaaattacttactggtaaacatattttcaacatgtatgacaagaaatggtttcatacaagaatatatgaaatggtcataagaaacaaactataagaaataatttcttatacttactgtaagaaacttttatctataccgtgcaattataataaaagaaaataaccataatagtaagcaataaataatgaaaatgtattcaagcttcctagtaattggagaaaggcaattttacatgagatgtcatgtttcacctaaataattggaaaaattaaaaagaataaaagcacccagtgttagaggatgcaaagtaaccatactgacatgtagtttgggggaaagtggaaattgatggaaactttccagggtaccttttggaactaaggactctaacacattacatgtaaaatattttgccctttgcaactctactcccaaaattatatttcaaaaatgtgactagacaaattactagagatgtgtctaaggaagatcactaatgtgctgtttttataatgaaatgtagagcagcctataaacttatcaatgcaagactcttcaacaaaataaatgggatgcatcaccaaatgtgctcatagagacctgtatctcttgatatggataatgagcacattatatgaagtaaaagatgcaagttataaaataatacgtgagacacaaaaacaggtgtatgtgtatgtgtccgtgtgttttcatgtgtacacacacacacacgcacatggaaaacagacttggaagaatatgcacccagtgttaatagtgattatctccaggcggtttgattcaagaggttttaccctctgctttttttttttttttggttttgagacggagtcttgctctgtcaccaggctggagtgcagtggcgtgatctcggctcactgcaacccctgcctcctgggttcaagcaattctcctgcctcagcctcctgagtagctgggactacaggcacacgccaccacacccagctagcttttgtatttttagtagagacagggtttcaccatgttggccaggatggtctcaatctcttgacctcgtgatccacccgcctcagcctcccaaagtgctgggattacaggcatgagccactacatccggccttaccctcctctttaggtgaaagtacgttggctaatttttttttcagccaacattatgtttttataatcagaaaatgcaacatttattatgaaaataattcaatgaaaatgaggtataatagttttaaattacacatctagtatgacatttaaaaatgtgtggtattctggtaataatcatactggcacacagttctgaaaaaaaaaatagaaaccaataataaaacttttcctaagccattatgaccatgttattttttcctccagatcaactggtatagattattatctatgtcataataatctgttatataaaatgcaaattaagtacatttttatttaagaaaattacaaatgttacagtttggtacaaagttattgtcagagccacttaatttgaatacatgttatttgtagaaacggcaattgactgtgtaggaattatggcaaattgattgtagtctttgtggaaaaggctggagaatgccaccttctgaaatcaaacctagtaaaagtcaacacattataacaactatggtcataataactacaatttattgatcccttacaatgacaggctctgaagtaagcactttataccctttatcagataatgcttaaaacagctgtgtataatagtcacctatacatctgtatcaaaatatggaagctcctagggttgcaaaggtttcatctggggccaccagcctgtaagtatcataacaaaagttcaaatcaagtttctctactgtctgagctattgtctactaggctacatactaagcttcgtctcttttagaggaaaactacagaaaaataaaccatcagataaaatcatttgtaaatatgtcactgatgttgacttgaaaaatatgtacttagaaacctaagagaccagggtataacctcaggtagacatgataggatcacatttgatagatatataacttcatttcaatgccttgggcatgaccaagttgtgcaattagtaaccagcaagaggtggagttgacttgaaagtccttgctggccgggcgcggtggttcacgcctgtaatcccaacactttgggaggctgaggcgggtggatcatgaggtcaggagatcgagaccatcctggctaacagtgtgaaaccccgtctctactaaaaaaatacaaaaaatgagccaggcgtggtggcggacgcctgtagtcccagcgactctggaggctgaggcaggagaatggcgtgaacccaggaggcgcagcttgcagtgagcagagatcgcgccactgcactccagcctgggcgacagagcgagactccatctcacaaaaaaaaaaaaaagtgcttgctactgtttgtctgacaccattcaatgcaaagatatactttaaatatagaaataattctagccctgcctgaatgaactctctttcaagatcacataactctacttcggatgctttgatcattgctatggtttggatatggttcattcggccccaccaagtcttctgttgaattagatccccattgttggaggtggggtctggtgggacgtgtttggatcctgagggcagctccctcatgaatggcttagtgccattctcaagggagtgaatgacttctcattgttggttctcctgagaactggttgttgaaaggagcctggcacctccttctctctctcttgtttcccctttccccatgggacctctgcccagaagactcctcttcaccttccaccatgagtggcagcggcctcaggccctcccccagaagcagatgccagcgccatgcttcttgtactgcctgcaggactgtgaactagataagcctcttttccttataaagtaagtactcaaccttaggtattcctttatagcaacacagactaaacaattatcattgtctgttgctaatttgagccccctttcaataaaactatgacgtacacacacatatgcacacaaacagacagacagacagatgtatatatcaaagtgtgtatagtcttctgtataacagcatgatcacagagaacactgtggaaggtatgcccgtcatctactgctattcaacaaaccaccccaaatgttagtggattaaatattttttagttcttaaaaattaattttactggtaaatttaaacaggattaaattaaagcagcatttggtgggcactgcttgcctctgctctgcttgacaacagctgaggaggtttaaaagctgggaggtggaattgtctgaaagctcacttgttctcaaacacgatggttgtcgatgcaaagactcaaactgctgggagctggtacacctgggttccttagccatctctctccatttccatgtgcctttccctctggtctctccagcacagaagcggtaggaaacctgggcatttacaatgttgtttgggggctgctagtgtacaggtcaacaaaagaggaagttagatgctactttgccttttatgatttagcttcagaagtaacagcataagttctactgttttctgttcttagaaacaagtcactaagtctgacctaggtctgtggggagggaaattagaaccacttttttttttttttttgaaatggagtttctttcttgttgtccaggctggagtgcaatggcacggtcttggctcactgccacctctgcctctcaggttcaagcgattcttgtgcctcagactcccaagtaactgggatatacaggcgcccaccaccatgcccggctatttttttttttttttttttgtatttttttgtagagacggggtttcaccatgttggccaggctggtcttgaactcctgacctcaggtgccacccacctcggcctctcaaagtgctgggattacaggggtgagccaccatgcctggcctagaaccacatttttgatgtatttatgaacctgcagacatatttttaaagaaccacgcaaggatgaatagcttggtaacattgagggaggtcaagttagtggggagctgcccaaggagaacagtagtgaggaagaaaaacaacaagaatcagacagggacagagtggagggcaggagggaaagtcatgcagctgagagggaagatatgaataccatggaacgttgggaagccgaggtgggtagatcacctgaggtcaggagttcaagaccagcctggccaacatggtgaaatcccatctctactaaaaatacaaaaattaacccagcatgatggtatgcgcctgtagtcccagctactcgggaggctgaggcaggagaatcacttgaacctaggaggcaggggttgcgaccagctgagatcgcaccactgccctccagcctaggtgacagagtgagactctgtctcaaaaaaataaaaaataaaaatgaataccatggaattggagctgttcccagagtataaaccaataaatgaacatcatggttcatagtctactgtgtattagatagctcatgagttcgtctctttaagaactgagttgctaaaatttagttcctgaacctgtaaacatttggactcatggcaattcttaccacttggtggccattctcttcaacatgtctttagccacaaagcactatttgatggagagagtaaagacattccatttcttcagctcctcttaaagctccaaatgcctccaggccccacccattcccccacctctctctctttctaaacagagattggttctcaccatttcaaagggtttaggttgttactgtggtttagtttagctttgctttgttttttgaggtccacctgtcgtatctgtgacagaatttgcaggaggtactccagttgtgatcactgggaagaaaatgcggtgaaatcagactaacccatagttctcagtatatcattgcatggcttctaaggaaccacaatttaaacagtgcatgataaccagtattaatggattatagcccctaaattgtaacaattgtgactttgtagactcctaagtatcttctggtttgggtaacctttctattatttgctttcttgggatctgtcagttacagtgtgcatttagtcccgtacgtgtggctgacatatcctatcctagagtggccacttgtttagaacagttctattgatcctgcatgttccctaggaggaaacacaaggccttgctgagaaggctctcaagcttcactcccatgcagtatagtttacatttctagttttgtgatttagttctcatggagccataggccataattactcagctgtaatgaacctcacaatgcatcaatgcattcttctccatttatatttgcttttatttgaatgaaataaattcattcaaataaaagcaaatataaatggagaatacattcacaagatgttcacaagaattataataacataaatgaaacaaacatttattttattgaaataaaagcaaacataaatggagaaaaatgcactgactatggttcatgactgaaccatagtccttatttatgagacacagtcttgctctgttacccaggctggagtgcagtggccaatctcagcccactgcaaactccacctccggggctaaagcaatcctcccacctcagcctcccaaatagctgagattacaggcatgtacccagctaattttttttttttatttttcatagagatggggtctcataatgttgcctaggctggtctcaaactcctgggctcaaacaatactactgccttggcctcccaaaatggtggggttataggcatggtccactgtgcctggctgaaccatagcccttttaagcattgaatgcatttaaaatattttcattgttctatcaataaaatatccacatttaaatgcaggccttataataattaatactactcactattaaataccaaattagaattgattctctaaagtgtcttcatatattgtacattgtgctaggtaatatgagttttaattgcttaatataaaattacttaatggcacttataattcttgtgaacatcagtataagttttaataaaatggtagaagcacatggagaaatggttctttgattgttaaaatagttcatttttataaggcaggtaagaaattagtaagttagataactacattagtccatttgcatgctgctgaaaaagacatacccaaaaacaggaagaaaaagaggcttcattggacttacagttccacatgactggggaggcctcataatcatggcgggaggtgaaaagcacttcttacatggcagtggcaagagaaaaatgaggaagaagcaaaagcagaaacccctgataaacccatcagatctcgtgagacttattcactgtcatgagaatagcatgggaaagaccagccaacatgattcaatgacctccttctgggtccctccagcaacacatgggaattttgggagacacaattcaagctgagatttgggtggggatatagccaaaccatatcaataaccctgaggaaaaaatcacaatgctgggatccagaaaaatatagatgtttttgaataaggtttttgaataagaaaaatctccatatatacacagttagataaacccaacagaacatccttcagttttgaaagccaaggaagcttcattgaatcctgtgtctgcataaatgatcagtgaaatttcaaaattcactgatgtgcagtcttgcttcacaaatggacaaatggagatgaacagaggccaatggccatggacatagaaggagaaggagttacagacagaatcccaaactctcaatccagtttctcaaactgtccagcatgtagttgctattgactcaattgtcctttggaaaggatgaagtctcagatagtctcaaagttcactttacatagtaacccattttgtctcccctctaatattttgaaaaggtaacggcaacagaaaagggtcctcagttttctaggaagattgacaagaaggaagcagcaggaagagaaaggcaggaaaatcttcatactggatcatccatttctagcgattatagataacagagttgctgataaagatagaatttcagtcaaccactaagcagattcccactgaggaacaccctggagaaacacgaacagtcaagacagaagaccaccagatggctgatcttaataacccaataaatacaagaaaagagtggcacttctacccagttctaaacgaacatctcatttgtatgttgtgttctgagttttagggaagacaaaaatgccaattctaatttacctttattcacactttgccagggattcaaggaaggcagaaaaaattgtacaaaataatcttttgtttttgttcccttcaagattctcttttactctttttgttccttatgccatcactccaccacaaccatactacagacttcgcaactgctgtctcagcctttgaaacacctaaacttcaacatgctgagattacgcctattacgctaatgaacttctacaggaacgaacaaacgaaaaggaagtaatgcaccacctcctgtttctcagccatcaccacctcccaggtgcttcccagagcagttccctgctgccacggggctcctgcaggagctcctccctgctaggcatgtcctcaacccctagtcatcaagtctagctcagcctctgcatttcagctcaacgtctaatttcccagcgtagattccaggcagccgccctgtttcatgtcctcttaacatcctctgcttttctatctcatcttccttcttgacaagttcaaagtcatgaggactggatagagctccatcaaagcagggaatgttgattttatacactggagctgagtgggcagtctggcacagagcaagtggccagtaggattacggaatgcatgaaccttaattttctattcctttattcctgtcatttcctgtacctcacaaaatgttcccaaccatgccaacatcaccacctgtgaaaatcccaccactcttcccttgggcctcacctccatgaagtcctctttgatcacctttgtgttttctgaactccataagcactttctatgcgtgtttcacatcactcatgatatactaacttgtgttatttcctctgccctattcacagagggaagtccttgcatggtccttcacatccaatcttattagcatttaggtcatggcataaaaatcatcgtttgcctacacgtctcactccatccccaatttttcccaaactatgaaagcagtgaattcaatactcgtttttctatcttagtgcttggcacagaagagatgcttggtaagctttttacttgctctgcggaatctgaattgcagccatttttgtgaagtcttctctactcggctagattcctacatcctgaaagtcagtctttgttttctgcatagtgactagcacaacaaatcaatgtgttataaaagttatctacatttctttcaatggaaagatgcaaattttaaaaacgatcttttgcttttccactcttgaaacataaacattttctctgtaccttgtaaataatacttgcgtaagatgatcaccactgaagttattttcccaaaccctgagtattaaggggaatgatgactgcctacttgaggaagctcagatgatccgaagatcccaaactatgttcctttctccaagaaacattagtggaagggagtgtttcaccacatgtgggtcaacagtacgtgacatcgtctcagttgtgatttgattctccatatgcttataatttccattctaaatctcaagtttggtaaactggctttaagggatttttgccacatatatcttaaaaactaaattttactgtggctcttgataactttttgagagctagcttgacctgagtaagacagatgatagctccttaatgaccgccatcaaggcatgatgaagtgcgggtccctgggagccatcaatcacctgctggaaggactaggagggctgtttcccggccgagaagcaggcctcaatctcttggcccattactctcacgtcttccttctattcttctcactccattaggctcctgtgtatctgcactgaggctatctcagagtgacctcccatctctaatccttgatatttccatttgggtctaatgtaccatctcgattgaaacatttgggaaagcttacagcggtatttaatctttctttgctctagttctcagaatctcatttataaatctatttgaaattatcttttttgtatctattactatcttttccagtagatcgatatgtactctctcctaatctaaaacctagtggtctagaagcacacctctttctgagtaattgtgataaagtgctttgttgtttctttgttttcagggcctttgtctaaacctgcaatgcaaccatcaacacagcctcggactgacacgtttggcttttgaatcattctatggaaaggcaaaaaacgaagtaagacttttgaagcctctggggtttataaaccggtataaaattcctcatatttgaatatgttgtagtaatatgcatgattttgttctactgcacataaagtgcgatacaaactatagaacagaagatcgcagatcatcaagtgtaaaaaacagctgacattcaccttgactaggagtttcctagaacagggaagcaagaagtatgtattttggaagctgcatattgctggaaagatggcgtcatagactaaaccaaggtcatgttctgtgatagcagtgtgaacactgttatttcacacgtgcagattctctgctacagccgcactggttctggcacctggttttcttcctctggagattattttttcatgtagcagtttacaaggaatctttaacactaccatgaagaagatggctgttaattcaattttccaccaggttataaaagagccctgatgaaaaagaagttatgtcatggttatctcacagaaaaaggagaattaaattaagcttagggttcataccatcattgacacttttttccatgggaaactaatgcgttttcatatacaaacgaaattttgattcaaatttgcaaaatttaagctaattctgtaataaaaatctatcttctaattttaaccttaacaattaaaaaaaaaaacaagaaattttttgttatcaagtattcaaaacttggtttagaaataagctgtccttgagtctgaatgctggattgggtttttgaaaaatgttctaagaaaactttctagtttgtcaccccaaattgcatgtcagacaacagagaacactttgtcacgcttagacaccattcaatcataatctgagtttgacttcaaagttttcacaattcaattttgtttagaattaagaaaacatgactgtggggaccaacgtaagggcaggcagagcatttctcttcagccaaacaccagggcagaaggaaaaggggagtgaatgagtccatttgtcctttacctctgttttcattttccactctctacatttaagtgtccagctgctctttgaccacagtgggacccctcaaagccacaaaggctggaattgcttaaatatatatttggagatgcttgtgctgatagttattgtacagtgcagacgagcatgggcaacacaagaatatggagcccacggctctcatgctgtgcaaatgaagaccgtcatttgtgactatctcagggacacttttcaatccaagagcatttcttaaaaacaaaagcaaaccaaccttttattgttattagacaccagaaaaaaaaaaacccaaaacatacagttcacacatgaaaccatcctgagaaattctgagtctcattttctgtgattctaatgaagtctaaaacaacaataaaaacagacaaaagaaatacagattccttggaggatagtaatttgatcaaactaaaacattattaagaaactttttggacataaaatacggaaatgacttctgacataaatcacaattgctcagtattaggagacttatttgctattaattttgtttcagtcaacatctctcaacaacatgaaatcagaggtgcagaccatgaatattaactttcattcaaactaacgttccagttggcatatactgagcctaagagggggaaagtgtgaaaaatagattgcatgttgagtaagatgaaaacactctatttattatactgagtttaatagttacattatttattatagttcaggggatagttttaagtatctaatttcatttgaaataaatcttggagttattgtaagaggtgttacgctacttgttctgataagaaaaaaaatgtttgatgtataagagttgaactccagtcaaaatcaaataatctaaaaaagaaaatgttattttacataacacttcaggtaaattctgcctctcaaaaatagatgatatataaaaaatattatagcttgtgtaataggaaatcaacacccctcaataagaatttctttaaaatgaccttggtcatttattactttaaagagatcacttaaattttctttcttttttatttgagtaaatacccccatcctaaaccctactgtgtgactgtcaggtgtgagggaacaggcaaggttcttgcagttggctaaggggcacctcattaccagaaaagcaccactgaaaccacaggtctcggaggggagcgttggatgacagtggacctcagtgttacgagttaggattcggaactcagaaataatgctcaggcactaggacttcagggttttccttagcctatgtgtgcccaagtaagagaaacacacatcccccagtacacatacaaacacaaattattgttttaagtttttaaggccagtgtgtccaatcttttggcttccctgggccacataggaagaagaataattgtcttgggccacacatataatacactagcaccaaaaatagctgatgaactaaaaaaaaaaaaaaaatctcataagagagtttacaaatttgtgttgggccacattcaaagctatcctgggctgcatacggtgccgtgggttgaacaagcttggtttaaggtatcataggtaaattataaaatgaagatcgacacagaataactaaagtcttatgccatatccaaagttgagttaatttcactaacggagaaaatcctaattgatttcatcccctttttaatctcaagcatatatcctttgagctgaccggaattctttttataaaaaggtaagaactaatagtatgctccctcctaaaataacagcgattagcataaagctgaattaggttcaggtttctctgtctaaaggagagttagggtcaagtttgtatttgtactcttaaaaaccaagggtaaactttactgctatttaaaactatctactaagattatctttaagggtataaatattaattaattaagaatatattaggaacactgctattttaagttctaagtacatggatattttgtctaagtgatagaaattcaaaattttaataaacttaaaatatataaaataaattatatatagggtccaaaatactgtcaaaaccttgactttagaaaatacaggagtcagagtttatatttagctgcattgtgaaaatgcaatccagaaaaatggttttaagagagagtgaaagagttgagctcacactgaacacttaacttgagctagctattgtcatggttagtgctcaaaccttcagtcccttcacttaacaggcatttagttggtgtttattaaatacagaagaaaaaatatagttggatatgatgcttccttttcctaccttgataagaatatctttgggtatttatgatccttaattccctgttcaaatacaaatttagctacactccaaatatctgctatgtggtaccctttcattgttgtttgttcccttatttccatttagatcttaacattgactcagtgatttgaatgtccacgtgtaacagatttttagagttatatttttgctattgatagttaaatttcttaatgtcctaaaacacgaccagttgttgatatcctccagttgccgagtgactctctcctgatgtcgtgggctcactggtggtacgaatcggacgcgtccttcctaagcttgtactgcaggagccctcaactccacagagagctgtgttactctctctcccaccatggtgttaaatttatccacatattttgttaattctgacaatgtttccttagtacattttgaatccgtgttactaagatcataccattttaaactgctttatcttcctgcgttactaaacctttctaatcctcaaaacctcaaaagtctccttttcctgggatgctgaacatatttttcctcaaaacctcgcatgtctccttttttagtaatgtttccaccctctcctgaaaatctattttatgtgcaattaaaatggtatcaacagcattcttgagttaatacttgcctggattattactttccattcttttactttcgatgtttttctgctcacatgttttaggtatgtcttttgtaacctgcataaagccagattctgttcctttaacccagtctaagagtcattgtctttcacatttcagttagtgcatttccatttcttttcatttctgttacatgaggttttacttgtgccatttttgtgtgcactacttaagttgtcccattttcctatatttcaccccctctctttttttttcatctctcaatttggcattttgtatttcagttctatcccttgaatggttatactagacaatgtaggttcacctctaactttgagggtttaatgttgacaatgactagactgaccaagtgactggtccaggaattgcttcccaggaggtcccaagcctgaggttccaataagggcggggaagataatgaccttggcacagggaccatgacctttgaggacatgactggctgtctctcctggagaaggggcttcctaccaggcccagaggagcgtggtccatgcggagcactgaagacctttgaactcgagccctcgctgggacttgaggccactcccacctccccccaatcaccgtggccacacagctggagttgatgagaagccagggtactgaacagcaaggactcgaatccagccaagacagggaggcccagctctgaacctataaacacatggtgttcggaaaggcctggagaagcagcagccattatttactgccagaaaattcacgaggcaagtcccatatgtgttaggagtgtgaggaaccacacacgtcctacaagtgctgcaatgacaagaaagcatccaaaattccccccatttggcaccaggatctcctatgcaaagaaaggtcttttcagtgcagggaagatgaggaaacctggagccaaagctgtcgcctccttcagaattccaaagtccacactgcagaagggatttgttggggaagccaggctgagaaagttcccactcactcagcacggagaattcacacccaggagaggccgtctatgcgagattcttcagccacgctcaggccttaagcatcccgaatgctcacactggagagatgcccggtgagtgtaatgtgtgaagaagcttcatttgtcacccggaacttcacaggctaacgggcctcatgagcaaagccagcgtgggggactttccgccgcaggtacaccctcgggagtgcacatcagagatggtcttagggctgctgtgcacgcgcctccgcatcctcgttcaggaacaatgtgttcctgcctgagaggcgagcaggagcgtggcctttgtgagaaaggcttcggtcatgatgcaaccccatgtccagagcacccatgccaagggccacagagttgtgaggccttcgggggcgatgatggactttctgaccttccctggaacccagggtgagttgtcacccccagggctgatgggaagaagccttccttcctctccatcctggtggggcagctgccgcccccacatgatcaaagaacgcagcctctagtgtcacccacactaccctggagcaaatccagactgtcctgtgcacagaactggcctaatctggacaaggggacccaaggggtgtcagctggaagcttctgggcaaggcttccttgtcccatggattttaaagtctctatgtgacagctgtgatggcttcaaacagcctatgagtccccttatttgtggactgtggtatccaaagtgggcagaagttgccctagaacaaatcccccaaagataccaggaatgactgtgttattagatgagatcgggcacgttcagggtggtatggccgtagacaggaatgactgtattatcaaactctatcctccatgttttttaagttctcttttattttttaaatctattatgttctggctgcatttaggataatttttttcaggtcaaatttcagatctaagttctattttctctttttacctatgtcttatctgctgttcagcccatttagtaaactttgtgtcaattattataatttatatataattctagaatttcaggtgtgtgtgtgcttgtttaatttgactggatatttccaatcgttttgttttgtttttttaatcttttattttttaaacatattaagcatccttatactctatccttgatgatttcaatttctatgttctttactgttttgaattctgctcactcttattcaccatggcttgtttccacatatatgttgtgatttttctgattgttaatttatgttccttgaaacactgagaaaattatttcaggactcctttgaaagtacagggctcctagaggatttgggctactctcagcccagtacccaggactacaactcatgactgactacattaaacaacattctagacccaggactttctgtgccgcacaggaagagtgaatattggccccaaactcaggtttgagttatagatataactctaacattatacacataatgttgtatatatgtataccatatacatacatagaatgttgaccctaaaaacttgtaagcataaacccatcggtttgtacttacaagtttataggggcaagattctatgtatgtatatatgtataacacatatgtatatatggaaacatagatgtatatataattatattattagatgcaattatatctacatattatgtatgctataatatatacatattacatttgtatacatgtaaacgtatgtaattacacttaagaattctgccctatgaaatacgcactctaatttcatcctggtaggaaactggcaagactgtgtgatacctcaaaaatctgtgagtgacatacaagtcattatctttcttcaggatttggatgaataaaaatctgttcgtagtccctagccctaggctggtggagagtgactgtttattgttgcccactgccatcctggtatccttccgatcagccagcagattggcaagagaaagctcctctcatgattctcgctcaaacgctgtacctgttgctgttgacagactctgttcctgagagaaggtattaactgccagctggctctgacagtttgggaactaaggctgacatttgtgctggcagcataacagtatttacaactcaggaaatgtatacagttagattacgacggagccagcgagttttgaggttaaaaaaatacaacaatatacatgtgaagcatgaccataataacaaaattaacttaaaaataaattcagagcttaggggttctttcaggaaatatctgcggtctatgaaacatatggcatatatgtgcaaagagagaaaggattacaaagaacagaggatggtaattcaattacatcgccggccacccatactatattttgtaatagtccactatgtcagaaaattactaaagaaaggtagaagtagataaagcagaaaaaaaaatcaattttgaatgatggggaatataaatataaaatatcactggagcaggagagaaggtgaatctcatgcttctgtaatttttcttttggaggctctgcactggctctccttttctcacctctccttttccttctatggatataactttgcaatgagtttaaattggcacatttccacacggtccccccaaatgattaagtcactaggaaagtgaccctgaaaggcaggggcacaggttggaattttggtgaatgtaattaacctatttaaatatcataacacttttggcaaacattattagatggaagaacagtcagttgacattttgtctctaatttcctggcaaacagtgaagatgtcatcattttcttgcaataagaggaatgaatgtgaccaggtacttactgcactagtcccagggcagtgtggggattggcattcaccactcatccggtttggaattaaaacatcatcccagcaagatggaccctttgggaaaaaacaacaatatatgcttatatgagttataatagaaatgtactccttaagacatgtttccacttatgttataaaataatagtgaaattagtgtgtagtccaatgattttcaaagtgtggtctgcagactctgggggtccccgtgaccctttcaagggatgtgctaggtcaaaactatgttcatcaacatacaaagacgatatttgacattttgctccaaacctgttcgttttccacttatagcctccccctacggctgaggttaaatgcaccttactagaaaggccatccctgactttgctccacttctgtgtctgccctttcaggcttcctttgcttcataataattattactaccatccccacccaaccccaccatgcagtggcccagcacagagcaagggctgtctgtccctagtcaccacagctacacaaaagccaacttggtctgctctgttccctgaggcatcccagcacctagaggagggcctggcatcgagggggtgcgcagcaagcttccctaggcatcaaagaaataaaaattcaataaaagcaacacttcttttaaattagagaagatcatttaaaatgaaatatcagtgtcaattattgcattcctcttggaaagcaaaccagtaaaaagcatcacaagcattcaactggttcataactttttgactaaattttaagaaatcgggctgtgcacggtggctcattcctataatcccagcactttgggaggttgaagggggcggatcacctgaggtcaggagttcaagaccagtctgactaacatggcgaaaccctgtctgtactaaaaatacaaaaattagctgggtgtggtggcacgcgcctgtaatcacaactactcaggaggccaaggtaggagaatcgcttgaatgcaggaggcagaggtggcagtgagccgagattgtgccactgcactccagtctgggtgacatagcaagactccatctcaaaaaacaaacaaataaagaaacaaaaaatcaaaagcaaaaggcagataggggagagggcacaggggatcaggagcagcaaatttccagatcctcaaatcttctaaacagaaagttcagaccatctacttggaaacaaaaatcaaaatagaatgtttaacttgcagcaataccttcaatttcaacctaaaattctgtgcctgacctaattatcaattaaatgggagaatgggaaaaagtggcttggggagatgcaagttggaaagttggcttgtatgtctgtgagggctcagggttcaggaaatgatcagatgcctgaggaaagccccaggtggcagcctggacctcctcaccgtgggtggagcagtgaggtggccacgggaggggcggagtaagaggtgggttgtctccccagctgtgacacagaaaggaggaggagggagggtggcatcaagggctggaggggattgacagagcttccaggagacgtggtatgaggccactgcccagtgcaaggcagaaggttaggactcaggggcagaggctgtggtgattttactaccgacgacgtttggacccagctagtgtttaagttgtaggagctaaatcggtcatcacaaggcccatctctgcttcaggaaccagtgtagagccgccctggcactttgtagcagatgctgaggaaaatgccgtgggaggtgggcaggggttcacagccacccctgccagtctgcaggagtgctccctccctccctcctttaccattacatgtgtgcacacacacatgcatgccacacactcacatatacatgcacataccacacacactcaggcatgcacgcacacaggcatgcacgcacacagcatgccacacaccacacatgcataaacacaccacatacatacacgtgcacacacatcccacacacctcacacaccccacacacatatacccacatgcatgcacgcacaccaagacacaccacacacgcacgcacaccaaaacacaccacacatgcataaacacaccacatatgtacatgtgcacatgtatccctcacaccccacacgcctaacacaccccacacacatacatccaaacacatacatgcacaccaagacacaccacacatgcataaacacaccacgcacacacgcacacacacacaataccacacagcacacaggcatacacatactacatacactcacacactcatgcatgcacacacgcactattctagagaaaagtcggggacgcagagcagttctccaggcctgagccgtacctgaaagagactgagccttttgacggaggctctttaccccagacttcaaaaggagctgcatctgggatccaccgatcattaatccaaaggccaccgcttaatatggaggtaaatttgcagaagagttctagcaggactgaagctgcgatggtttgaaaagcctgctttcaagcttggcccttggctggcatctgggaatgtgaattttggaagcgtccacatcattcccttactgctacgggtggtgtgcagagcctgaactgtctgcacaaaccatggctatgcacaacatcttctcaccctcggcaaggctggaattttgataagccccaggcagaggtgtctgcatgaccagttcccactaaaatcgctgggcactgactctccattgagcttcctggcagacaacacttcacacgcgttgtcacaactgagtgcctctcgagtgaccactgggggaggactcagagccttgcctgcggtttcctctaaactcctccccctgggccttttcccctcgcttcatatccttttgttgtagtgaatcttagctatgtgtgtgacaggacagcaagtcctgcaggctctcctggtgaatcactgaatctggaggggggaggtggtcttgggggcccaggacatgacgacataggattggtgatcaaggcaatgttctcccaggcacataggagggtcggggctcatcattaatatcacaccagtcacaaagaacaagccgtttcattttctttgcacatcccactgtgttcacgataatggaagcacttatgtgattttcaactttagagtaacactgttaaaactgaacagaggatgttaattatgattatgtaaccaaatatatatgttattcagcttggacaatataaaagcaaaaacagaaatgtgaggacttggaaggcagaagtgaggctggagagaaaacagaaaagtgctgatgaattccctgacctgccaagctgtttttattagaaggttgtctgcacctttgatttttaaacatgagcatatattcactcgataaaagttacaaatgtatagaaataaaagagaggaaaagaaatgatacctacgaccttgatcacgttcatcagcctcatttttctggcttaaagtgagaaattcagtggagataaatgtggctagaatgcagtctgctacaatgaatacactttttaacgtgaggacctttcttactcctatacaaaaactttgaactatagttgctttagccatgcaacttctggaacactgtgtacgacgattaggcaatttaggttttatattttctaaaatatgacaggagcaaagttaaacgtgctttgtaatggcatagattcactgggacatttgtttctattttctggatagtcataacattcatactaatagtgtgagtagtgtggataaattagcatgtctattttattatattgaattcccatattcaacagaggattttaattatgattattaaatatatatgtaatgtacaaattacatggcaaattgcaaatcctttgaggggaacccagagggcacatcttgcccctttgtttgttttaatgtctgtttctctgtaggttgtgatttgttctacctttacggacactacaaatcagatttctctcttttttagacaattaggaaaactttagagtcaaatttgtggaccagctcttgcaattttacataaatcataatacacacttcgtttaccaaaattacccttggcttcatattactttcctttgatccctttcctcatctaatttaatttttcctggttttcatctgcatgtatccctgcaaggttgtcacatcattctgaaacgagtcaggggataattaggtaattgtcgggccttgtgatgtaacctgactgacagctctaacaggagccgtgctccctgggatggtaggtcatctcgcctccagggacaaggtgatctctggccagatgcctgtgccaagctctggctctcatactgtggctggtggcaattcccagtgaaccacactgtgcttgaggcaccgaaaagtccctgcgtttaaaagaaatccatttcgctgtggttaaccattaactaaatgggacaacattgcttctcttctctggaagttttttctgactgactcatgacacatgcaatggtcaataacacacctacgtggcaacagccaagaaggagcactaataggccgggcatggtggctcatgcctggaatcccagcactttgggtggctgaggaggatggatcacctaaggtcaggagttcaagaccaccctggccaacatggtgaaaccttgtctttaataaaacacaaaaattagctgggcatggtggcgggtgcctgtaatctcagctacttgggaggctgagggaggagaatcgcttgagccagggaggcagagattgcagtgggccgagatcacaccactgcactccagcctgggcgacagagtgagactctgcctcaacaagaaaaaaaaaaaaaaaaaaaagaagtagcaccaataattaaatgcaggaattagggcccagttatattttgcttcacagagtaagacttcttacctcaaagtctagaattcagtgagacttttctgtgcatatcacagatgtttattttttcatatttaaatttttactgccctaatagcaactaaaatatttatggaacaattcccgtaattgccacatcaggtactatgttatctgacaaattcgtgttctacagagacattatagaaaactcattcacacattcttcttgatttcaaaccataacacaatggtgtaagtagtaaaactgaatggaattcttttgaatctgggactttaacacagtaaaatagatgttagtttatgcagctgctcacactaatagtgtgaatgctatggctatcctgaaagcagaaacaactgtccaagtgaatttatacccttacaaagcagatttaactgtgctcctgtcaaattttggaaaacataaaactttaattgcctaatcattgaacacagtgttttaagagttgcatggccaaaacaattatagttaatagtttttaaatagtagcaagaaaggtcttcagattaaaaaggactgcaaaaatgcatggcagtagaagggagctatggatgataatacgtcaattagagaagcaaaaccactatttcatccctcaaatctaccgaattagagaaagatatctgaataaaatgtcacatagtctaataggaaaaatttggctggtttttagagaacgttctctttttttttgcctagtaatgacgataaccaagaaaaatatataaattattttagcaacactagcagggtgaggaaaccatgggctgctggccaaatcccaccttatacagactctgtgctaagaaatgttttcatgtttgttaatagttgaaaagcacaaaaagaagaatgtttcgtgacacatgaaaactatgagaaatttaaaattcattgtccataaagttttattggcatatagccacataaagcatggttgcttgtatgctacaatgagctgttgcaacacagacctcatgaaccacacagcctatcacgtttactgtcgggccctttatagaaaaaacttgccaacccctgatctacagcaaattaaattttccaaactcatactgaaaagtactcttttatttttaatattgtggcagcactttggctaacatataatcgcatatgtttgtatgagtaggtatgtcctgggtctcaagtgagaaattacaatgaaaaccttagtgctgttgacctgagaattccgagaagacggtgatagagaagcagcaattgaatcctgggattcatcaaattgtttgcatcagtaagtggaaaatgacaactagagatggcatttgaggactggtcctgactaatgttactgtctatagaaaagcgtgaagcaaatattacctaaacacgtctatatgatgcatgtaaatcagaaatacagaaaaatgaccccacagagggaaagcattgataaaatctgtaacatgtgggttttaaaatttattttcaaaagttctagaactcataatctgaaagccattttggctatgtctttcaatgcccagaaaagtggaaaattgaagtatgtaactgactatttcatatccaaatattattcagacacagtccagactgacaaaacaaaataactatttttcttgagttatctaaataaatgctataatctgctcatcatatgtgagtatatgcattgatgcttaaaataaattgctaattctattttccaaaatgttaatagaaaaccatggcatttacagtttttgaaaaatgttatttaatagtaattttacttaaactatacttaccctattatctcatcttgtcatcgaatatgaaggatttcaaatattctcttgaataatccacaaacatttaagccacataattaagtgtcagggactaaaataattttgtaaatcatactaaggacataatacaacaacagcaaaactatcttgaaaaagctgtacccagaagcttgagtcctcccttgatgtttttctatctgtgtctgcaacaaaatgatacaaagaaggagctttgaagttcacaaacctgttgtatttcatttctaccaatgactagctatatgttcccgagctagttgcatggacccattccaaacttagtactcttcatctgaaaagtaaggaattaaatacctacttcacagagtgtgcatgaagattaaatgaaacaacacaaatacaaacaacactgtgcaaaggcaacacaacaaacgcctttacacagttgctggcacatagagagttaaaaaaatggcaactgttacaagtattatttcttatttctcaaaatagaactgcctgaagagggttatttttggtttagtaaaaactgagcagtaagaagccctttccaagggacctggacccacggcccagtgggtttctgaatttatcctttttctcaatttccctattatccagccctccccaggatcatgtcactttctacagcatgctgtttataactcttctaaagcatgtatcgccctctgtcatatagtagacactgacactgttctgagcatccatcttccttcatttgatttaaagatcctacactgtcacaaagccaagcacagtgccgtggttagagcagcagcataataaatgcaatcattaaatagtaaccaggaaaaagaacgaaaaaaattcgttaaaccaaaatattcatccacttaccaagtatttattgttgctcttaaaccctgagactgcagttataaaaaagggagaataatcgcttttcttgtagactttctatagtagctacaaaaaaatggtattacaaatgaaccaatcacatccattaaaatgagtaagatttttgaaaatgcccatgtaaaagacaggcaagttggaagacaactggaatatacacactgttggtgcaaatggaaaatagtatagtcactgctgaaatctactaggcattctttttttaaagtaaacataaaagtaacatatgactcagttattctactcttaggtagtcatgtgagataaatgaaaatatatccacacagaatgttgcaggcaagtgctcctaacaattttattcatagcaaatgtaaactggagggcacccacatatctatgaaatatttcatctgactggatagacaagatgtagtatgactattcagtggatgaccactcaagaataagcagtgtcctgttacctataaatgcaacaacattaacaattctcaaaatcagcctgagtgaaagaagccaaacatggaatatgtggcatgattccatgtatatgaaatgcagaggtcgcttggggctgggagcacagagtgggaacaagccacataaacacataagggttattttgggggttatgggctgaactgcatcccctcaaaatttatgtttaagtactaacccccagttcctcagaatgtgaatgcatttggagataggtcttgacagaggaaattaagttaaaatgaggtcattagggtgagtcccaatccaatatgactgatgtccttaaaagcagacgaaaggccatgtgaaaatatggggagaaggtggccatctgcaagccaaggacaggggccttggaaaacaccaagcctgctgacacacgttgatctcgacttctagctgccagaaatgtgagaaaatacatttctattgtttacgctttccagtctggggtattttgtcatggcagtcctagcagacaaatatagagggtatggaaatgttctttatcatgactgtgctggtggctttacgttgttatgtacttgtcagaactcctcaaattgtacccttcaaatagagaaagtctatttacacaaattattctcaataaagtgggtaaggaaaacaatgaactgagcaattgacaaggaaactcaataagagacagaggctctctgtagcaaatgttgcttgaaaaactgaatataaatatctcactcaatacagaaagcaaatgggaacttctttataaccttggaacaggtagaacttccttcttgtaaggacacagaaggctctaatcccacataaaggaatgtataaattgaatttcaatgaacattagagctcatcaaaaacactaaaatatgactatgcaagccacagacttgggaaaatattagtaatacatataattgtaaaataagtaatctcagagcttataaagagctaatataaaggacacattaataatacagacataaacacaccagttaaatataagcaaaaaccttgaacaggctattcacaaaacaagacgtataagtggccaataattatataaaacgatggtcaacatcattaataacagggaaaatacaagttaaaatcacaagatacaatttcacttgatttcacattttagccactatgataatactaaatgtcggtgaggataaagattaacaaacgctctcatatatcattggtggaaatataaaacaaccactttgaaaacggttttggaatttctttctttttttttttgatacagagtttcactcggtcgctcaggctggagtgcagtggtgcgatctccgctcactgcaaactctgcctcccaggttcaagtgatactcctgcttcagccttccaagtagctaggattacaggcatttgccaccacacccggctaatttttgaatttttagtagagacagagtctcaccatgttggccaggctggtctgcaactcctgacctcaaaagatccgcctgccttggcctcccgtagttccgggattacaggcaagagccgcagcgcgcagccctggaatttcttattacgttaaacatatagttaaactatgactcagcactttcactccaaggtgttggtccaagaaaaatgaaaatacacacacacacacagagcaacatagactcgtacaagcatctaacatcacagccttactcatgttaacccaaacctggaaacaagcaaatgtcctttgacagtgactagaataaaccatggggtctcacatagtggcagactcagaaatgaaaagagagctactgagtcacacaaccacatggatgagtctcgaaacaaaacaccatatttaccaaaaggagctggccatagaaaagtatgtattatatgattccatttatatgaaatccagcaaaaagaaagattaatctatggtgataaaaatcagaagaggttatctttggaatggggaggtactgactagaaaaagagataagggaactttctggaaatgttctacattttggttggggtagtagttacatgagtgtatgtaactgtcgaagcttttagaattgacacagtgcattttgtagagtgtaaattgttctataatttaaaataatagactgaatctcctatcccatccttcagtgatttcctcttagcttttggaaacaatagtctgtgatttctgttataagataatccaagtcactgccaatcaacacaaaagactaaccagtcctagggctttgaactggttactaaccttcatcatcaggctacaaaactcttaaagtcaaggactgtgtcctacatatatctatgtgctttgctgtgaatagataaatgttttacctaaacatagtgaatacacaagaataattaagtcagactttaattttctcatctgtaaaataatgaaaactgaaaaatctgtattttcaaagttacattttcttttaagcagggtactttcattacatgaaattgtctatagtaaccaaatacataaaacaaataaagctgacccaatgtggttgaagaagaaggacgagtccccagaattctcattaatggcctcttttctctttgtcccatgtgatgcccttaagggccctccccacagaaaacaatttgaaatcctaaaagtctcttacaataatacaccatgggtatgctcagagaaaagtccacagtggtaaagaatctggcagaatatggttgaatcaaattgtattagggttcttcagaggggcagaactaataggatctatgtgtatatgaaagggagtttattagggagaattggctcacatgatcacaagatgaagtccaaggataggccgtgtgcaggctgaggaagaaagaagccagtagtggcacagtccgagtccaaaagcctcaaaagtagggaagccaacagtgcaggcttcagtctgtggctgaagacctgagagcccctggcaaaccactggtgtaaatctaagagtccaaaggctgaagaacctggagtctgatgtccaagggcaggaggaatgaaaacatccagcatgaaagaaagatggaagccagaagactcagcaagccagtttatcccaatttctttggtttgctttgttctagccatgggggcagcagactggatggtgcctacccacattgaggatgggtcttcttcacccagtccactgactcgaatttcaatatcctctggcaacaccctcacagacatgccttgaaacaattcttttctttttcttttttttttttggtcaatttttaaaaaaattatatgttaagttctagggtacacgtgcacaacgtgcaggtttgttacatatgcatacaggtgacatgttggtttgcttcccccatcaactcgtcatttacatcaggtatttctcctaatgccatccctcccccagccctccaccccatggcaggccccagtatgtgatgttccctgccctgtgtccaagtcatctcattgttcaattcccacctatgagtgagaacacgcggtgtttgattttctgtccttgtgatattttgctgagaatgatggtttccagcttcgtccatgtctctgcaaaggacatgaacacatccttttttatgactgcatagaattccatggtgtatatgtgccacattttcttattccagtctatcattgatggacatttgggttggttccaagtctttgctattgtgaatagtgctgtaataaacatacgtgtgcatgtgtcttgatagtagcatgatttataatcctttgggtatatacccagtaatgggattgctgggtcaaatggtgtttctagttctagatccttgaggaatcgccacactgtcttccacaatggttgaactaatttacactcccactaacactgtaaaagtgttcctatttctccacatcctctccagcatctgttgtgcctggaaacaattctttaccagctatctaggcatccttcaatcgaatcaagtcaacacctaatactaaccatcacacaaatccttaaaaggccatcctttattttctctctctctcttttaaggaaacacatattagctgtggctaacatatatgttcattagaacacatatattatgctctttgctatggtctagatatgtcccctaaaattcatgtgttggaaactgagttcctaatgcaacagtgttaggaggggggcctaatggaaagcgtttaagtcacaagggctccacctgcatgaatggatcaatacccctaagaaaggagcttgcaggagtgggttctctttctactgctcttcgaccatgtgaggacacactgttcctccctactggagcacatagaattcaaggtgctatcttagaagcaaagagaccaggccttgacctgctggggccttgatccagaattgtgagaaatagatttctgttctttttaagttactcagacccaggaattctaatatagcagcacaaaaagaactaagacattcttaaaatacttaattgaatcactgatacagatcacatgacattatccaggtgaaacagacatttgtctttatgttgtggcagaagctttcagttgtctcctctcttcttttatggtaacagaatttctgatttatagctgagcatatgactccctggaaaaatgactctacctcccagcttcccttgcctgactggccatgtaagtgatgaccaacgggatataacagaggtgtcctgtggaaacttctacttgtccttttcttcatccatttttttttctctcctgtttgtaatatacatagtgcatcttgaaccacaagttcaaggttatacaacgtagagcaacaatatagaaagagtctgggttcctgtcatcatgaagtgccacagcagccttgaaccacctatctaaacttttacatgagagaaaaactgaactctcacattacataagtcactgttactttgaatttttaagatattcactgtcaaatccaatggtcattattattacaattaaattaactttgttttgatagaaaaatcaatggagcacacaaaacagtagcaatattctatgatctaagaaaccaacaagaattttcttttacatacatgaggatgttgacataggaagataaataagtcttttggaagacaaaagtaaaatattacttataatacatcagggaataagaccttatttatgagttcatgagtttttacaattacagaagttgaccataaaacccaaacttttaaaaaagcattgatcattttgatgaaaatctttaccaaatgtgttctatagtccatccttatttcagcagattacacgcgacatgcacatgatgacttagctttctaaaaagagcaatggtgtaacgaatatatgccacttgccagaagccatagttaataccatatgtacacctcatccctagtgacctataaacaaaacaaggtgggcagtgccacagccttttttacagatggagagactgaggcttggagatgctgagatatgtccaaggctacaagtttacaaagtaacaaagtccatttatcataaaagtatttgttgttttgttcacttttcagacacagttttaaaaaatacatgtcaaataaataagcattttttatttactgttttaccatgaactacagtgaaatccttgctaactgtatctctttccttcagaggccgatgtcggacagatgtcaccgtcatgtcaggatggtggacattttcctatctggtgggtaggaaatcagtaactacatttactaattatgaaaacaccaccaagttaagattttgttacaagaaatgtgtacggacatacatttttagaatatatgtcaatatctttatactcctttggcctctttgctgataacctgcttttcatttagttatttcctgagttttgtaggtgtttttcttttaaagtctttattatcgacaggtttttccaggtacattacttcatttatctcagaaatcatatgagacattatacttggcatttcttttctattgctgtgtaacaaataaccacaattttgttgcttaaaacaacatgcttttatgatctcacagtttctgtggggcaggcctggtgtgacttctgctcagagtcccatgaggcccagtcaagatgtcggctgggctgctctcttccctggagactccattacagcaaaactagcttctaagctctctcaggctgttggcagaattaacttccttgcagctgtcattacaagggcctcggctttctgctgcctgttggctggaggcctcctgccgttccttgccatgtgagcttcctcaccttggcagttcacttcatcaagtcaacaaggagagggtctgctccagtctccactgaatccatcataagtaatatcgtcaggggaagtcttagataacataattggcacggtcagggaaatcaaatcacttttgctgtattttcttggttagagaaagcaatttcacatgagcatgtacaggaggtggtgggaggtcactgggccgggggggtgggggtcatcttcatgtctgtccatgccccgtttaacaaattaggagaaggagctttcataaaattaaagtttcagaaatggtaactcaatatataacattagttgtcaagtactcaggctatttttcaaaaatataaacacatgtttcagtttaggtacgtgaatatttgaacacttccttggagtcctccttttaaaatttcaaataagtcattttatagcttgggagatgatatggtttggctgtgtccccacccaaatctcaacttgaattgtatctcccagaattcccacgtgttgtgggaggcacctagaaggaggtaatagaatcatgggggctggtctctctcgtgctattctcatgatagtgaataagtctcatgaaatctgatgggtgtatcaggggtttccacttttgcttcttcctcattttctcttgccaccaccatgtaagaagtgcctttcacctcacgccatgattctgaggcctccccagtcatgtggaactgtaagtccaattaaacctctttttgttcccagactcaggtatgtctttatcagcagtgtgaaaattgactaatacaggagatattaagaaataaataccagatgtaaccagaaactgagtttctgtttattctggcatgttaaactttacaagattagaatatgttacacaaacagaaacatgtcttgctttaatgagtgtatatattcctttctaacttgaatttattccctatgatttcttagagcaagaacgtattatagaagcagttaactaaaaggctcactacggttaattctgcagaaagaaatagaagtttacagaagttaattctgcagaaagaaatagaaaggattaattgttcctaagtaagccaagttatctctacaaattgtttaaaacaaatattagaaggaaaacaataattaagagaagatcttaagaagacacctaatctagttcttattaatatttttcatttctgattttgatattatatgaataatgaaaaatccctcatttgaaaaaactttatatggtatacaggacgcaagagaggcaaaaatgatttttgtaaattccagccagtctccaagagactatgatcataataaaagcaatggcaatggcatcaccttgcattagtataaaacaggtttgtctacaaatcgctttcacatgtcccaagccaaccttgatttccagtgaaaatctgttaatgctgtgttctatagagctctgagccacacatggattacttggtcatgtgttgataatttgttcatgtgtaactgcagaactgtttcccaacaaaaccctggccccaagcccaagtattcactgggttctcacatgtaactacttgggtatatcttgatgattacatcatgcattttcataagagtatccattttatctaacgatttgttaatcatcaaaacaaggatcttccctcattttgtaatagaacaactgaagtccatgcttttcttggaaaatatagtcatattttagtaaaagtgtgatcacaaggctgggcagagttagctgggtaagtttgactctgctctatgtggggtcagctcggatggttcagtgggactgaatggtttcttttcaacgtggctcttttgcatggccgagtggatgctgaatataagctgaggtcagtgggctggtgttcttagttcttcttaacaagggggtgccctagagcagtggcccccaatctttttagttgtctgtcattgtcaacatgcacaggtttgacggaagacagtttttccagggacccagtgggatggtttcaggataaaactgttccacctcacatcatcaagcattagattctcataaggagcgtgcaacctagatcccccacatgcacagttcacaatagagttcttgctcctaggagaatctcatgctgccactgatttgacaggaggtggagctcgggctgtaatgctcgctcgcctactgcttatctcctgctgagtggcctggttcctaacaggccacccctgctggcccagggcttgggcaccgctgccctagggcacagtaggtgctttctaaaggtgactaccctaagagagaggaagtagaaacttccagtttcttaaggcctgagcctggaaatgggcagagtgtcatttctaacatgttctattagtgaagcagtcacagagctcagatgtgctaaaagaggttggtatttaaagaaaataattctaacagcacatcgtgtcacgttttcatctggcatttcactggacggtattcgacatttgcagtttaatattttgtgcccttgagcactgccacccttaggaaggtgtttggtgctgtccatgccctcatctgtgaaatgggggcagagacagcaccaaacaccttcctagtagatcagctcttcttagcctcatctcttgtcactctattcccagcattttccccactttctgacaatgtggcccattttgattttcctttattgttattcaaagtaccttagtaatatatgctttattaaaggcctttagataatttaaatatcatgaaacagtaatgtatctcatggaatatagtttacagacacctaaacaatacaacagcactaattcttctggttctccaaaagttccaataggatccctcttaaatttccatcaggtcatgggcatgggcagacagtatctgtgaacttatcagtggattccaattattttactgaatttaattttttttttttttttgagatggagtctcgagctgtagcccaggctggagtgcagtactgcgatcctggcaaactgcaacctctgcctgccgggttcaagtgattcttgtgccacagcctccgagtagctgggattacaggcacatggcaccacacccactaatttttgtattttttcagtagagatggggttttaccatgttggccagcctggtctcgaactcctgacttcaagtgatccacctatgtcggcctcccaaagtactaggattacaggcttgagccaccgcacccaacctattttacttaattactctagtttctcaaagacactcttcatttctcctagtgtttggaatcactaccaaacactatcataaagttctgaaaaagcattcattgttgctaattttaagtcattgattttttaattcctttaacaaataatgagcatctaaaaagtgacacacattttgccagattgtggggatggaatactgaaagagacttttgcacgtcaggaggataaaagtgattacacaggctgggcgcggtggctcacgcctgtaatcccagttgcttgggaggctgaggtaggggaatcacctgaaccagggaggcagaggttgcagtgacccaagatcacgccactgcactccagcccgggtgacagagcgagactccgtccaaaaaaaaatattaaacaggcaattaatactgagactctttgagggtatattggagggatgagagacctcgacttctgagagagctgggttttaagctgagagcagaggaatgagtagcagcagtaggttttgcgggaagaagtagtattctgagcatggagaacagaagaaaattccacaagccctgagcctgattcttggaatatcgatcccaaacaagatgatttctcagatactgacaattaatccataaataatccatttttattcgtgcaatttcctaaatatctccatccataccactagtcttgataacacaattcaattgtaatatacatgtaactgtaatgtacacaagttcctgatttcaaagcaatgaggatgtcaagatgataaacagtggttttgtgctttggtatcagaatgactgggtttcgaatctaatggccactaccagccaagtcaggatgggggtgtttctgaacatcaattttatgatatgtaatgtggaaataacaattgcacgtaacaaacaggactgatagttaaatgagataaagtagttagcaaaataccacacgcatagtgaatattcgataaacgttagtgggtactgctgaataaccacagtagaacaatatcatcatggaaagaactcagtagagaaagactcagaagatctaagttcaggatgcaatttcacttgagtatcacctcatcgatttaacatcctcatgcttcactatcttatctgtaaagtgtgggtacaggccaaaagagctcagggtcaaataagataacaaatgagctaattaatgtgaaaaccattgaagctacagcaaacaggtcacacagatagtagtaaatgaatgaatggagcaaggggtagtcttgaaaccgtctgataggagagagaattgtactcacgcttactcactttataacaaccccaaacctgggaccactttcaagtaaaagtgaacttaaaacacaatgctgcagctgctgttggcctcagcgttaaccagagcaagtgtctattcctgtatttattactcagtactgccaagttaactcaatggctgcctaaacagaacatctcagctggtcttgaaaattttcccaagtactacctctatagctttgggtttttttgttgttgttttttgtgtgtctgttttctgagacagggtctcgctctgtcacccaggcttgagtgcagtggcacgatatggctcactgcagccaaaacctcctgggctcaagcgatcctcccacctcagccccctaagtagctgggactccagacgtgcatcaccacacccggttaatttttatactttttgtagagacaaggtttcgccatgttggccagactggtgtggaactcccgggctcaagcaacctgcctgccttggcctcccaaagtgctgggattacaggcttgatgccctgccctcagccctctacagcttttaaaacataatttggcagataattcacttccaatacaaaaacgtgtttggtatcataaaaagcaagcatttcataatctaatactcaataccataatttacccactctgagaaaattatcacaagaaaaaagtcacatggagaaatgcaaatcaaaatcacaatgagataccatctcacaccagttagaatggcaatcattaaaaagtcaggaaacaacaggtgctggagaggatgtggagaaataggaacacttttacactgttggtgggattgtaaactagttcaaccattgtggaagtcagtgtggcgattcctcaaggatctagaactggaaataccatttgacccagccatcccattactgggtatatacccaaaggactataaatcatgctgctataaagacacatgcacacgtatgtttattgccgcattattcacaatagcaaagacttggaaccaacccaaatgtccaacaatgatagactggatgaagaaaatgtggcacatatacaccatggaatactatgcagccataaaaatgatgagttcatgtcctttgtagggacatggatgaaattggaaatcatcattctcagtaaactatcgcaagaacaaaaaaccaaacaccacatattctcactcataggtgggaattgaacaatgagatcacatggacacaggaaggggaatatcacactctggggactgttgtgtggtggggggagggggagggatagcattgggagatatacctaatgctagatgacgagttagtgggtgcagcacaccagcatggcacatgtatacgtatgtaactaacctgcacaatgtgcacatgtaccctaaaacttaaagtatatatataaaaaaaagtcacatttcttaagaataattctcattagtgtaagtgaagtgactcgtcctccacgaaaatgcagctccgctgggttttgacacagtcaatcaccatcattacttaccgagtccctccatgcagggtgtacctatgttaaaccaatgaaatgccaacaacgcgtttcccccttcacaacttccagtcaccaaactattcctgaaccacaagatgccttcagttatattactatgtgttgacagctttgctgtaggtacatcacagggatagcagaattgaaacagcagtgattttttttgttgttccgtttcatagaatttaaacaatggagacaataaagccttacagatctggtgattcacatgaacgcactcttaacggatttaatttaggagaaccatatgattatcttcgtctgttcaagcttcctttactaaaaatagtctggctgttgcatggaggaaagtttgctgtagctcagattagaggcagtttcaggcagcaaaatatgtttctagctgttgagatggtagcactcatttcaattcatggcatgtaaatctatttgaataatatttatcatcatataaagattcatagttacctcagctggctttatgatcttgataattatgactggaactcaactatgcttattaaataagaagtttattagatttctagtgaatgctcagataccatcatcatcatagaaatattattatttagttctcaaaattaagctttatgaataacacatcacattttggtgtgtagtatagtactctaactccccacataaaacttaacttgatcgcctgcatttatttttaagaaagggaaaggtacaaatcacatcggattatggttaaaattataaaaagtccacattgtatttaattttctattgcttctatataatgtactgcccgtgaatatgtatcatcaatctgggctgactatcttgaccactggtcaacaactatcttgaccactccaacaacgttttggagtggtggaggtgagaaaggcatgtatcactgaagtaagaagctggctagataaggacttagcaaggactataaggaaaagtgcttttcaagggtcctaaagggcaacagaacttaggccccccagtgaaacattaaacacgtatgtaacgagcaggcttccaatcatctgagagctaatgatgctaccatgtatttataaggtacatttatccccatcttttcactgaaccgtacacattgtgggcaggggttcctattcttgccccttactgtcctggggtttgtagacatgaaaaaagaaaggcttgcttttttttttttttttttttttaagacagagtctcactctgtcacccaggctggagaacagtggcatgacctcggcttactgcaaccttcatctcctggcttcaagtgattctcctgcctcaacctccctagtagctgggattataggcatgtgcccccacacccagctaatttttgtatttttagtagagatggggtttcaccatgttggccagactggtctcgaactcctgacctcaagtgatcccccagcattggcctcccaaagtgctgggattacaggttgcaagccacctggcccagccaaggaaggccttcttaatccaaaaaaaaccaaataagatttggccaaaagaagagtcactttgtccttggacaagtatgttggcaaagacatacatattttttaatttgttttaacatggtctggtttaatacacattgtatagatgttctagtctataaatttccctctgagccttttcacttcaagatattccgatgcctctttcttgtttcctctcttctatctttcccccgattgtgttataatcaaagtccaatcacctctaaaaatcattcaggcctgtttctttatgatctaatcagagagaagaggaagtcttaattttaggtgaaaactaactaaatttgtagtcatctgggcattcttagcactgatttaaaccagctacagtttattctgaaacgttttaagtttctcacaggtttccgcaagaatttccccaaattattattttatcatttatcctccttttagatcgatgtttttgacttaataaaccaacttttcttaaaatttgctcttgcaatgtacatggatttcatcaaatgaagtggaaaagattgttgctgaagaacaaataagctcttgattataaatcattgactttcttaactttttgacataataatattttcaggggaacaattttcttcccccacatgcctgtcattgctcagagaactgcaactcccatcttcttcactcactcatccacaacgccgtccacacactctctgcatgatgagtgtgtcacttcagtcagagggaagagagtgggcaggctgttgggactgcaaacccgtgctcagattccccagactaccttcaccaggaacgtggcagacatggaggctggtgacccaacatccatttccctcttggttcaaaagatggaaggatacagttcattgaaaattgttcaaatgcacaaataattaccactgtattactgttacctacagcattcaatatagtaacatgttgtccatgtttacagcctcagagcaataggctgacctattctcttgctctgaaagcctaggtgtctggtaggctacagcatctagctgtgtctaaacacatgctatgatgttcgcacaatgacaaaatcacctaacaacacattgttagaacctatcccaccacagttcagcaatgcatgactgcacttctactgccccatgcacgtttgccactttatggctgtttattttgttgatggagaaaaattagtgcaagtaaaatagagggacctggaggaggtctcttataaattgcttgtgattattagctgagtattctttcaaaatagcccatcccaccactcccactactaattttatctattccatgaatgattaatttttaacaaaaatgaaaaatccaggatggtttaggtaaggaaaaaattaagagttttctttaaaatgtttattttttattcatggctgggcgctgtggctcaggtctgtaatcccagaactttgagaggccgaggcgggtggatcacctgagatcagaagttcaagaccagcctggccaatgtggtgaaaccctgtctctactaaaaatacaaaaattagtcagtcatggtgacatttgcctgtaatcccagctaactcagtagggtgaggcaggataatcacttgaactcaggaggcggaggttgcagtgagccaagatcacaccactgcacagcagcctgggcaacagagagagactctctctctaaaaaaaaaaaaaaaaaaaaaattattttttattcacaatactagcatacacctacatttcaactgattatagcatatgggataagttgaaatttgatattccataaacctttgggtcttttatgttaacagctcaaactggcttcattaaaaaaatgtatggtatcagccaacagatcatgggttctcagcatctgaagaaattcaacgttctctcatttttcacggttttaacttctcatgactttagtgcatggatacacttgttcagttgtatcccatggcttctaacatctgactatgcttcttgagatcagtctgaaagctgaggcatgttcatacttgatcttgaaacatgccatattaatacatttattcatagaagtattagtaattgtgatattattcaggaatcaaaaaacaaagggaaacacagagcttgcttgttatcccaaattatgctctggtttaaggaaatctttccccgaaatcatgttacttaattttagctaatttagatgacatttaccattctcttacctaaggccaagaaaacagttatattttaattagaacttagtgtcaaacatttttaagtttgataaaaaagccacttttctgggcaattttgcagggcctcattttgattccctgttacctcaaaatgactaagcaaaggagagctgtattgggtatttatcaagaaaactataaataatgtattgggaataaatgcgtgtgccacaaaccataaacttgtaaaggctttctgttctcctggtgtgaataagatagggacatcacaactcggagccattaaatgaaaagaatagggttactaagcaagattattaatacttaataattaatacttaataattaataaatactttaaaaaagattaggtaagatttaatttaatagatcagaccctcctttacagtctgtcttcacacaaaatcacaaagtcttacgtgactcaaatttcttttgaagtcatcagaggttgccattctggaactcataagcggtgacagctgatagcctcacagtcatgaaggaggtagaaaagttaacatgaaattcccaaagctcagcactcgagccttttcagaagctggatggaaatcgctgttcacagctccacagcccctgacagcatcattctatgagaacaaggtcaagtggaaggtgtagcggaacacgaatttgtagtctgagatctcaaggaaatgaagcaatctatttggaaaagcaaggacgatagttgggaaccattagcaacactacagacagaataggcagatactccgttgcccaactcaaaagggaattcatattctccaaatcctgacctctagctagctgttgttcttgtaatttgtaaatcggtgtcctcttttctatacccaaagccagcatcttattttgatacatcatactcccttttggatgactgcagtaacttgtcaactaattttgtgctgtccttctcagttctctcaaatgtattcacatacctgccggaggaatatttccaaagaaaaacaaaaccctgcccatcccctgtttaaacccctctcatggttcccccttatttcaggacagtttatgctccctggtccctaacacagctcagggagtcttttctcatctgcccacttccctccttccccacctctctccacccaccttattgtcaccctctacatagaaatccacaggcacacctataaggaaacatagagttatgcgtgattttgaatcttcctggaaactttctctgcttagaaaatttttttactttctagggtctttcaatcagaaggtctcaggaatgtttaatgagagtaatgcatttacagttagtataatgctgcatttaggttatgtttattggaaaaatgaattctcaactttctcaaatattcctcacctgctctgtgctattgcctactacaagcacatatatcttaaggtccaggttgacacattttgctttcctgctggacattttctggtgactgcatttccctaggattcttccccagcaactgagactgatggaaacaagtttctcagtttcaaatgaagattcagaataatgactatcatcctgtgtgtttattagaacccggtgaatcgagatgatttctaaagagagagtgcaatagaaaaatacagaatttagaagaaaagtacctaagttcaagattcattatttatatatgaaattgtacccttgggcaagtaatttcaattctacaatgctcaggtttgtctaggtgtaaaataagaaatagtatcagctctcgatatcctgtaagattttggtgaggataaaacaaacaaaacacatgaaaagttcttttccgccctaaaacactgtaatgttagttacaggcataagttggagatactgtgggttcagttacagatcactgcaataaagcagatatcacaataaagcaagtcacacaaagctgaggtttctcagtgcacacaaaaagtatgcttgcactatactgtagtttgttaagtatgcaatagtcttatgtctaaaacgagaatggacatgtcttaattaaaaaatacttcattgctaaaaaatgttaactctcatctgaaccttcaagtcataaccttttttgctagtggcaggtcttgcgtcgatgctgatggctgcagactgttcagggtgatggctgctgaaagctggggtggatgtggcaatgtcttaaaataagacaacaatgaagtttgccgcactgatggactcttcatttcataaaagatttctctgtagcatgtcattctgtctgacagcagcagaaccttcaaaactggagtcagtcctctcaaaccctgtggctgcttgatcatctaagtttatttcatgtctgaaatcctgtgttatcatttcaacaatgttcacagcactttcatcaggagtaggtttcatcttaagaaaccactttgttcttccataagaagcaactcctcatccgttcatattttattatgagattgcagaaattgagtcatgtcttcagcctccacttctaattctactgttcttgctattttcacctcatcttcagttacctgctccactgaagtcttgaatcccttaaagtcatccatgagggttagaatcgacttcttccaactcctattaatcttcatattttgacctccactcatgaatcatgaagttcttaatggcatctagaatggtgaatcgtttccagaaagttttcagtttactttccccagatccatcagagaaatgtaatgatctttagtgatctatgagagctatagcatcatgaaatttttttaaaatagtaagtcttgaaagtcaaaattactcattgatccatggactgcagaatttaggtgttgttttagcaggcatgaagactacattcacttccctatacatttccaccagagttcctgggtgaccaggtgcactggcattgagaagtaatattgtgaaaggaatgttttttcccgagcagtgggtctcaacagtgaccttaaaatatccagtaaaccgtgctgtaaacaggtgtgctgtcatctaggctttgttgttccatttatagagcacaggcacagtaaacttagcataatcttaagggacctaggattttcaaaatggtaaatgagtattgtcttcaacttaaagtcacccactgcattacccctaacaagagagtcagcctgttctttgaagcattaaagccaggtattgacttctctctagctaagaaagtcctagatagcatcttgttccaatagacggctgtgtcatctacactgaaaatctgtagtttactgtggccaccttcatcattgaccgtagctaggtcttctacataacttgaggcagcttctccatcagcactcaccctgaacttgaactgtgatggagatggcttctttccttaaacctcatgaatctacctctgccagctgaacaacttttcttgtgcagcttcctcacctctctcagccttcatagaattgaagagggtacaggtctttgatctggtttggctgtgtccccacccaaatctcatcttgaattgtaactcctacaatttccaagtgttgtgggaggaacctggttgggggttgttgaatcatgggggtaggtctttcccatgatattctcttgaaagtgaatgagcctcaaagattggatggttttataaggggaactttccctgcacaagctctcttctcgtcgggcaccatgtgagatgtgccttcaccttctgccatgattatgaggcctccccagccacgtggaactgtaagtgcattcaacctctttcttttttaaattgcctagtctcaggtatatctttatcagcaacgtgagaacagactaatacagccttcctctggattaggtttttggcttaaggaaatgtagctggtttcaacatctgtctggactactaaaatttccttcatatcagcaataaagctgtttttctttctaatcatttttgtctacactggagtagcacttttaatttccttcaaggaattttcctttgcattctccacttagctaaatgttttccacaagaggcctagcatttggtctatattggctttcaacatgccttcctcactgagctcaatcatctctagctttgatttaagtgagagacgtgccattcctcctttcacttgaacacttagagcccatcataggactaattggcccaattttcatgttatgttgtctgaggaaatagggaggcccaaggagagggagagagatgtggggatggttggtcactggagcagtcagaacacacacaatatttaccaatttcatttaccatctcatatgggtgtggttcatggtattctaaaactattataattgtaacactaaagatcactgatcataccctaaaattattagaataaatttcattcttttaaaaaaattattctgttttgtattgctcaggctggatgcagtggcgcgatgtcagctcactgcaacctctgcctcccaggttcaagggattctcctgcctcagcctcccaagtagcttggattacaggtgcctgccaacacgcccacccagttttgggacttttaatagagacggggtttttccatattggccaggctggtctcgaactcctgacctcaggtgatccacccgccatatacttttgaaagacaaagtctgaactattaactgaaaacaaagatccccaatcactctaacagattaataataatgcaaaggtttaaaacattgtgagaatttccaaaatgtgatactgagacatgaagtgggcacatactgttggaaaaatggtgctgctgatagacttgccgctcaataccgggtttccacaaaccttcaatttgtaaaaaatacaataccagagaagggcaatgaagtgacatgcaataaagtgaggtgcgcctgtactgttttcattttcatcaagccaaaccataagaatcttgcacaacatctgtattattagagtagcatgaataatgctttttattgtaattttgtttttacttccaaaaagagaaataatttttttttctgattatgaactaaacaggtcctcctgtctagtaatagaacatcaaatcatcaccatagagattcaacttctctttttaggaattaaaaatagtcacaatccacttatcaattacacagttaataacttgatgccagaaggattttgacaaaacacagtacccttcattctcttttaccttagaaatgatttacatttcaggttaaagaaattctgacactcaactaaaaatacctgcagacagatatctgtaacccatatatgaattgacagcattttaaaaatagaaaagttggtatttcttcatttttcaaagatttaatgttaagaaggaatggttactagaattaatatttttccagggacactaataatttgattataattgaaaattaaaaaataattttagaaagaattgaaatacacatagcattctcataaaaatagaaattataattataatgttgatttagtttttgacagaggtaaaaactattaaatgcattagatacatattattgaaaatatttgaaggggtaggtcatagtttctctttccaaacataaaatataatattaggttggtgcaaaagatttttaccattaaaagcaatagcaaaacctgcgattacttttgcaccaaaccaatgtgtactgtaaagccaaatcctgtaatctctttaaatttgacttaacatttgcgacctacatccactcatgcattgaaaaggcagctccgtggagtcaacatctgtacatgaagcccgtgaagacgctgcctccatgggaccagaacaagttaaagaattcaggttgctggtttctttcaataaagttgtgggaagtaagtttcactatatgtagaacattctgaggaattgtagttttggtatcatttagtattatttggatattaagaacaggacttataggagtcttcaaaaataatcataatacatttatgaatgtaatgaaataattgtgttatactgttgctatagctatgcagattatctgagagatacctgagttatttatgtttctacaaacataagttacactactgctatattcaatgaaagtatacattagtaaattttcctatactctgtgttactaagagtgtactgtagttacaggaactgtggcatctctatagtgtgtatttaaaaaatactcaagcaaacttcagttataaggcaattatgatccaagcaaagttcaattataaaataggtaatgataatatagaaggcacaattaggacaaaatattcctgtctctgtactgtcagatagcctggaattacaatcagtaacctgaacttcatttagtgtgaaggcagagtctccaaaatccaattcaaacaaaaaaggttaaagtgacatgttattccattatcactcattgctatattgatacagactagttgatcagtgtcctaccacaaacacacacacaaagagagagactcactcctcatgcagtgagacagtggaaatagggaaacagatgtcttaagaggaaaaacccaaatgggacatacgagataggctttttaaaaaaccctacataggcctgcacaaagaaatggatgtaattctagacaaatcccaccatgttgtataaatggaggtgaaagataaggaattacccctacccctaaaaacaactgagttgaaattaaaagtatgattatattatggattgtctaacttcacaagtattatcaacttactaatttatattaatgaatagctttcaatctagatatgatttcaaataagcaatacatatttgactattcagttattgaaatgattttcatgcatctactgtgtgttaaactttgtattaaatgttagaaatcaaacacgagtgagattcaggactatattctattattctataatttaatggaggacataaagagcagatatttgacaaagaaatgcataacatactaagggagttcatttaatggcaagaccaattataattttgtttccaacttggtatgaactatgcttaccaactgtgagagaggggagttaagatactattcatgtattctcaaattagtcaattccaagaatttgttgagtgttactcttttcaaatcaggtgggtggttggctcaatcagcgctggcaggttacattcccatcttactgttctcaccaccacccactgcagtgaaaaacacttttatgacagaaatttacctgttttaaaagtacttttgttctcagaactgagagattttattgttaaataaaagtgacaggggaagcaacataaagtatcaaagatggttctgatcaagtcatgtaacagtgcctatgagaaagatttgccattctactctatccatcctattagtccccctaatatttccttcttaaggctttgaaatctccccatagaactccttatgttacttcgagaattttaatagtcatacggcaaataagcagagagcagctcacaattaatgtactaatgcccttttcttttaataaaaattatactctttcattatcctattaacaaatgattctttagggagcatttctttaatgttcacagtgctggcaccctagttggcactcaactatcttaaatttttaatgaattcagaattagtctgggcatctctcaaaacttagagtctctgagtgcatgagtggactctttatgttatcagatttattgttttgaaagcaaagaagactaggaatataagcaaaagaggaaacaagcaggtagtttgagagtgtagaaaactccatggcacacaagcacattgtaaggtaacacctttttcaccaatggagagaaaagagaggaagagatggaggagcaaaacgactcgctgttaccatactagcagtgtcagcactacaaaatacaacatttaaaaatgtgttaagatgtttttctgtatttatcaacagataaacccacagccagcccaaatcaggtactggagattaaaactaaatccctggacaaagattagcatctcaaggagaggctgtacaacattagagaaaaatgtggttgagcaggttgaaaaggacaccttcacagacacatctgggagaatgctagcagctcttcaaatacttctccttagtagcatttatctccatcttaactacatcactgatgcattaattataggacatttttctctctggttagaatgtaagttccttgagagaacagaccttttttgtctgaattccagtgactagtctactgccatgcaggctcacagttcgtatttgtggaatgaaattgctgaagaattaattatacatgaaggaaattcaagcgtaaattgagccattaatacaaatatgaaaatacaaggaaatatgaactttagaaagcaaataatatgccacagaggttcccaattgcatacttcactggactcacttcatttagggacctcattttctaaggtcccccagctgtccagtgctcaggtcatcactgacatgggctcagaaaatacagatacatccccaaggcagagccagtgtttgttttatttttgttttaatgtaagcaccacttacctttttcacctatgggtagactctctcattccatgatattagaaaatgtttcaaatgaaaatgcccctggttgtaatataatgactaaaattacattaagatatcaatataaagagtatcaaaaactttcctaaaaatcagttttaataaaagagttgagaacatgagaatgcccttaaggaaagggtagtagaaagaaaaatcaaatatacatttgaagttcatcaaaatagatttggagttggcacagattagaattttattatttttttaaaaattgggccagaaacgagcacctactttacgctaggcactgtgcttccctatgaaaggaagcatggtttctgcttcaagtgggtgagtggagggcctacaggtgcttagagaataatttctttttttttttttttttttttctgagacggagtctcgctccgtcaccaggctggagtgcagtggcgcgatctcggctcactgcaagctccgcttcccaggttcaagcaattctcctgcctcagcctcctgagtagctgggattacaggcacacgccaccacgcccagctaatttttctatttttagtagagacggggtttcaccatgttggtcaggctggtctcgatctcgtgacctcgtgatccacccgcctcagcctcccaaagtgctgggattacaggcatgagtcactgcgcccggccaataatttctaaacaatagtaatgcaaatagagtatgcacagcgtggacattccagcttcctaaacgcaggagcactaacgctcctctggcttgagagagagtcatcagaatgcaaagatagaaagagatagacaaattaggggatgcaagggatgcaatccagtacaggctccaatttctaaccctgtcccacatcaatgaggacctttagagagggcacaatattatccacagtctcataattcaacagggaattgggcaaagaaacaaaaatagtgactatggactaaattgattctgaacccatattatgattcagtaagataaatgtccctgaaagtttctgaagattcttagggcaccctgatgaccaaaggggtgagagctagggtcatcacgtgacctcattatccttattatctctcagcagttaccgagttaatggggagctagaaaaaattgtttttctcaatcactggaaaacagtaaatgaataacagatagctagttttaaaatttactggatattttgtcaattttctaagctacttgttatatctttctaatccttaagataattgcatttattagaaaaaattaaattggcttagtaaaattttagtcaaaattttgtgtatttgtttaggaaatgaacaaagagattacaatctggatcctgatagttcactggtaaaagataagattataccaacaaatagataacttacacgaaacgggtaaattccaagaaagacacaacctaccagaactcactgaagacgacatatcaaatctgaatagacccataacaagtaaagacattgcgttactaattttaaaactgccaagaagaaaagtccaggtccaggggataccttggtaagttcaaccaaatatttgattcgttttcaacagggtaacaagatgattcaatggggaaaaataatcccctcaataaacggcatatgcaaaagaatgaagctgagttcctacatcacattacatataaaaattaagtcaaaatggataagaggcctaatgcaagggatacaactataacagtctcagaagaaaatttaggagtaaacctttgtgaccttgggtttggaaaaggtacttagatctggcaccaaaaacatgagcgaacaaagacaacatatacacactgaactacaacttttgttcttcaaagaacatcatcactacagtaaaatgacaacccaccaaaaggaaggaaataaatgcaaatcacatatgtcataaaaaacctctgtccagaatatataaagaacatttacaacttaacaaggagaagacaaataacccaattaaaaaatgggcaaagaatctgaatagacatttttccaaggaagttatacaaatggcccaataaactcttgaaaagaagatcagcatcattagtcgttagggaaatataaatcaaaattatgagatgtcccttcacacctacaaatattgctaaaatttaaaacaaacaagaaaagaataacgggtgctgtcaagaacataggtaaattgtaaatctcattcattattggcagaaagggaaattggtacagccacttttaaagagtggcataccttaaaatagtgttaccatatctccagcaacttcccttctaggtatatatccaaaagaaaagaaaatgtatgtccatataaaaactcgtacatgatcagtaacagcagcatttttctaatagcaaggaagtagaaacaacccagatgcccatcaattgatgaatacataaacaaaatgcagtatattcatacaatggaatattatttggcaataaaaaggaatgaggtaccacaagtcgcaaatatggatgaacttttaaacgtcataagcgaaagcaggcagtcacagaagaccacgtattacatgtttccatttaaataaatctcccaattaggcaaattcatagagacaaagtcaatttgtggtagccaggtactcggggaagagggaagtgagcaggggcatggggtgtgactgctactgtgtacaggctttccttttgggaattatggcagtgttctaaaatttgatggtgttgatgattacacaactctatgaatacactactaaactgtacacgtaaagatggtcaatttaatgttaggaaaattaagtcaatcaactgttatttttttgaaaggcagataaggtggtatcttagattccataagccagcctaaaagtgctgaggaaccacgcagtatttgtgtgtgtgtgtgtgtctgtgtacaggtgtgtgtgtgtgtatcagatcattataaggaaggatgtatgtctagagaagtcgtgttaggcttcacatacttttaatacattgttaccctaatgttataaaaacttatagtggatttatattttagacacaagtaacatatagttggccagttgaagtttatttctggaaaacttctgtttacattttattttaaaatagttatccctcaatcagcatgccctacattttcctagtggcagaaagtagtgaccagaataaaaaagcaattaaattaggcaataacattactgaagaggtcactggttctgcttacatttcacttgttttgcctatatatattatccattgaactaaatacagagaagccacattttctcttaatattctcttatggtctagtgattttctttcttttttacatatggaaaattacaaaagctctagctacacaacgacatcaaatatacaagtgtctaattgcaatacaccgggatattttgactaaagagccgtgataactttgcaatgatgtaggacgatgtttcagacaaaatatgaagccaaaaaaggcagaatataatctgaactgacatttcctatctagaatgacagaaatgtaaatgtgtttttctctagtgctgaaggtttggaaaatgctagaccctaagatttaccatggaatttgatgattcatagtgaacatgaagagacagacgccacagtctgagttctatttggtaattcgtggccacaaaagtgcacccctcattgctttccagctatttacacttgccagtataatacaagattcttaattagcaaccatgtggcttcactttaaatagccttgctagctcccttgggacctcttgaaatatcattcatattagtagaaataccatcccattttgttacagatttatttatttctcttgctatcctttttttttttttctgttaaggcatattactgttacatgattataagcattttttaaagttatgggcagggccatgatctaactatactttgtagttacatgacatctaaaaatgtgctatctgattaaaggatgcattttagtaataaagatgatagctatttacatccgataactgcctacaaaaagacagaaatgagctgaaaaatggaagaagatggaataaatacagtttactaatagagcttatacttctcccatttggtttaaagaggcttttaaacacttaagctgagatttactatgaaaatcagacttacaaacatcaccatcaacacagaattattaaaatgtagaaagtgtggatatgtctaggattgcgatcccattatgcagggacctacgacctactagaaatgctttgcaattcttactgaactattttttcatgtaaatgaacatcacaaggacaggtgaactctctgcaggcaccgatcgtctggttttctaaaagtatacagggcagacagggtattcaccttgattggaaacagagaatccaggtatatttgaatcttctgcctccaccatattgtgtagcactatgttttgtttaattttatcagtagaaagaaaaaggccagacaaatgccgtgactcaatcctgtaatcccagcatgttgggaggctgaggtgggcggaccacttgggcccaggaattcaaaactagcttgggcaacaaagtgagagccgattctacaaaaattacaaatattagccgggcatggtggcacatgcctgtagttcaagctagttgggaggctgaggtgggaggatccattgagcccaggaggtcaaggctgtagtaagctgtgattgggccactgcactccagcctgggcaacagaaagagattctgtctcaaagaaaagaaaaaggtcatacaagtttaccactaataggccaggtgcagtggctcactcctgtaatccagcactttgggaggcagaggcgggcagatcacctgaggtcaggagtttgagaccagattgccaacatggcgaaaccccggctctactaaaaataccaaaaattagcctggcatgttggcgagcgcctatagtcccagctactcgggaggctgaggcaggagaatcactgaacctgggaggcggaagttgcagtgagctgatattgcgtcattgcgctccagcgtgggtgacagagtgagtctaatgaaaaaataaaaaataaaaaaatgaaaaaaaagtttaccactaacagttgaagcaataaattttgttttgacgaagtaacatttatagtcggtgattattataaaaaattttgttttaaatcattcacaattgagttcccatcctattgtaagtctactgctaatctattaattgcatgcattattatgttggtcttatgatactacctagtaaataaatatacatatgtgggtcatactccataagtctgaaatacacagtttaaggggctaataaggtatatgtaactaagaaatacactagtatcatcattatctgctgttttatgttttaataacttctatttctgatatttcaaagtgatataaacgagcaagttctatacaaagctacctcatagattctaaaatcactggcctttcaaacatgtttatgggttctttttaaaaaataaacattcggatgctgacgaagtagaaaattagtcttctggagacatattatgatggagccttaagatggatgaaaagtataaactgcatcatccagggctggatttcctgtgcacactgcagaaacgtccttgatgttactgatgtctgcctcacgcttagctctcagagccgaagctccatcaggacagattggaactgccacccagaggcatttcacaatttgaaccaaaaggttttcaggcttgcgttctagctaattctgtcgcttctaattccagccagacttaaactcttatctttggatgccaggcctacagatagggctatcacagtagccccaattcccagaaaatacgcaactccatgacccaggtgagattaaatccttccagatagcctaaataaatggtctataacttgttcctgtcactcccactaatgcctttgtactgtgaaacagactaggaaaggtgtaaatatcttcaaattattagctgcacttcctcttccttgcctctaccaggaactctagcatcacgctcctcatggggcaaaggaaacccagaggcggcagttcctgcactttcttctcctgtagttattaaccaatttgcagatctccgtgtattactggtaatagaggcacactcatatcttttctctttaacaccttgccagtaaaattctcccgcactaacctgtctgcccctctctctctaagaaagatacagacccaattatacaatttagcccattactttggttcaaacagatttcacctcaaaacagatgtacttgaatgtaaaaggaccttcttgtcagtgcgtggggtagctgtgctctcctgtaccccctaaacatttatgtgaagtagtcacatctgaagaacacacacatatataatgggaagtatctcttaagcagcaccgcaggcatttgctttaaaccccccgtaactcataacggcttgactgtgcatccatgcttctcagcagctaggggttccctgaaagcagggacaaagccgtggtcttccttgtttcctctgcacctcacctcgtgctgagcacatgcagactcagaatagatgttcactgaataaaagaaaggatggacacatgaatacattaaatgaacctcaaacgttatctactatgctctgtgcagaatcagtcagaagacaaggtgtctcgggaatgcaaaacgggacaaagaaaacccagctcaagcaagataagcactgggcagtggttccatttgtctgagcgaggcagcacgtcgagatgagacgaaaacacagacactgactgagtaggtagagcaaggggtggaaatcaagaaccaacaagcagcccagtgcccatctgtgagctggggctgcaggaagaaaagttggaaaggtggctgggtgtggtggttcatgcctataagtccaacacgttgggagcctgaggtgggaggactgcatgagcccaggagttcaagacaagcctgggcaacaaagcgagagcccatctctactaaaaaagtgagccgggtgtggtggcacgcatctgtggtctcagcgacatgggaggctgaggcaggaggattgcttgggcccaggaggttggggctgcaggcagctgtgtttgtgccactgcactccagcctgggtgacagaggaagaccctgtcttaggaaataaacaaataaagtaattaattaattaattaatttaatttaatttggaaaggcaaggctatgttgggagggccctgacatagtgagaggaagtatcattatttgaaggactttgaatgtttctcatgtgactggaaagactattcatattcttaccacagcaagatctgaatttgtgaattgtcaagctctctcggtaacattgtttcattttccattattagttttaagtcactttaaaacaaattgtggtaaaattcaactcctgtcccacgacttagtttgcccacatttaaaactattcctgaaataaactatgtaaatttaggagggaaattttaatctgttaaatgtatttagacatttcctattcagagaaacattatgaagccttctattttgtgtatagtctagatttttaactatgaatatgtgtgtgtattcatgcaaatagtattgatggagatgtatagatagatagatgataggtagatagatgccagatgggtacatggacagtcacacagatggagagatggtaggtggacagactgacactatgaagaaaaacaaagaaggctgaagatggctggggtgaagccatctttctactgggtcttcaggggaaggcttttcgacaaggtggctttagaattactacaagtgaattctatccatacaggaattttgacttttctggagttagagatgatcaaatatattttgaaagaaataaggtcctggtcacaaatatgccactacagagataggttagtcctcacgaggcctacacctccccgactctaaaaatgaacaagatgagcagattgtggaactctgggtttcattcttattgccctttgaggggaaggtgcttagaggtaaatgttggcttggagctgactagaatgaactggttagctttgaatttggtatgcagcacaccatatatgttgagaggttatttaaatgtttttatagtttacatggagagattaattattttatttttatgtaaaaattgctgagatttcagcagttacgatcgctgacctattaatttaagtaataatgtaatgaattttatatttttacatctgcagaataactcacaatcctgtgcaatgtttctgatacctgcctaaatatctgtatttactcattttgcatttcttttcaaaggctctcatgatttcaggaggtatactgatgcaaacttaatatccagaaagaattctggtgcaggaatggtttggtatcaagaacgtgggctccagaggtggacaggtgtgtgtctccaggctaccttgtatcctgcatagctttgagatcttggacaatttatttctctcagagggccacagtttcctcatctgtaaaataaggacagcgatactaagttcagagtgtcatcgagaggataaagttaaagaagatcctggacacacacccacagtgcctaacagcattccatctgcagaagaggtcttggttatttgatgggattgagtgcacagagtgaaaaatgtgtccatacagggaacgtacttactcctttggagcacttatttcatatgtggatcagacaagttagcaagatggtaggtatgctgccaactataacgacagagatatctacacatgtgtagattgtaagattggtgcttctggagcattaataacagatcagaacccgaggatttgttttaccacagattaggatgcaccccaaacaccttctagaatgtccaggctgcttctcactctgttccctaaactctaagaattagctataaattagctattaatcctccattcacatccaattttgtgtagttttaaaagtacaagcatataaaaatagataagccaacctgttccattagccctttaatcaatattttagagaagatgaaaatttgactcacattgtatgtttcacttacaaagcactcctatttcaaggactaaccgtactatagctggtgatatggtttggctgtgcctctacccaaatctcatcctgaattgtagctcccataattcccacatgttgtgggaggcacctggcagaagataactgaatcatgggggtggtttatcccacactgttcccctggtagtgaataagtctcacacgatctgatggttgtataaggggtttcccctttcgcttggttctcattctcttttgcctgccgccatgtaagatgtgcctttgcctttcaccttctgccatgattgggaggcctcccagccatgcagaactatgagtccatttaacctcttttttttttataaattgcccagtcttgggtatgtctttatcagagtgtgagaatggactcatacagctggaatttttttttttttttttttttttttttttttgagatggagtctcgttttgctctgtcacccaggctggagtgcactggcaggatcttggctcagtgcaacctctgcctcccgggttcaagccattctcctgcctcagcctccctcagcctcctgagtagctgggattacaggcacatgccaccaggcccagctaattatttgtgtttttagtagagacagagtttcaccatgttggtcaggctggtcttgaactcctgacctcgtgatctgcccgccttggcctcccacagtgctgggactacaggcgtgagccactgtacctggccaaaaattattatttaacatgaaaagagcacgtatagtatgattttttttaggaaaaaagttaaaactgtctgtcaaaatatagctaatgtgtaccatttagataaatgcaatttaagagaatattatgctggaacacatattatgtgtcttgtgttcaagcacatcacatacatcatccacatgagctgtcccaaagtctgtaagagcagagtcacacactcatttgacaaatggatgaccgaaggcttagaaagttgaggtaattttcccaaatacatacacagcaagtggtggagacaggattcaaatgtgagtcaatgcaacttggagaatttccgtaatggtggttaaggaaataaattttgcctgctgaatagttgtaatgttcattccttcacctctaggctaaccatttcacttctctgcctaaaatctccagtggttccaccttgcatggttgtttccacgtgtgattgactaggcatacttactagtaaaaaatgtgagcacacagcccccaaagcatcttgtttattcacaaattttatatgcattactctactaagagattaagtacaccataaaatacacactgcttagaatttaagaacagatccaaatgagagaattacaatgttgacacgtggttatttgtttttcactattgagtaggaaaccaacgaaaagcttccaatggtactctaatgctggtgaaattttttaattaccgatgacttcaccaaagtttgtcttcaagttttaggtgatttcttggtaagagcgttgaccatggtctcagcctcacactgttagcagtcagcatcacattgcacaacactccctgaggacaaggctcatggttaatagtggtggatatgaattcttatttcaaatagtgcttaactcttgtcagatctgataaaaccatctttttcttttctttttttgcttgttaatgtggctggtgaagtgccttagtatagtcttcaatactatttcattttgtaagagttgctttagtttaaacgaggatcatgtcaactgcaaaacactattatgtgctacaggagacaaatcaatgctggcacacaggaatgtccgcttttcccaaatgttacctgtgaccatcagaaatattcaggcaactgggagtgggcataccatgagcaaagtgaggggtttttcctatttgctttgattaaaaattaatataaatgaaagtcctagtattttattcctgcacactgatggtatgtttcgcatccgttgggatgcatcaactgattttggagcccaggaaaagtctaagctatttggacactaagctgctacttaggactcccagaaaccccatgcctatgctcgcagctacatctctcaatatcttcatcaacatttatttgtagtttactgtgcttacgtacaacctttcaggtcatggctgcactcaagctgagttccctacctagaaaatccttccttcctatattttactcttaatctaaaatttctacattattcctacttatcctgtaaaagtcagattcggagtgattggaagacatttcttccatgtacttgtgagaattaagggttaacttgtccagtactcattcctcagtacgttggcttgaaaaggacttagccttgcaggctcaggaaagagaatggtgtttccctatcaggaactctaaagcagcaagtgaagaggggtggatggatgtggaatgagatgtggacttgtcactctgccaccaggacgaatatacaaaatctggagtccgttacacttgacattttcacacacagaagccatgcatttttcaaggtactatagcttttaataaaagctctttgtgctttgaagagggtgttggataacagtacatatacatacttgttttaaaaaaagaagaaaattaattgaggccagcatacatttttccatgccatttccaactttaacaccgttgaaattcctttaaattcagcttgaggttcccatggaatcacctctggccacgggccgtcaggtacaatcttgggattaagagctctctgtgaagacctggtgaccttgaccattcagggcatttcagattattctaaggcatatttttaaaagtagggttttttcctacatgactagttttgttaaacttgtaatttctttttaacataaatttcatactgaaacaagttaaactgttttttactgaaagtcagcttttgacagaagcgtacccctccctggagaaacagttcttcagaacctatgaatatgtaacaccaatgacttctagcacttttaattttacaaattcccttctaacggctttaattgtaattcctggcataaaagaggcaacaggataatactttgttgaaatgtttaattgaagtataatacatgtatgtcttttatgaaacaacctcaaacttagcattgcaagcacagtacaaataactatttttaaatcaacaaaaatgatatctatttattgtatataatgttgttttgaaatatgtatgtgttgtggaacagctaaattgagacaatatgtgcattacctcatatacttattttttgtggtgacaacaccgaatatctagtcattagtgattttcaagaatgtaatacattgttattaactacagtcaccatattgtgcaatactgtgcaatacatcactttttcctcctgactcactgaaagtttgcttcctgtgaccaacacctccccgcccacacacagccccaacttccagcccctggcaaccagcattttaccctctacttctcagatttcagtgtttttagattccacgtatacgtgaaaccgtgcaatatttgtttttctgtgcctggctcattttatgtaacatcatgtccttcaggttcatccatgttgtcacagatgacagggtattgttcttttaaaaggtcctatggtatcttattgtgtttataaatataacacattttctttattcattcatcagtcaatggacacttaggtaggtccctacctgggctattgtgaatagtgcggcaaaggacatgggagtgcagacatcccttgacatgctggtttgtttcctttggatacgtacccagaagtgagaccactgggtcatatgacagttctatttttaacttttgagctgttttccataatggctgtaccaatttacattcccaccaacagtgtacaaggctttccttttctccacgtccttgccagcgcttatcacttattatctcttgtctttcttgtcttttttttttttttaagatagatgtcgctttgtcacccaggctggagtgcaatctcatctcactgcaacctctccctcctgagttcaagcgattctcctgcctgagcctcctgagtagctggcattacaggcacccaccaccacacctagataacttttgtatttttagtacagagagggttttgccattttggccaggctgctctcaaactcctgacctcagatgatctgtccccttcagcctcccaaagtgctgggattacaggcatgagccaccgtgcccggccatctcttgtctttttgataacagccatcctaacaggtatgaggtaatatctcattgtggttttaatgataattttttccctgataatttatgatgtggagtattttttcatatacctgttggccatttgtatgacttcttttgagaaaagtttattctgtttctttaccccatttttaaattgggttacttattttctaactattgagtttttgagttccttatctattttgaatattaacctcttatcaaatgtatggttggcaaatattttctgccatttcataggttgtctcttcactctgctgattgttgcgtggctgatacagaagttctttagtttgatgcattcccacctattttcccttttgttgcttgtgcttttggagtcatatccaaaaaataactggccatatcaataccacgcagcttttcctctgtgttttcttctgtgagctttacagattcagttcttacatttacagctttaatccactttgggttgatttttgtatatgaggtcagataagggtctcatttccttcttctgcttgtggatatccagttgttccaacaccacttatggaagagacagtactttccccgttatgtattcttggcgtctttgtcaaaaaccaattgactgggccaggcgcggtggctcacgcctgtaatcccagcactttgggaggccgagtcgggcggaacacgaggtcaggagatcgagaccatcctggctaacgtggagaaaccctgtctctactaaaaaaaaaatacaaaaattagccgggcgtggtggcgggcgcctgcagtcccagctacttgggaggctgaggcaggagaatggcgtaaacccgggaggtggagcttgcagtgagccgagatcgtgccactgcactccagcctaggcaacagagcgagactccgtctctaaaaaaaaaaaccaattgactgtatatgtgtggatttatatctgagatctagagatactataactctctatatctctagagatactctaactatgtggtatatattttaaggcaggtagtgtgatgcctccagctttatttacataactacttttgggagtaagttgctgccatgatgctccatcatccctgaaaactttactgtgtatttcctaaaaacaagacattcttctacacaattggtccattcaccaaaatcaggaactcacattgatacactattagcatttaatccacaggcctgatgtaagttgtctcaattatgttctttcttaccatgtttttcatttttctaattttctcttttttaattttaagttccagggtccatgtacaggacgtgcaggtttgttacataggtaaacgtgtgccacggtggtttgctgccccatcaacccatcccctaggtattaaacccagcttgcatttgttattattcccaatactctccgtccccccacccatcccccagtaggccccagtgtgtgttgttcccctccctgtgtccctgtgttctcactgttcagctcccacttataagtgagaaggtgcggtgtctggttttctgttcctgcattagttatgcaccagctaagactatgccttgcatttaggtgccatgtctcttttggtcctggctacatttgcatataggaaaacaataacaattaatggcaatcatcaatactttcctctatctagttaggttaatctagacatggtgtataaaaacaattacattattaatcttaaaagataagtaaagcgctcatgaaaacggggaaactgatacataaatattttcttcgactgctcatgctgcattctggagacgaccttcactattttttgcacaaatatttgaaaaacatacgcaggtattttatctaaaagatccatgccttcttaaagcatgaaagttggaaaagtggttgtgggtccaccaaactacaaagcccaatttctagaagaaatagagggcatggcacactgctgatgaagaacacacagggcagaaatacataacttgcccgggcgcggtggctcacgcctgtaatcccagcactttgggaggccgaggcaggcggatcacgaggtcaggagatcgagaccatcctggctaacacggtgaaaccccgtctctactgaaaatacaaaaaattagccaggcgtggtggcgggcacctgtaatcccagctacttgggaggctgaggcaggagaatggcgtgaacccgggaggcagagcttgcagtgagcagagatcgcgccactgcactccagcctgggcgaaagagcgagactctgtctcaaaaaaaaaaaaaaaaagaaaaaaagaaatacataacttgaatgaaaatgtgtattagctaaaataaaatggttttaaaaaaaacaggatcagagggttttataagtgagttccactaaactctcaagtaacattccaattccttcatgtttaaaaaaaagaaaaagaaaaaaagctgttcagttttgtttaaattaatttctaaataaaacaggagcaataaaagaaaatgaggatgaaattccatttcacttgtaagtatacatatgaaacagaatccaaataatatcccatcatcaagatttatctcaagaatgtgaggatggtttatcatctgaaaaatccccatcaatgtaatttaaaataggaagaaactgaaaggtaaagcacttattatctcttataatacggacgcaatgacttaataatagtccataactttactattaaagcaaacagaaaagaacaacagagtaaaccaggaatggaacagaagtctctaacttgataagggcaatatatcaaacattgcaaaaatatttaaatttctgggagaactcttagctacattttaacttctgaaaaaaaaaaaatagaggatgatatcagcaaacaaaacaaactccagagatgagaaattgaaactagcactcagaggaacgccagggcagtgggccttctgagcccagaaaggcccggattcacaatgaagggacctagcctcagacggcagatgagagtggcagtgtttagcactgtcccttaggagatgctcagtaaaatgcctctgccagctgcctcctcttcctcacctgtatgtagctgtgaaatcctgggcactgttctcgaaagagcataagatgctccgagagggtcggccttatacgatttaagctgggccaagagggcaagtggagtctcaggggatggcagcctgtgctgtggaggtgagggccacagagcaaagcccctccatgaagggctcaaagcaaaggagaggccttctgcagtgcggccattaagatcatggtctgggaagccaggctgcctgggtttcaatctcagctctaccacttactgcatgactcagtttgtttgtcttgtgccctgcactcctcatctccatgaagagctaatggcagcacctacttcaaggttggttggaaggggtgaatgagttaatccaggtaaaacatgagaacagtctctgttcttcctcaagggaagcctcctgacgcctgaacacacacattccactggtgtatttccagcacaagattctggtgtgcatatgcctccaaaatgcaatagggaatctatgtaaccttccaatactaattaacatattgtttggccacacatattaataaacaagcaggaatcatctgattttggaggtaagtaaataacatgaaaaagaaatgccaagatgcacaaagacaacaactaatcatattaataggactgtttaatggaaggtacatgaaagaagaagaaatcaaagaaccggtgcttctcagactctgacgtgcaagtggattaccaggagatttgttattaataaataaataagaatgaaatgcagcctgcatcagcaggccaggcgtggactctgggattcagcatttctcaacaagcccaccgtgtaacaccaattgttgctggtccacgttccacacttttaggggtggggatcaaaaagataaagtcaagaaatgtttcaggagtaggaggaaaacgacaaaaatatacaaagaaagagatatttttaaagtaaatgcaaaattaagaagtaaaataattctaataggcatccttaaagaagatggcagaaatcagagaggggagaatataattttaaaaataaggatattttcctgggcaataaggataaaaggactagttctccatgctggctacatgctctgattttgggtggcatcaaagaataccaattgtttggccataatctatggaggcatagcttacgtatctgtggtttttaaaatcatagtgaagtgagaagcactcatcacgcattagagtaaaacagcccaaagggtatgcagcgaaaagaagacagaacccaccttgacatattttatggctctaaacggggatagaaaatctgagaggttttacaagaaatataacacctgaaacctacatatgaaacaaatgcccgaattgaattcaccttctcaatagtagtgccaagttttagaagagcagtgccttcaaattgggagagaaatgctataaacacagccaaaccacatcaaaataaagaatggaactaacaaataatgccttcaaggagaaaggagattatatgacaacaaattctacaaatataaataaaatattcattttttaaagatggagtctcactcttattacccagcctagagtgcaatggcgcgatttcggctcactgcaacctccacttcctgggttcgagcaattctcctgcctcagcctccgaagtagctgggactacaggcgtgtgccaccacctggctaatttttgtatttttagtagagatggggtttcaccaccttggccaggcgggtctcaaactcctgacctcacgtgatccacctgccttggtctcccaaagtgctgggattacaggcatgagccactgcacccggcccagatattcttaactataacataaaggcatatgtttcttccaccaataagaaaaataaaaatcaatttctctgagaacaatagagcagtaaaagaaaggcataaatctgaaccaaatatgaaacaaactaaaatatgataagatttttagtaactgatatctcctataaactctgaggtttggaacattattaatgattagtacaggctgagaaacattcaaatatcatttctttctcatggatccaatcgtcatacatacttgcccggccacataatacaatcttataaaccttgtcaatgtaactgtattactacatctgacagaatttaggaggagacaaaaaagtggtgaaaaatgtggatagaaaatgattggttgataagttccatcaaagtttgttgaatacatcagagttaaagtatgtcgttcaaagtaacaatgcacttgatgattacagctcccgtaagtacgggaagaggatggatagattaacaatgggaacaggctgggagaagagatgtggggcaaagaatgccaaattattaggttttcaaggtggggggtgaatgtgcatattttaatgttgataaatcaatagctccgcgatgatgataatccccaaaagaactaagtggagaaacacgtacaagtggctaactctggggaacagaactgaggacatgagagagtgaattccttttttttttttttcattttatgaagaaagcaggaaagcatgtattacatccataattaaagatattttaaatggtaatacaaccaagcagttgaaataacctaaacatttcaacttcattaatatctatttttaaaagcattttgaatcatctgtttctcttagatacttcttcattttacttaggaggagagcagcattctatcgtcatttcttctgggactttgcacaaatcagaagatttgcacaaggcaatactgtggcagcacagaacaactttaacaagttcacggaaaggaaaaccattcacattcgaaatagagctccatgcctctaaccaataccttcccctggcatatgtctgaccttgtcctggggactgaactagagtcatttcctgtgttactcaggacacaagtgtcacgatgttgtatgcactccagtcttgactgactagcccagaagggcaaaaaggcaatgtgaggggcttagtcttgctgcccagccctcactgttcactttccagaattcttatggtaggaaaatttctcagttcaaaagcttcaggttacctgtgcatttgctctttcaatacacatgaggagctcggtgtcactcaacctatccgtattccccatgctccaagagtctcactcagaggtgagcgtagggttagaagaaaaaaatgggaacagttatcatttaaacagtttctcacaacccccatcaggtacaactcttgagtgagtaccaagattccttgcttaaaaataaaaggttgaaggccgggctcaatggttcaggcctataatcccagcactttgggaggccaaagggggcgcatcacttgaggtcaggagttcgagaccagcctggccaacatggcgaaaccctgtctctactaaaaatacaaaaattagccgggcatggcggcaggcgcctgtaatcccagctactcaggaggctgaggcaggagtatcgcatgaacgcaggaggtggaggttgcagtgagccgagatcgcacctctgtactccagcctgggcgacagagcgagactctgtctcaaaataaataaatgaataaaaagttgtaccaagtagtggctaatttataaagcaaataactaatcttttaaatgagagagaacagaagagtttctcattttggagattaaagcatggcccagtcagcaactttataacactgaccaggagaggtacatgcctttgttaaccctggctgttgttactgttatatcactagggtgtctcctcaacaacactgttcctttttctcttttcctgttgctgtgaactaggcatcaggcatagttgtgtatgaagttatcaggaaaatcacaaagatgtgtctaccagggcaggcaaaccccagatcctaaggtttctgtccagcttttccataaacttttcctatttcttactcccaagtttgtcaaaaaacaccagtctttgactttttctctaaatgaaaaccccatagaatctaagttccaagcccaaaatttatttgcaaaagaaaggaggaaggaatgaaggaagaaggaaggaaatacatattatgtctatttaatatacactatgcacttctttaatatattacttattacatatggatgcatttttatctgttcattcaagaaaggatatgtcaaatgcctttgcttgggaacacctacgttcagtttgctccaaacatgtacctggttttcaaacgtcccacactcctgcttcacagggaaagatttgccattatgcttagtggtgggaatctatgcaaatggttccacatgccaatgccaagccaaaagagaaagacaagcctttgttccagaagacacagccctttacagccctttgaatccattcctctgggagcttccccatgggaggactgcttctttctgtgacccagcctcactaaatgcactaggaatcagcgcacttcactaaatattacatctagatcatgtgtgtatttactataattatgcatatttcatctgaactaattttcagaaaccctttccttagcaaatcgcacattttacgaaatgtcagtgtttcctaccaaccaccatgaaaacaacaacaaaagctgaaacatagcaggaactcaaatcgcagagtatttcaaatagataattagactgaattctaaagttctctaactaccatatatgtaatattaaaaaggtcattaaattgttggtgtgacagggttagttaaacataggcctagcagccagtaaagatgctgagtgcagtgacaaagaacggtgaacggaggacctgtttgtgaaggatgaggattttcctgcattcaccgttgagaagtcagtcttcataggatggtgctgagtaggactagatagatttaatcaccatcacaggaacaaactcactaattatagtagcagtgacacaggacaggtgagacccacaactggggcttagctgaggagggttcttgactttgcccaggaaggaactgaggggtaagtcagtggtgttaaaaagcaatgtttactgaagtggcggtgtacagcagcagcagcgctgccccgtaggcagtgtgccagggcagcagctcagaggcagcattgcatccatatttatacccacttttaatttcatggggtggattatgaagaaatttctagaaaagggtcaccaagttgttgtcgtgaaaaggggcagtaactcccaagtgttgccatggcaatgggaaactgacacagcaccctggtgggtgtgtcatatggaaagctgcttccagcccagccctattttagctagtcctcaatttggtccagtgcctgagccccacctccagagttgacttccaccttctacatcagtaagacaaagaaagtcgcaaagttggaagaatatacagagagagataaaagctgtattcaggaagtagatcctttataaaatccactagaaaatacaactgacttagtaatagccaatgacaaaacactgcatgtgcagaaattcaggactttatacaagtaataatgagtgaggacgcaaggcagccctggccaggacgatgaggggcagagatgatacagggaccagctatggctcttcggaccctgaccaaggaaggaaagctacagatgagtaaacagagttgactccatgagctcagcagaaatagggtgtttgtttatgtgtttgcagttttcaccagttcttagtgagaagttaggagttacagtgtgcactcctctgctatttatagtctgatatattaatacaggagctgtcttggccaagctcttcctctctacagatgctgtcccttaaacactttccaacatccaatgagcacttatacaaagattgctttttatttcatttaccgccttctcagctgtttatgagtcaaactgtttcctggtactgttgctgtaggtgtatattggacattactcaggatctgaagcatatacaatatccccaagcttaaattagtcattgtttcacttgtcaaattcaattaacatcatatgccaattgcataccatgaatcatttagtaaacactgtctagaaatattaacataaatcctgtgttttacttaacactatgttgaattctgttcataagtttgttgtttgcaacagtttaagttttagtcaatttcaaaattcttttgaatgtactatgtgtgtgtactatgggataaaagaaataaattaatatattgatgtttacggtaatgtgggttctcactatgggaaaaggtagatatgaatactgaaaggggaaaggcaatagataattctatggtattcctgaagttatatgaatgaactcattaatgcacacagacacacatacacatattctaccatatagtaaaatggtctagaagcaaaaacattggtagcaacgtttatgtctaaatgtaacagccagatcctagggtttggtaaatagaagatgaacctggaacttctgtgccaaaaagcaaggactcaaagaccaatgtggacatatcaaaactatgtaggagctgatttaaaggggttcatttttctcaaactgttctttaaagaagaatgctaaatggcaaatgtaaacaaacaatataattataaatctttctggttttttggaaaccacaaatgcaattatttatttgggcagaaatagaaatgaatccttaaaaagaccgttgaagaatagcatcttgacatggtctgaaagcagtatcccacatcttgtctactaattgcataagaaaaaggcaaccttgaaacaggggcgatgtccttttgagtatgaaactcacaagggagagactttatcagatcagatgctagtggggatcacaaacgccaccagatgagctggcgttctgtgttgctgatgggatgtaatgtaaagtacacaccctctaggaaacggtcttgccacacatgcttcacctgaacataccatgaggaaaacggcaggacaaatccagattctgagacatcccaaaaaaggactggcctgacgtctttaagtatgtcagagttgagacagacaaaaagtggcaggaagttgtggctgacatgaccagaccgccaaatgcaacgtgtgggcttcacctcaaccgggagaagaaaaacagatgtccacagaagacgttcggagatggatgggaagatgtgcacaagggctgcccatgaaataatatcactgagtcaacgtacaggcatggtgatggaacaggatgactttgcatttaagagatgcacgctggctggacacagtagatcacgcctttaatcccagcactttgggaggccaaggtgggcagatcacgaggtcaggagatcgagaccatcccggctaacacagtgaaaccccgtctctactaaaaatacaaaaaattacccgagtgttgtggcatgcatctgtagtcccagctactcgggaggctgaggcaggagaatggtgtgaacctgggaggcagagcttgcagtgagccgagactgcaccactgtgctccagcctgggcaacagagtgagactctgtctaaaaaaaaagagatgcacactacaactttcaaacaaatccaccaacacacacgcacacacggacgtgcacactcacatacatacacacatgtatcatgttttgtgtgagtgcggggtgtgtgtagcatgggtatttgtgtgtgagaaggaaggcaagtgggtcaaaagataaagaaatggtgcatagagtaaatcactgcggtactgtactagtctttcaagttttctacagtctcacaattaaaaaaaaaaaggtggagaaaaattttcctggagagagaaactaaacaaccagaagtttctgatgattgaattaaatcgtttttcagtatgccaagcctctgagcagctggattttccacactttagtttgttgccctggggcctcccagtcttgcttccataactcaacagaattctaccaccaattgttgaatccaaagtttcgttccaaagtctctgaaagcagaaactgtgttccagatacagagaatcaaaatgcgctactgaagtcatccagaatatcagtagccaagacatgatcagagagacctatgaatctaagccagttttctgatttttaagccaaattgtttatctccattcaacactctcaatacttgtatctacaaacatattggactaatgcagagagcacatttccacactggaacagttgaatagggatgtgaaaactcgaatatctttgcaaccttcaaacaacacttgacattaaaaatccatttacaaatccagctttatgctaaatattgtggtaacattcttaaagaccagacctcttcatgtggaaaatgatgtcccagtctaaagttttttgaaaggatttgctatgaaactgataataattttataggtattcatgtctatacaattactaggactttttttacacagaatacctaagtttctcctaccttattgaagattcttattaaaataccacatattaaaaaagataaagtaacacaaaaagtcacaaaagaattgaagtttacttttttgctttatttggcccaacacagtgtcttctagaagtccttgtcatcacaaaaatataaagcttcctttggatatgcactccccaacctgaattgtaagcactttgaagacagtaattaggtcttccatcacactttagataatgtcctaggccgggcgcagtggctcatgtgtataatcccagcactttgggagtctaagacaggaggatcacttgagctaagacaggaggatcacttgagccccggagttcaagatcagcttcagaaacatagtgagacccccatctttacaaaattaaaaaaaaaaaagctgagtatcgtggtttacacctgtggtgccagctactcgggaggctgaggtagggaggtcaaggcggcagtgagccatggtcgcgccactgcactccaccctgcacaacagagcaagagcctgtctcaaagaaaagaaaacacaccatgacgtcctgcatatatctgcctctcagagaactgattcaccgatttcatcgtttaaaaccaatgcaatactttcattttcatgaaaatggaagcaggctttcatgaaaacagtcttcaagttcatgttacacaaatcctacagaaattgtggacaaatgatctgacatcctcctataaaaggatgagaagaagctgtgcctcatgtaactgatcatttctatgtattaagccatatgaaatatcatgtctttgctgagcagaggctacaattagaaaagacccgatctaaaagaatgctcaaaggtcatcaagcatgattacattctgctgcacactgtaaaatgcatccaagtgtaaaggattattcaacaaattatgaatgattcattcatggcagatttttcattagaaggtaatgtctcctttcccataaagtcaacattatgatccaggatgccatttattagaacttatgctattaaacaagatatgaaaagagaatcttcttaagtgtctcacatcagttaaattaccctccacctgttggaaataagcactgtggtcaatgaagggagagggatatgtagtacatgtgttacaggatttgcaagagttatgcttatgtatatgtatacatgtacacaattttcattactgatctttcacttatgtctgaaagtcaaatacttactccttttgcttaaaattttggactctaaattatcccaggatcggtagttaccccaggacagcgtagtagttattaaaaagtcaattagatcccatttgtcaattttggcttttgttgccattgtttttggtgttttagacatgaagtccttgccctgcctatgtcctgaatagtaatgcctaggttttcttctagggtttttatggttttaggtctaacgtttaagtctttaatccatcttgaattgatttttgtataaggtgtaaggaagggatccagtttcagctttctacatatggctaaccagttttcccagcaccatttattaaatagggaatcctttccccattgcttgtttttctcaggtttgtcaaagatcagatagttgtagatatgtggcattatttctgagggctctgttctgttccattgatctatatctctgttttggtaccagtaccatgctgttttggttactgtagccttgtagtatagtttgaagtcaggtagcgtgatgcctccagctttgttcttttggctcaggattgacttggcgatgcgggctcttttttggttccatatgaactttaaagtattgttttccaattctgtgaagaaagtcattggtagcttgatggggatggcattgaatctgtaaattaccttgggcagtatggccattttcacgatattgattcttcctacccatgagcatggaatgttcttccatttgtttgtatcctcttttatttccttgagcagtggtttgtagttctcctcgaagaggtccttcacatcccttgtaagttggattcctaggtattttattctctttgaagcaattgtgaatgggagttcactcatgatttggctctctgtttgtctgttgttggtgtataagaatgcttgtgatttttgtacattgattttgtatcctgaatattttcacaacctactcgtctgaaaaagggctaatatccagaatctacaatgaactcaaacaaatttacaagaaaaaaacaaacaaccctatcaaaaagtgggcgaaggacatgaacagacacttctcaaaagaagacatttatgcagccaaaaaacacatgaaaaaatgctcaccatcactggccatcagagaaatgcaaatcaaaaccacaatgagataccatctcacaccagttagaacggcaatcattaaaaagtcaagaaacaacaggtgctggagaggatgtggagaaataggaacacttttacactgttggtgggattgtaaactagttcaaccattgtggaagtcagtgtggcgattcctcagggatctagaactagaaataccatttgacccaggcatcccattactgggtatatacccaaaggactataaatcatgctgctataaagacacatgcacacgtatgtttattgcggcattattcacaatagcaaaaacttggaaccaacccaaatgtccaacaatgatagactggattaaggaaatgtggcacatatacaccatggaatactatgcagccataaaaaatgatgagttcatgtcctttgtagggacatggatgaaactggaaatcatcattctcagtaaactatcgcaagaacaaaaaaccaaacaccgcatattcttactcataggtgggaattgaataatgagaacacatggacacaggaaggggaacatcacactctggggactgttgtggggtggggggaggcgggagggatagcactgggaaatatacctaatgctagatgacgagttagtgggtgcagcgcaccagcaaggcacatgtatacatatgtaactaacctgcacattgtgcacatgtaccctaaaacttaaagtataataataataaataaatacattaaaataaataaataaataaaaatttgacatgtttccaaagaaaaaaaaaaaaagtcaaatgagattttaaaatatttcccaagtgttatctgagagatcactttgagagaaggaaagcaagcggtgtttgtcatgagcttcgtccaaatcagaggccttgagtgttcggaggatcatctaaacccatgaaaaaaatcagctggcaggagcccatatgggtcaagatggcttctggagatagataaaagcggatgtctgaagtagactccctacttcccagctgtaactggcagtagagtaatcttgctaggaccaaatatcctttggtactgcatacatcaatagcactagctaaaaagattgatctgagttatccatttattttagagtttaaaatacactctccacagcatcttttttccactgggaatccagagatgttttacttcccgtctctataaaaagccgcctcacaatttacagggccactgcccactcttcatactttaaaagatatagataggaattcagaagaataagaatccctccttatttgcagatcaaatttacccttcagcaaacttcatgggctgacacattacccttgagcagggggtatagatatacaatcattaagaataatcaccaaatatttcaatttacttgatttaacaagcttttaaaatccattgcaagggggtaaaatttgattaataaactgcaggccacataaggatcttgtacaaggtgacttatttaactgactccacagaaaagtcaacaagcaatccattgatcacaacatgcaaacaattcctacttgagtgtcccactggcttagcggcagatttgggtctcaattgctgatcaatttctgcattatgattctggcatgaaacagctctctaggaaagggacgacatcataaagatgtgtataagagaaagaagatggctgagccctggcctcacggactttttgtcacgcccttttcaatcagctagaatccaatctgataatcatttactgtgtcttaagggacgagagcacgtgtgtacattagatcctgtatacgtttacgctgcacatttagattgagtgtgtactgtgtgcctgtcactaccataagtcactatgggttcagagataaaacaaatagctctatgtaaggtgctcacagtctagacaggcagagaataggaaatatagaacagcaatacactgaaataagtgaaattgcagagatatgcacaggcgtgaaagtcatttagagggtggagaacataggggagttttgagttgactgatggagctgaaatatgggcaaatgttggaaaggaatactttgcaccagactgcaaagatcaaataataacaaattcagggatgtgtgttttagtctgcttatattgcagagggactgaaggatttttaactgaatgacagcatccattccaaacttcatcagacaacaggatagaaggcagagtttcagctcagtgaagtatgttttatcaaactgtccaggatggtttctgagtaacacataaaaatgtaaatcactgtgggaaagcagctgtaattcacgatgacataaaaaccactttaaatcataaacacaaagcagggaaagaaaaagcttcttaaagtgggaagggagagaaagtggggcttaaaatagataatgaagaatgattttaaatcttgttatgctggcacgtaaatggttttgcatcagacaattctagagaaaggtatgtgattccaagtgggagtcatgttcaggatgagatacccaagcagtctgacatatgcttgcagtctactaggcgtaggctttcgccgaagggcctaagcctaggggaggcttaatcacagatcccacgctgtggccctttccctgcatcctggccatgtgaactatagtaaaagtgaaattgtatgagactgcgagaaagacctatgcatttccaagccaagtctccctcagcaggtggggaaaattggggggaaggtacagaccatgtccctgtaaaggctgctcagtaactcctatgctctgaccagctcttgagatggtgtcagaacctgttgatttccttctccactgcagcttgattcatccacactaatgcagttctgcacgaacaacagcctcaagatggaatcccaacacaggttccaggctccatcctttctggagtcaggtttgaggacaagccttttacctctatgcacagagagaaacatctgagtgaatgcaactgatggaaatcaaatatttaaaagtaaacatttttgggccgatgtggtggctcatgcctataatcccagcactttgggaggctgagatgggtggattgcctgaggtcaggagttcaggaccagcctggccaacgtggggaaaccttgtctctactaaaaatacaaaattagccaggcatgatggcacacacctgtaatcccagctaattgggaggctgaggcaggagaattgcttgaacctgggagacagagcttgcagtgagccaagatcacgctgttgcactccagtctgggcgacaagagtgaaacattttcattaacatttcaaattttaaaaatgagtatgattgggccgggcgcagtggctcacgcctgtaatgccagcactttgggaggccgaggcgggtggatcatgaggtcaggagatcaagaccatcctggctaacatggtgaaaccctgtctccactaaaaaaaattagccaggcgtggtggccagcgccagttgtcccagctacttgggaggctgagacaggagaatggttgtgaagccgggaggtggagcttgcagtgagccgagaacgcgccactgcactccagcctgggctacagagcgagactccatctcaaaaaaaaaaagagtatgatcacattaaaaagaagtaaacatttcagcttagagcatactacatttttaaaattaaatgcttcccctagttttcaatattatacatgaatgtatttgcttcatttttacaaacacatggcaggtatacatgaagctgtggctgctcagtcaatgccaagcaaaaggcctgaagtcctaaccttgaaatgcccaatgatgagttaataaagtcagcaacattaacatgtgctcttttacagccaaataaccaaccacaaccaaaagagtatttaatatttgctttcatttataaggtaaccagtgcattacaaaaaagttaaaaagcctacgattctctgaataacttggaactcctataagcaacacttgacaaattagcaacatgggcgtggaggtgtcctggcctttgaacacgaagatgatgatgtcttccttgtcatgctgccagtctagagcacacatagacttgcgtttctaattatgataataactcatctggccacatccacagatcatcccattgcatttgtgaccaacagcacacacgttcaaaatagctggttgaaatgaggtatgcctattggttatggaataagcacagggaagtgaactaatcagatagatattatagtagtaagtgagggtgaatttctacttcagaatagataccttcaaagatttcctttaacaagttcttgtggatcctggtagacccaaagaaaaagcacactttttcttcttagaaaggaagtgaagataccttattagttatgagaaaatatgacagactttgttccaaagcactgcaggaagtgctcggtaatcctgcaattggcacaaagtctacagggctttaaatcaaggggcctcgggatgatcagggaaaggactgtgaataagctgccaacctgtgttttgccttgaaggctgggcagggctgtcaggtactcagacattttctctcacctccaaactcttccacactctgctctggatgctatagacacaactgtgccaactacttttcccaaaatgttttgccagctggatttggtgagctgtcaacaggaggcaggaattcacaatgcaggagaagaggcaagggaacttccttattcctgtctgcttgcggtttgtgtcagcaaaatcacatgagctcaagttccccagcagtggcgcgctgtcccagaagcagctgttttttcccctcctctggcttcttttgccacttccaagaacagtttatcttgcccctctaaggagccagtggcaagcgggtctttaggtaagaagccttgaaggaagggagaagggctgctttctctgggaggggagaatcagagagatttggaaattcaaaatcagctttgtctgaatctatttagatgactccagtctcagggtccaatatcttgccaatcactctgactttcacacacaaggctgtttgaaggttcttgaacttaattgtaattctgtaacattttggatgttattttctgcaactcagccctatgactaagaggggagaaagttatcattatctttttagttcttcaggccaaaatagaagttctctgttttgttgttgttgttcttgttgttatttcaggtagggtcttgctctgtcatccagactggagctcagtggcgagactgtggctcactgcagcctcaacttctcaggctccagtgatcctcccacatcgacgagtaactgggaccacaagcacacccagctaatttttatatttttttgcagagacaaggtttcaccctgttgctaaggctggtatggaactcctgggctcaagcaattctcctgcttcatcctcccaaagcattgggattataggcgtgagccactgtgcttggcccatttattttttataaaaagtatcccgagtttatgatttcctatcactagacttctagccatttaaccccatagtccttgtcatcatcatttctatcatcacaggtaggtattgcaaggactttcacctaataggacaaccatgagctggagtaagggaaacatacatttctgctcaggattatcagctctgaactgcaaccaattcatggtaactaaaactccatgttggtcaccaaagtggaggcttttggtggtaaggtgataaatggatgaggcccacgtctattttacggagattgcagaaggttcagaaatgcatcacttggttatttttctagttcctgaatatgtaattagaacagacatttgcagcaactggcagaattcctgcatgtctctctgccccctggtgtgagcgatattaaaccagagccaggaggcttctaaaatatgaccttcctaccagaggatgttaatattgctgggggaagggcaacgattaatatctctgtcaaagatttgaaaaaggcaagtctcatctacttactccatactcatttaactcacctgtttggcccatgcacaaagcagttggacttagagaataattgtgaattaccataaatttacttagcttgtgattgcaattgcagctgctcttccagatatgatattttcactggaacaaataaacacagctcctggcatctggcagtttacaccttttgatcaggcaaattaattcatagcaactttcaaggatcaccaaaagccatttgcttttgcttggtcgggtccacatagcacctgcacttttctctgggtgatgtcaactctcctgctctttgtcctgactacatttgcagaaatgttgatcatgcttacctcaaactaactatactgacaacatgtaccacacagaccagatgaacagaaaatagcaaataccttaaatgtctgaataagatgtatgccaacccgtggaaaataaagcccatgaaaatgtaggcaccatcattttagtgaagttcttgggggttgaatgcttccgagcatgtgaggatataccctccaagttaaaaggtgagtttctggaaattgcaatgtgcttaccactaaaaaagaaggacagtacttgatgggcctccttgggcttatatgtcacttgtactgctttcacccatttatcaagaaatgtgtaaggctaccagttttgattggagtcttgggcaagagaggactgctgcagattcagatggcagtgcaagctgctttgccttatgacaagggccttatgatccaacagatacaattatatgtcaatgtctatgacaaacagaggttctgttgtggttagctgctgggtcctgatacagactaaacacctcattctatgaacataaagaaaccatgtggggtggccatgatgaaggggatgagagctggcctgctgcatctctgctggctcagctcatacctgtggactcctaggagagagaattttgaccaaatcacataggaatgaaaaacctcaggccttatttacagatgagcagtacaatatactgtcactaaaacactggttgatgcagcatgtggttatttacttggtcaagattgagacagaagtataggaaacagtgattatttggtgatcattaggggtctggttggaaggtaaggggcttggaaagaatgggattagaaggctgaaaacaaattgttcttactgaatcctcaaaactgagtctccagtgtgaagatatctgcactccatagaaatgctctctcaagggggttcactgcagaggaggctgtcagtaatcgggccaacaagacgacatgccctgtgaatgtcatggagcctctttcctcagcctctcctatttaccagatgaatcctgtggcaaagacagagctatgcttgggcagcatacaacctcctctcgccaaggctgatctgctaccaacactcctgtgtgctcatctcctgcagcagtgagtgctcagcatggaacagggcacagttctcccagaaggggcctcttaggagtgggttgattactttggacccttacattatgcaggaggcagcaaacggtcctcgctggaaaaggcatttattttgggtatggattcatcattcctgtctgccttgtttctagaaaaatcattgtccacaggtttatagaatatcctagtcacgatatggcactcacacacatgcttcagaacaatgaactcattttgctgcaaaggaagtatggcaatgggatcatgtctgttgatttttctcatattatcaagtctcccagaagcagctgggctgatggactgctgactgacctagaaaagccttagtggtggtgtcagtaggtgacaacatttggatagcctggggctcaatctgttctatctatctatctatctatctatctatctatctatctatctctgatatatatttgaattcttatatatgcgctgacccagcaaccaatatatggtgctgcttctctcactgccagaaaacacacctgcagaatcaactggatgatgtgggagtggctgctttcactactatatctaataacccattcacagaatgtttcattcgtgtcttctcagctctgggctctgctggtttaaatgtcttcgtacccaagagggcaaggtttccaccaggagaaacaaaaatagttaaaaaaaaaaaaaaaagttgagactggtacttgcccattttgagttccttaaacactgaagtaacaagaaaaaacgggggatactatgttgcctgggatgctggtcacaatttctagggaaaaactgaattgctactacacagtagtgagggagagaaatggatctcatttacaggggaattcctgtggcagctcatggtatttccatgtccaaaagtacaagttaatgaaaactatggcaaccaataaagattaaactgttgggtatttagagctttcaggaatgaagatttgggtcacattatacaatgggaaaaaaaggcaacctccaaacagattatggctgaaggaaaaggtaatagaagaggaactgtagaaaagagatgttataaacaaatataaacttatcagttatatgaatacagtgtaaatataggtatgtatatggtaactaatatttcatttcttctttaccgccactagttacttatatgtttgtaattttgtggttaactttatcatttaagttattctttaggttataagattctgttgcaagtaagaagaaactacaagagaaattaacatcttttagacaaggatagtatgatggttggaaattgtgtcttccattgctcaggagaggccaagagagtgtttgaacgaatagttattttttattaggtatacccatggagtatttactgttatgaaaaggaagtttgagtatgtgcaaagcagtatatgttctgaaaagatatggtcagtgtggacccaaagggttggtcaatatgaattacttaactattgtttctaacatcaaaaccctccatttgtattctattctctaatgttttgacattaaattactcaaaactcttaacagctagtttcttgttagactataccgagaggaggcactagagggagactggaaaacaagaggaagggagaaggggcttttcttcttcctgttgagttgattgccctgtaagtatcactctggcagcagcacacaacccgagcaacaattgcttctcccagaagcagcacttagtccaagcaccagctgttgtttccagcctctagttagttttaagcaaggagaactagcctcatcatgccattttgatgatccaaacccagctccgagaaaagtcccatctgtgagctttcagattctgacaaacctactctcttccacttcctttcaccaacaccagggctggtgggagcttcttactgttagcatgtctcaattcccttaatatttcatttttgcttttcagttttctaactctgtgtaatgaattctctacttaaaatttcctctgcaaaaaaccagtgggatctgtctttccctcgctgggaaagggacagagcagggttttaatcagtgaggttgggagttcactacactacattaagtacaaagttgtaaagagcctaagccagggatgaataacagcagacattaagcaagaaaagcccattgagctggaatctgatttgaaatgcaattgaaaagggagaaaatcaaagataaccgcaggctctgtggctgggtgaatggagtatgaacgttgaggttgtgggtgtggctgggagacattgaatttgaggtgtctggggagcataaagatgaacattttcacaagcaagtgagaactgtctaacatccaagaaaatgccacgggattaaaaataaagacttgaggagaatctgcagataagtctatttcactctgagggagtataagacagctggataggagagttttgagaaggaaaaggcagacgccaagaagtaaccttcgggaccatccatgtttcgggtgctgaggagcatggcaagtcagccagaacaattaatcagggttagtcatggaagaatgactaagaaggaatgaaatccctcagtcaagtgtcaaagaagtcagggaagtcttagaaagtgggagcctggagaggaagtcagggtcagtggtgccaaatgcttgcataggaagctctgccggcatcaagtacgattattatagaaagtgaggaattctctcaaatgccaccttccaacctgccagctgtcctgtgggaatgtgacacgtagtcctcagttctgatttaataagaatgacactaacagttagcaaacatagaaacgggaaaaacgctgccaacatcgtgtagcacatccctaaatacagcccatagggactgtctccacatgcttcagaatccagccccggagctccacgaataactgcatgtgagtccacgggcggcaccacacctcagagggagaaacacagccccccttacattctcaaggaggcgctgcttttgatcttttattttcctttgagttcttcactggcgcagaactttgttctatttgattgcaacatgtaaatattatcatcatgtcttcctttattagggacaatatttttttccctacaaaagacttgagctgaaagacataaaacactgtttcagtttcaggaattctagggaggattagaagaaagggttagaacacgattacccctgtggaaatctagggaaaagatcccatacctattttcttgtctttacccacccaactactcacaacccgtcacttatacacaaacaaatagtcactgtgcaacacatcttctatttctggtaacgtaccatggccaaagtcataaaagggtcaattattgaacctggtagagctggtggcaattttcaaacagaggcacaactcacatttaaagatgatacatggcaggtactcaataagtatttgttgaatgaaggtgtaaatggctgtttgatggctaagacatgtcttgtctaggtttgtgactccgttacagttggagggtgaattgctgtatttaaaacgggtagagaactgtcagagatattacctgctacgaagatcgtcagatctattagatatggatgatgtttcattgccagaaacagcttcacctaaaaattagcagccacagaagcagggcttctgtagattatgatgtctaacagatcaactccatatatgatacatggttgcaaatttgagcaacataataatatttttgggtgcctattaactgttttaacactgtgaaaaagcacagtgggagataaaggaagaaacaatggctgtgctatatgcatgcttatcactgcagaaacaaagaccgagacacagagttctcattctcattcccaatgggaagcagcactaaacacagagttctgcatgtggacgtgctatcagggcttagccagtggtacctggtcatttctgaactcatgaaatagatgatgcattaatatactgaaatttgtttttctaaagccctcaaggattgttacttatcctttaaccgtggctgcctaaaactggcttaattggtttcgattgatttaacaacccttcttcacttagtttatcgttatttaggaaaaggtcaaattatgtggtcattgttgccatggttcattttggaatagcaaagtcacacattttcacaagttttctcattgacaaattaaataaatgtccatttttagcaaggtttctcattgtgaggagcccctcctctcctctaggctccaaaccacatttaatcctcctgcagaccagctaccaaatgtttatttctcctgagcttttgcagctactcttggtccaccttgagttaaaattagaatttctctggatctatcaagaaatatctctcttctatgccccagtgtctgttcaaccaacagtctcctcttttactctaattcattttcctgtttgtttgtttgtttgtttgtttgcttttccctaggaagtatgagcattcccttgtttaatattttcctcatgttacattttacactttcccatgttctctcactgaactgcactttgcatttattcagttaaatgtagattgcttccagtacatactgtgacataacatgtttaataactgaaatccagaacagatattatctgcaccaatgtagtgtcacattcaattacaagctcccagttcttttcctttttacattattgatttctaaaccaataaaatggatacttattcaaagccagaaggatttcaagaaatatattgaaataactgtcagataatcttggtgaactttgtaacaaaatcaattatacaatgttcgtaccaagttgcaaaggcaaggcacgctgccgctgtgactacctgcctaatgcactcaatgccaaatgacttttctcccagacacaacatgaaaagcctgttactcaaaaggtgctagtctaccaactcaacttttgctttccaaatataatgcttttcattgctgtctagcaaaaaggagctaaagagtgagaaagatgagttaaaaatgcaaaccaaaggaaacttaaagacccaaaggttcaaaaatcagtaggcatactaaaataacattatttctcttctttgctatgtttctctagaagtagtgaaataagtgagtaccttataccataatttcacatcccaggaatcaatggccaagtatagccatagaaagagttgcggtgaaaaaactgaggaatcaaatgagaaaagaaacattgtaataaaatgtgcatcgttgagtcatagggaaaatctgccttcaaaacttttcctagaaattataaaaactgcccattactttgaataacacattgtaattttaaaatacttcactacataaaaaggcaaattaaaagaatcctttgattgttccatccctatggagccttatgaatcccataatccttgagaggtatctttactggcatacttataaatacacaattaaaatatacaatgaaaatccagtaggtattcatcccttcacttgcgggactccagctatggcagtatgagagctctgtactcctcacctcttcacactatttcttctgcatgatacaactcttctacttcagccctacttctcttgttaagaatgtttactcaactgagaggtcacatcctcagtgagacttcttattgccaaaaaactccactgggctcccttatgcttatttcctccagaactttctgctttccttccctcagctttactgcagtaactactgaatgtcttcagtgctagagtgtgggcctcctgagggcaagagccatgtctcttctgttcacaacagcattgccagtaccttactcaatgcctatcacataacagaaaatatgtagatgtcaaattagtaaatgaaagtgtgaagtggatggtaaaaagtcatcatagtaaatcactaaaggggttcctttacctgttttgcatatatttgtgtttttaaggggtcatacagcctgaagatacactatatatatttgactacagataatgcatcaaagcattggatttttatggtagaagaacaacatctagatcatagtatgtggcaaaaagtgagagagatgggaaagaggccaaacgtagacagcatctgtaagccatagcaccagccgactgtacaatctcacaccttactataggagagaaagcaagtccacattatcttttcagtagtgcatttatactacaagtatcctgataagaaaagttgtcttgggccctgttattttctgaatgtatgtatacctcccaaaatttatatatggaaacctaatccccaatgtgatagcattaagggtgggggcctttgggaagtgattaggtcacaagggcagagccctcatggatgggattagggcccttataaaagaggccccagagagctgcctcgcctcttccaccataagaggttgcataaagaaggtgcccatctatgagaaactcctcagaagacacctaatctgctggacaccttgatcttgaagttccagcctccagaactttgagaaagaattgctgctgtttctaagccacccaatttgtgacattcttttattagcagtctgaggtgactaacaagccctaattcacttaaatggtaaatgaatgctttaaaatgtacactcaaccaacattttgagaatcatctaaaggataacatcatatagggactgatcaaagggttttatgatcctaatgaatgtgaaaccacaggctacaaaaattctcaagagcaaaaattcctgatcagattttatcagaatttactgggtagctttatattaagtacttcatcatcattaatataccttaggtttcttaaatgagctttaattttatttacaatagataacattttgttggcatctacaaattctgggaaatattagagaaagtaacatgaatacagctttaattaaataaagattcaaatataaataagtgtttgcaactggtataaaatgtcatctttgtggaagcattttatcagcttaacattttgctgctactaacatagatgaggcagaactaatatggccagaagcaaggagaaacatgcatggaataagtgctgtaaatttttttctagagctatatattccttagtcagcatgcaaggaaaatggtaaacaaacaaggatgctaaataagaaaaacttggaacgttcctcaatgtaccaaacagagtgtgaatatgccacttcattagagggtggagcattctaattttataaaataaagttaaatatactaatttcattttcaaatatttaacactttactataaaatacttttcctgatgtgaggactgattcacagaactgcataaggttatttataatgttttataaatattatttgaaatgatatataatggcctacttcttaaattatagagtaaatatatacagtaagtccaaaactatttttacaacatctgagaaacaaattttcccctgtagagtgtttacactgaggaaaaaacagctagattatagaagttaaaaatatacgaaaataggaaataatatgtactaattaaagtaagaaaaaaatgagccttacagtctcagaggctttagaattgaggagtagagaatgaagcttgcttctcaattagctttggaaaaataataaagaacaaaacagctctccaacacaaggctccatcttattgtacagaccctaccaaacgaagaatgatctttctggcccccaaatacaggaatctaccactctgcagcctgtcctcacttctcttctgccccactgccccacaaacacctttcgaatgcccacaaatgcctctcacctcagaaatccttttttgtcttgatactgcttcttaaatagaaatatcttgttttagtcaaacccattcatttcatctatcacacaacagaaggtttctatttttagaggtcaaaaatctcagtgataacccaataaaatcaaacctcttcacgggtaacaactgtatacacacacacacacacggacacgtaattttgcatgcatttcaaggtttacagagcaggtccaggtctgatgttaaatcaatgtgcatcagaatggctcgaatgccagtaaaatatggccagggtccattttgattggctgtagtgtgcattcacattgggaggtgcccaggaacaaccagttgataaatatttagaatagcactctctctggggacatggatcccaacctagatagtagcagtaggaaatcaatgcactgctacatctatggtgactatccatcatacaggaagctatgtatgatacatactgaatgcaatttatattttgcagccaggaagagtctcacttctaggtttaccactcacttgctgtgtgatacaaggacatttatttcttcctaaacttaaattttcttatctgtaaaatggagataaataatatttttgtcacaggattagataaagaataatatgaaaagtatctagtgtctggtaaaaaatggatcctcaccaaatagatgatataatgacaaggacaacaatgctgaaatgtttatcatttagataatcttaacagctcaaccctcccttttgctctacgatgcccgagttcaaaatacttttcttaaaatttatatttcattcacaatcatttctatttcaaaatccttcctttccctgaaaatcacagcttcatggcattcattaatgatgaggcaattcccaccaccatgacagccttggtcatgaactacttgcagattcagcttaataatgactgactgagaatgcatcagatgctaggcattatatacacagaaattttaggagatcacatgatgacaccctctaaacaggagcctgaggaacagcagcttcaagtgagaaacttttcacagggcaaataacatctaaaataccaaccagaatacacagtaatgcaataatggccaaatgaattttagttgtataatgttctctcttttcacattgttttcatagcacacatttccaggtttctataaaaatcagccaatgatgaaaagcaacatttgttatcttagtttatattagtaactcgatttcccctaggactgctatagatgtggaaggggtttgggactgaattaatgaagctatttggataacagctgaaataagatccaggaatgaaataatgtatctataaatctttttctgtgtctttagattctgcaatcccttgagctactttcttggtacctggaggagaaaatgattattttaattttaaaaagccagtaggtgtaaatatatgctgagccttagaaacaagccttaaatttttccaaagatacttcatatatttcagatacaaaaatgtaagattttttgcactgccaatcttctaataaagacttaaagaaaagagaacatttaaaaatgtttattcatcatccatttcttcagcaaatgtaaaggtagagtctacaatctataggatcctatatggggtggggttggcaagtgcttcagtcatggtctgtgccttcaaggacatcacgggctgggcatggagtgtggacttgcacaccaacaccgccgacgtgtggtgatggttaactgatcacttacagataacatgccatgacagctcataggataaagcattacatagagctgggttttgttaccgaagaatgaggtttgagttgacccctgaagatgggaaggagtggacacagagaggagaaagaacatcatatgcagtgggaacaaacatttctgaaggtaacaaattctgctgagaagtgactgatgtgaaactttgggaagtagtcgtgaaaaggcagattggtgttggattgcagattcatactctgggtcatgacggctgggctctatttaagaaaccctcattgtttttacagtgcctgacatatgctacctgctgaataaaaatgtgaggaatgaaatggccagagcttcacctcgaccacggacaggccataccagaggcagcaaggcacacaatagaatactctgcattcagagtctcctcctaataattagcatgaccttgggtatatgcagtatcttgtctgagaaggaatatttcaatctacacgatggacataataactatcttatctaacggggtgtttgtgaggttcaaatgcaatcatcactgttgaaatgtactggaataataacgacgttgtaactagcacagaagagaccagtatgacatctattaattattccaataagaggtggtgaccacctgaagtggaaatggggaggcagggtctggtgtcaggggtaaaggacagttcaaagttgaaggcaacagggccaggactccagggcatctctatctctgaaatctactctgataagtgctgtggacaaaaatcaagcagagcggtgggatggcgggttataagagggtgggcagagaaaccatcttagaggagacggcttagagctgagatttaaaggaatgaacgccttccaggcagaaagaacagaatgtacaaaggtcctgatgcaggagctcagtaacgatactgagtgaacagtctagaagctcatttggccacagcaccgtggccattgtcggggcagcagaacatgtgcttggagagatggccacaatcacatcaggacagtcccatgggcacagtggacttagggttttactgtgaatgtgatgggcaggcagatggtttgtgtctgaaaaatgttagaaggatcactctggctgctgtgtgagaatcagctgagaacattctagacattgaagactgataggaataggactgggcaggaggctgctgcctggaggcaccatgagggatgatggtgtttgaacaagagaatagaagtgagggatctgtgaagtgatcggattcaaggtctagctggaggtagcgtcagcaacgctgctgatggattagatgggggcctgtataagaaagacaggagtcagataggacttgaagatatttgtccttagcaactgagagagcagtggtgctgtgctctggggtaatggtctcttcagggaagggcaggtttggcaggaagtatttagagttctatttgggacatgtaatatttgagatgctagttccccatcctactatccaatgggtagctgaatatacaaggatggagaaagggagagaaatagggctggaaatatcaattttgtagtcatccatgtataatatcacagaaagccatgggcacgaatgacaataatttaaaaggtataataatagagaagagttttaaaatgagatatgggtgctcagttcttgggttgctgggaagatgaggaagagtcgtcagggcagccaaagagaagtggcccatgtggccggtgtgcattcggcggactctgatgtcccagaagtcatgaaagaaaatgaccatgtcatttggggatgtgaggattcttggagtcgttttgaagagtggtaggaggaaatgacaggctagagtgggaggtgagcatggagagatgctgagcctagatattttttgaggcatttttagtagaaaaagaaagagagaatttgggtagtagatggtaagtgtgaagaaatatggaaggttatttacgaaataatgtaacttgggagatgctacaacaagattctgtctgatacgaatgaattacccagtatacgtcctcttattaaatatttacaaaactctatatggtaggtgttatcactattttagggatgagaaaatggatttgcaagggagacacatggtccaagacagcatgggaactggtggagctgagaaggaattccagctcaactgaacactacagtggaagcttgagtacatatacaatgtcaccaccagagtacatttacaatgtcaataaaatcattttttaactcacatctgggaagcaagatagcaccagactttgggttaaaggaaaaatctccaaatctcttattagttgaaaaaccttgctttcctttgttttgtttgtttatttggttgtttgcttgttttataagttactgatggaagagaacatcaaatattcgccagatacatgtgcagaacatttcagagctagggaggtggccaggagaagtttcagaagggagagtgaagtgaatgggcccagacacttcaaggacatggaatttatttaactagaatgtctgagtaggaataaatgaaggcagaagaaagttgaaaaattttggatgatctagttaaaggctttgaagcaaagagtgaggatttggacctgcttctctttagagtgaaagctactctgagatcaaagccataggtgaaaagaaaggttgacagcagcatggagaattgattggaaaaaggttttgatggaggcagagagtgccaaaaagaaagagtggatgtcagctcattcttctggtaagtaattacaataatgaccctatgctagcactgttgaaaactaaagattagagtccattattacaatagagctatttttacacgagaaaaaatcccaaggtttaatcgaaactgttcatactgaaactatgacaagccaattgttcctagtacttttaataagaaatatacatgttataacaaaacctatcactacaactgggaataacacagagcatcccaccttactgatggcatatcagtagcatcaccttttacataaagaaattctgtctaattcacaaaatatactatttttagggaataataaaatattagttttgttgttgttgtttggcttttacagactgggtcttcccctgtctcccaggctggagtgcagtggcctgatcatagctcactgtagtctctaacccctaggctcaagagatcttcctgtctcagcctcccaaagtgctgagattacaggtttgagccaccaggactagctaaaacaccgcgattaaaggcacagaaaacatttttacttttattcccgattagttgtcctaactgaaattttaaaagaagtcattgaatatggaatctgagaaattagaacaacagtaaattagatcctagctcttcagtgggttggaaggtgcatacttcattcacctattaagctgacatttatttatacctacagactgactgaggcaacagaaagagaaaaagtgctttttgataatacactgaggctcaaaattttaaatcagagttgaaatcatcacttcacaaagtctgctggagtgctgaggccatctgtctccttgccctgactcttgtctccacgtcagtgacagtgtgtgtagctgactgtggatctgcagatgagagggtctttgcaatgggctggtcagagaaggtagaaggtgaaaggtgaaaggtgaaaggctgaaggaatgggggaggggaggggccattttcagtctccttttctgacattactgatcatttctgatcacaaaagtaagggactccttgggattgcaaaccactttatttaaagaacaaaataaaagtcatattaggatgaactaagtaatatatttacattctacaaaagcgctcaaaatacagtctttattcaaaagcccaagtcagatggattttctcactgaagccttgctgagtccctcaactggagttcaccctcagccctgagtcccccagaatacattgtacatatattttaggaaagaaacatgttctactttctaaatttctgttaaaacataatgtatttatgtatatataaatatatataaataaatatatttttataaattgtagataatctacagaatttctataatatagaaattgtataggtataattttatatatattgtgtgttcatatatacatgcatatctcacacaggaacaggaaaaggaacatccaggaaaaacttcttcccctttagtaggattcacttaaggagaactcaacgatttgatgcatttcagctgtttgaatataacttagctactcagtaatacatatgcaagtattttaattctttttgaatcagcccaagtaagccttaggttctgaattctgccttgtgtaaatgtcacctcatttatttactaggtgcaaataatacactgctaagcgatatgtgttggcttccaagccatcagttatgggtttaaatttggaatctagaatttaccaggtatgtaatttggagtaagttaatttaatttcctaggcataagttgcctcatttcttaaaatggggtctatgcctccttggattgttgagaaaatgacatgggatgatatttggcaagtgttcattaaatggtagcctttgttttcagcatcatcactgtgatcagctgaattgctgattttcactttaactacaggaaacttgagtggaaaagtctgagtcatttatgtactcattacttcagcggatcaattccaagtaacaaagctagggcctctgcttattgtttattgtcagttgcctgaaagggaaatgtagaggaggccacttcatgtaacaacacagataactccaaaataaaggaattttatttatttatccacatttattaaaatatttactttgtaagtataaaaatatttaaaaataattaaatataattttatttatgaagtgggcagatgtataaagaggaatgtgtgaaaatgtatagaaaaaggatttatcttataagtacctcatttttaatgagactctaaaagaaacactcaatctattctaagaaaaatatagtaacatgactatcaaagaatcatttattaaaagccttcagcttcaagtgggttactttttaaaataaatgattttatttccaattaatttggaggtctggctgggaatataaaagaatattattgtgttgcacaggcttagaaatcaaacaagtctggactgaaatcatgacttgctatttaccagctactcaaactttcttggggtcagtgtccttatttataaaatggaggcaatattagtatatatttaagcaaatgtctgtagagattacaggaagcaggtgaggtacctaaaactacctgagacacctagttcttcactttaagggttatctgctttgctaatttctctcacactataagcagctagaaaaatagagaaacaactgttttctgactgtctcagtctgttttgtgctgctataacagaactcctgacactgggtaaattaggaacagaaatgtattggctcacagctctggggactgggaggtccagtatcaaggtgctggcatctggcaaggtctttgtgttgtgtcatgacatagtgaaatgcatcacatggcagaatggcaagagagagcaaagggggctgaacttgccctttcataatgggtccactcctgagataacaaacttactctaggacatgaatccactcatgagggcagagccccgatggcttatcgcctcttaaaggtcccatctcttcacactgttacaatggcaattaaatttcaacatgagttttggaagggacaaacattcaaaccatagtggatatatagaagttatatatataaaatacatatgattggactgaggtaatgcgggactgtgatcccgacgtgaaggaaacctacaaagatttggccttgttagctatagcagaggaagggagacaccaaacaaagcctagaagtctcggtgaactggggaaccacaaatcgaagtttagggaggttaaggaaactagaattttcaggacacaatacctaaaagaagtgacttgcacagagagagttctggaaatttgcggatagactaccttgaatctctggctgaatattatttttccgtacatgcatggggttaacaattctcaaagctcacacggaggtgggatattttgcattcccaccagacagagtggagagaccttatggtacttgaggcatctggtagagttgccagaagactactgtcatcatggtggggctaaattacccatagcattatggctcttctggatgccccagcaaagcataaaagcaagtctcaaaaggaattgatgtcgactagctcaactgttgcctgcataaagacaaactttttttaaacagaatgctacaaaatccaccacctaatgtacaatgtctggaatctagtaaatcactatgaatcgtgcaaagaaacataaaaataggaaccacaaccaggagaaaaatcaatcaattaaaaaagatccagaaatgacagagataatgaaattcatagtcaagaatatttagctactattacaaacatgctccatatgtccaaggaagtagagggaaagaggatcatgatgaggagaaaagtgagtgttgaaagtctcaaatgtaatatatggagagaaaaaaataccatattttcaataaagatacactagagagattaacaattgattagataatgcagaagggaaaaaggcagtgaatgtgaagaaatagcaagagaacccattcataactcatctcaccaagaaaatagggccagagtatcagtgacctatgaagcaataccaagtggtccaacacaggagaaattggtgctgcccatccaagcaaggaaataacaaggggagataaagcaaagcttgagaatttttagaagttggaaggtaactaagagaaagcaagagtgggggctaagaatgatggaagacatgatcgatgccttcagtccttccttgatacccagagatgggccattacctccttaaaaagaagtttaaagtaatgaaactcaatttgacacaatactgaaaaatggagttgtattcatgcatatattgtacattttgctgtcactattttaggggatggtggcagaaaccaaaggaggctcttaatgcctttggcatcaacaatggtgtttccttggcatctacactaacacgccttaattaacctatcaccatcttaagtccttgtagattaaaattgggtgaaaatttttagaataagtatctacaaaaatataaagccttcccttgaagagcggacaactgtggaaatatacaaagaatggaaaaatccactaacaagtgacgtgacacagaaagacgaatacaggcacagggaagagacaatttgaacagaggcttatgaggacgtcgggtgtgggaagggcccactgcagggtaaagagaatcagcatggcagtatgatggaaacacacccatagcactctccacagcatcacagtcatctccatgtatgggccatggtggtcagtttgcctaaaactagcactgggaatgacagcttgttctcagcttagctgtggactcacactgagagattaggtttcataaagcagaaacgtacatcagcctcagaggacatgagtaaaaagtataaaaacagacccgcacctatacataggaataaaatgaagtatctgtaggtaccagttgatctgaaatggcccactccaacgaacagaaggtgcctgcctgcaagcctactttgagttgttttaaacattatgaacctgacagagcgagactccatctcaaaaaaaaaaaaaaattatgaacctgccaggatactgaataaatgctacttagtacaaatgtccaaatataggaaagtccattatatttttggaaacttaatgtcaccaatgacttcatttattaaaaaggcactctgcatgtgagataaagttgggtatttgaatgattttaagtcactaaatagttctgtgaaaacagttcagcagaattagctattagaataaaagcattgtccttgataatatgattctgaacattcaattggggattgcattatgattcagttttcgcactctaaaatccaacttcccttttagtttcctgtttaaaattataatttctaagactaagagccacaattgcccttctagccttttgcttttcatgataatttagaaaaaaaagaaattgagaaacatatggcaggtaatcatttgcaaacacacgactctttcaatgcctgccatgttcaacttcattttatagcatctatcttggcaatataaattgtgtttggctgcagaggtatgcagtgcagtacaatgaagaaaagcaatcgtgacaactgaaaaataaacaacaaatgtgtgtttgtgagggagagaatgtgtgtgtgtatatgtgtgtgtggtttagacggcaccagctctctgcttttccggctttcttccaaaggggaatggtgttattttcgttggtttccttgttcccttttacagcaaagcaatgccactggaggaaagacaattgccacatctcagagggttgccaaatgacctcaaaccagttcaaaaggagcgccctcaccagttccacaaatgaaagcaatttaatgcaggtggattgggtcaggaatatttactattataaaggccatgttttttgaaacaagagcctacattatattaatttttaaaagtggtagcacaggaagactgtaagattatttatgatggccgggtgcagtggctcacgcctgtaatcccagctctttgggaggccgaggcgggcagatcacaacatcaggagatcgagaccatcctggctaacacggtgaaaccccgtctctactaaaaaacacacaaaaagtagccaggcgttgtggcgggcgcttatagtcccagctacttcggaggctgaggcaggagaatggcgtgaacccgggaggcggagcttgcagtgagccgagatcgcgccactgcactccagcctgggcgacagagtgagaccctgtcaccaaaataaataaataaataaataaaaataaaaataaaaaagattatttatgatatagtgactattcagaatgaaacatgctagcatactcacgtttttgtaaactttgactttcatgcaacttccccaaaattctctcaaaagtaagttttctgggtttttaataaaaattatcaaaagtatctaagattcaaaactttgaaagtatataactaagccttcaaaatcaaatcaaatttacctaatgctttatttttcaatgggttttgataaaccaagttaaatatatttggaatacttcaactgtgcaatctacagtttaatgtattcagagacattctagctcaaataagtgcagtcacttgtcttactgttcaattaacattcaaattaaccatttaaatttcaacatattttgctttattgattatgtattttaagacaacataaaaatgaaagaaaacatgcttgatttggaggcaatacatgcaaattacccatggcagtcaatattggtaatagagaaacttaaaaagcatccagttgatttcaaataaatgtagaatactgctatatagtatactttgcataagtggtatatactgttgggaagtagggggagcaaaagaagcttatgtacatggagttaacacacacgaagagcaggtataaagaaatagctgcccattgtcccatttgatggaagtagcctttttccctagagaagaagcattaaaggagagtcagtctaaccaggattatttgtgtgttatctgttctgaaaatagcgcactcaggcaagatgatcaccaaaacctttccataaatatagtctgcaatgcaccattgtaagctgtcccgtttactattttgactcatattaaatgccaagagtatgtaaacacatgatcacttatattaatatccatgcataagctgcttaaaagattttagttcacaaaactcagatacgaaactgcaataagtctgaaaagcagtaaggcaggagagaaggagagtagccaattaagaaatggatagaaaaaaaatgaaaatgcatagtgagaaggggtattatactggctaaatgtacaaccccaggtcatggggttacctgcaccagagaattccagatgctagccctggctcatgcagcacagatggcagcccagtggtgaagagcctgcatccggcagtcagacttcctggctccacatcctgtctctgccaggtacttgatgtatggctttggtcaagtaagttaaactctctctgcctcagtttcctcatttgaataatggagatgagcatcgttcctccattataggcttgttatggagactaaagcagttaatgatcataaaggtcttagaactgtggtgggaacatagtaagcgctatgtgtctcctagccgaatgaccatcctgaccccctggattttttatttatgcaataaagataacaacacagacctcaaaaggcacttataatcaaattatttgagttaatatttgtacagcattgcccacagtgaccaaaatagagtaaacaaacagtaaacagtaacagaatcagtattgctttagtgaagaaacagctaagatttaataaacacctaccatgctgagcactttacattattaattcattttatccgctaacaaccatgtttgaggtagattttatcatcatctctactacaaagatgggaaattggaaacaggtaaataataatgataaatactactagtctgaggaaagctactagaattgaataaaaaattacttataaaccaaggcaatcaacctaattaattagcctttggactttttctcagttaattcccaattttgtgactgaattggtcaagatgatttgcagtgttggcacgtaatacatggccaattgttctaggagatgttctttatttatttatacatgtgagaattactgaacaccttggcagaggccactagctagttgtcttggtgatacatatttttctccttcttccttgttgagtaatgagatatttaaggtggtaaaatggccacccacaacactagatttccaagtctcccttgcagctagaagtatcattgactaatttctggctaatgaaatgttggcagaaggttaaaattattccttaaatgcaaagaatgaagctggctggtacgagtctttatcagcaattctcctttcttcttcttgcttgcactatggacttgatggctgatgtgccatagaatgtcttggaccaagaggtgaccttgggaaaatagccatgcactataagggcaatgaggcagagatcctggttctcagtggtgatacatggcggctttagactacctatgaccagacttctactacagagaaaaatgtacacttctgtcagctttaaaatcactggaatttttggactttgttcctagcaggtgaatacaattcatgctgatatgagcagccatatgaactgaacatcaagggcaaacaagatacatttgaagaaaataagaatgcaaataattaaatgcaataaagcattgcacatattaggtaataaatagcacagggtataatgagattgcccaggagaaaagtgtttattctgtctgcatgggtttcttagaggtgatgaagcttgaattgagtcttgaaaaatgagaaggcatttgattcaagaagacaggagtgaagcgacgggctgcagccattccaggcacagagaactcatggggaaaaagtcacagagagatatgagtaattagatatttctgaatcaaactgttattagtcattagggtcaaaaatatataatttcatacagaacggatggcatatttgattgaataagacattataaaaattatctggctcatttaaagaaatctacatattcttctccatgtaatatgcttaaaagtggttgacacttaagaaggcaaagaaaggggctggtgatgcggcttgctatcacaggctctctctcaaaatgtaggtgctcactaccccagcttgaccctgttaccgcgcacacttggttgaggttaacaaagcgcacttggagagaactttaaaggcaacctttagaaaagcacaaatctccaataaattaatattctcccatcatgataaaaacacataaaatatgcaagatggattttaatattcatgactcacatctttcaaaagattggtgagatatcaaatgtgatacgataacaaaaaagcactttgtagaggtgctcaaagtactttcagcattaatgaattcttataatacccttgtaagaaagaatggaggcagagattattcaccataacttacagatgagatcgaggtggaaggatgctgtcagaagatcagctggtgtaggtttatggtgctccgagccttcctgggagctggcttccctacaatgtctgcagtaggtgcacacgaactgtaggacctatggtcacaggcccacccccaggtcaacctttggttgtagcttcaccactgcagagggggcataatgacagcttacatagttgatttcaggaacttttggtagttctaattgactgctgagaattgcaccaatttttagcttggcatgagcaaaaagcaaacagcttgcttgggttgctaaccctgactgtaaagcttcggcacagtggaaagtctcacactgacaggccttggtgagagaaccacatttgctccttatctagtaacatttaaggctacggtggagtgaaacgacgaggatgaacgtaaaaggcctagtacattaagggatgaggagcatagcaccaactcatcatttttagttcccagaacttaatcaaggattcaggctttcacacagaactcccattggtcatttctttttaatcactaattataagagagatcacagattaaatttccaaagaggaaaaatccctgatgacttcctgtagtcaaggtattcacttcaacgcaatttattacggaaattgaactcttctgatgatgatgggtaaaaataaccttcaatttcccttttaggtgtgtagacatacaagcaatccccacttttctcagctttgaattttgttgctctcagggtttagctgtttaataaagacctggatgtcaacagttcgtaccagtgttcaaacagataaagacaatacattcagaataaggatatgtagaataaaacacagggatttccccaaatggtgatttgggtggtctggggaaattgttcttttcctgtaagtaaggaccatctcattattttgtgctaagcataatgtcaggcccactgtgcctgggaatatttacacattggggggaattattgttgctagtggagagtcttgcctgcaagttgtccaggttcttggtattttgaacaaagaattagacaaatgcacagcaaagcaaggaacaaatgaagcaaagaaagcagagatttattgaaagcaaaagtacactccacagtgtgggagtgggtgaagcagcagctcaagggccccagataacagaatctttttgggtccaaatacccccagaggtttcccattggccacttggtggacatctcatgtaaatacagtgttggcccgcaatcagcatccaggtcagcttggctgcagaaagcaaccaatcaggctgaagtgaagttacaaaggtcatactcctaaacaaacatctgatgggcggcgaaaagcaaccaatcagaggctaaagttacaaagttgcacttctatgcaaatgaagacttggcctgtaatcagtctgactggttgcagacagcaccaatcagaggctgaagtgaagatacaaagtgacactactatgcaaacgtactttcaatttcccatctgccacacagaaaaggttggggtttgcaaagggagtagcctatggtccttttgttactcaggtgtggaatgttggggtttttgtttcaatttagttctaggaagtcagtgtgaaacggccttaggatccctgcctccagaccctattctcccaactgattatctctttttctatatagcacccacgtagccatccagcaaacatatgctaaagatagtagactagagatggacagtctggcccatgacgatgtcattgaacaatttagttatccaactccaaagcctctctacctctgaactcagtttataatcttttgcatttttgggggtaatatccaggtttgttcaagtgtgctgtaaattttatgttaacaaaacctaccttccctttggaaatcatgtaagaaaactaaaaataaatgtttagtaaatatatatatatatcgatagatagatagatatactaaacatatatatatacgtatgtatatatacacattatatatatataaattttttttttctgagaccgtcttgctcagtcacgcaagcaggaatgcagttgcaccatctcagctcactgcaagttccacctcccaggttcaagtgattctcccatctcagcctcccaagtagctgggactacaggcatgcaccatcatgcctggctaatttttgtgtttttagtagatacgaggtttcaccatgttggccaggttggtctcgaactcctgacctcaggtgatccgcccaccttggcctcccaaagtgctggggttacaggtgtgccaccacacctggcctacattctttttattcctcctgggctcaagtgattctcttgactcagcctcccgagtagctgagattacaggcatgggccaccacttctggctaatttctgtatttttagtagagacagggtttcacagtattggtcaggctggtttcaaactcctgacctcaggtgatccaccggcctcggcctcccaaagtgctgggattacaggcctgagctaccgtgcccggcctttttttattttgtctaaaaagatgcagggctgggtccggtagctcaggcctgtaatcccagcactttgggaggctgaggtgggaggatcacttgaggccaggagttcaagacaaggctggccaatatggtgaaacctcatctctactaaaaacacaaaaattacccactggcgtggtggcatatgcctgtagtcccaactactagggaggctaaggtgggagaatcatttgaacctgggaggtggaggctgcagtgagccaagattgtgccactgtattcaaccctgggtgacagaggaagactctgtctcagaaaaaaaaaaaaaaaaaaaaaaaagatacaggatcataccacgtctatgttggctacttccaatctctttctttagttgattttgtattgatgttgcaacctcaagggaacaaacacaggacattctcatgacatctgacacaggaaagggattagcaatgaatgtgacaatgtgaatatcatcttaaagcagatccagcctagtgagttcttctcagcattctggacaccctactaaatatgatttcatgataccttacagatttatattttttctttataaaatagaaagtaaactttttaagactgaatggacttttcattttaaggtgcagttagtatataaaggtaagggaagggtacttccaaacacaattttaaagtcatactcttaaaaacgatattagcaataaccaaagagatcatttgtgaacatctcgtatacagctatgataaattgacactcacagaggcattacagggttataattttaaccacaaaacattcaatcaaggtaattatattctacttgtccacagaaataacttatcaataaagaagtaatgtagacagtcatgaacagcataaaagagaattccaaggagacaaaaattacgcaatatttctatgcgaaaaaattacccagagatgtcctcagccccaagtcgacaaccagcatggaggaccctataatgacctgtctcagtcagctacatcagggcaccatagttctggtaacatcactgcttaacataatccagttgactagccttgtagattctgtgcctataaaacaaccattggataacaattgagctatccaaaaaaatttatctataagtagagaatgtgctgatgagtaaacattagtatcttctccctttgttagttttggttcttattctactttaaccaaccagtattccaccttttaaacagagttatctgatgagtttgaccctcgtgattcagctctgcaaaggctgatgacttctgaattcaccagcgtttgggtttccacgcctaagagcttgaaaaaaaaagactttagaacatggggaccattctgtcaccagtgagaaaactaaactatcaagattaagtcatggagattttgaggtccctgtcacagcagcataacttgtagcctaattcacatatactacctcattcaatccttaaaaggtcctatgcaggtagcacaaaaacaaaaaaatagtaaagtccaaggtgatataagccagattgaaacaaacaaacaaacaaacaaacagtgaccacatatttaaaatgtggaaaaaagcctaaaataaaggaataacatctaagcaaaggcctgaaagaaaaccataatatgaaatatatttttagtcttccctgcaaagagccaaagagctttgggcagtagaattctgagatgggccagcagtcaggaaattaggaagttctcagatacaagacaaaaagttcaaggatgggtagaaattgaaagggaaagaaaagttataataaagcctccttttatactttctgacaagacaaaaattgacattcttttttagacaattgcaggttcaagtgtgtttacaagtatggttgctcatatgtgtggccagggtgggggtacttacgggacaaacagattcttctcattcattcatacttaagatatggatttcttggcacaaatagggtagtgagaagtgaaatattactacaaccctgtgtctgcgtctgaccatttctgcggctgtcaccatctcccagtaggacaattcattgttactttgcaccttcaaggtcgtattagagaagaggcaatagccaggaaggctagctaggccttaaaatattgatttattttatttataaaataaaatataagactttactttcttttttcttcataatttttttaagacagggtctcactctgtcacccaggctggagtgcagtggcacaatctctgctcattgcaatctctgcctccctggttcaagtgattctcatgcctcgccctccctagtagctgggactacaggtgtgcactaccacacccagttaagttttgcatttttagtagagacagattgcactgtgttcgccaggctggtctcaaattcctgacctcaaatgatccgcctcttccagcctcccaaagtgcagggattataggcacgaaccaccatgcccagccaagactgtacatttttcaaagtaaaatcaagtcaagatggaaaccaggaaggttgccatcctgtactgttaagagcaaaatgaaggtcttgaggccaaaaagtgagtgcagacactctaagactccaaagtctccagggtctggtagtttcactatcaggggccagaaatgcagaaataacccgatccttgggctaggaatgcgcaactgtctagtgccatggtgagggactgcagccgtcagtgtcactaacgtggaagggcgaaggcagtcaagagacggaaagagggtcttcaggaaatgatactgatgaagcaagaacagggggccaggattctagaggtgcagcaggatccaagtttcctgataaataaacccccatgaatgaatgttttgtcttggaaagcactgtatggtataaagactctacattcctgcattttgtcacaggcctctaaatccccaacctagagcacctggacagatctcacttcttcacatgcagattcctgaattcagtaaaaaagccaataggaatttaatgacctcatttcgtagtaatattcccaataccaaacacatccactaccatcgccgtgtctttttaagaaaataaatatgtgagtaaatacagaaacagatggatattttaaaaatacctgacggacaacaacagtgaaaaggatcggtcacagcaataacttaagtgtgggctaatctgtaatggacatatgtatcctaagaagacagtggcaaaatgtttctgatgtgaatttaaagtgtctgagtttgggggccttctctgtttctgctcctgatttatatgctgtctccagagcatgagggtacaaatgatttcttgagggcagaatcttcctctgctcccgcacacaaggctttgttaccgcagggctgctctagagcacagagcccctggcaggattcgtctcaggtgaaaagaacatcaaagctgttactttgaaaaagacgcactccagaaaacgcagcacagtatggattttgcaacagatctcacaccggggaaaaataaatccagctcaattatatttgggtcctgcctttacaaaggctcattaacctctaaatcattcaaaagatgtaaaggaagagcaaaacgaactacagctttccctgccagcttttttcaaggtgaaatattcttggtgtttgggtacctggaaaggaagaaatgtttaaggaactctggttctctgatattgacacagacaggaaattggatgtatttatctattttaaggaaactgtccagtgttatttattctcccccaccaccccacatcctatgaggtgagtcaagcaattattgaacctcaattcatggtcgttgaatactatgaaaaaatgctcaaatgtcacctgagactgtgggctatataatacaattgagtttctaataaaagtaaaagagaaattggcaaagcataggaaagccactagtgaagatctatatgaggcaataaagacagcagggacgatcctaaattaagaagagaaaaaagggaagaaaatcagaggccgtccacaatactgaagaatgtaagaactgaagatgattcagcagatgacctgaaatttcctctgtcttgaattttcaagaaacagaatgtgctctccacactcgtaagtgggtcagagggtgttcccactgcatggatgggcaagctggctggccgagagtttgtctcaaggtttggctccatcagacaaacaggtgcaccagcatttccctccaccattcccaagggcaccttcttagaaaatgaaatttcatgctcagtcaaactttagaaacatatgatttaaacatatgccagtctctttctacatatttgcagcttcgcaattcttcacctcccagtccctttcttaaaatagcttgtggttgaagctaaaatgtttagttgaatagtcatcttttcctcttcttatctagcctatagaaatctctcatgaggaaactgagcagccacaagaaaactgagttagtgacgatttataatgtgatattttgatgcctgagactattttcagaattacaagaaaattttccttttccaaacacacagtcttccagaaaaaaatctaccatggaccataaccaatgaacactggctgattcacgtcttgccagtcccactttaagaaaaagaaagagagacagggtatgtgaaaaagttataaagataaaaatatcttcggaggacataaggtaataatcaatttttttattcacatagggtaagaaatcttttctataaggtgaaaagtgtaagagacataaactgcccagagttacaggataattaatttacactgattattttactaaaacacaaacatagaaagtgcttgtgaaaaacattatttagcaaaaaaaatcaaataattataatgctttatgtacccttaaattagcagcaatccattacaaacaacagattttatattaagggtcccacatgagcttctaataacaaaggtcactttttactaagacataacttgtggctgctcaacagtagaattggaaagaaaggctcttctctgattttaccttcccaaactgatgcatgccaatgaaataaaacgttatcctgccaaatgcaagcaaccctgggggagcttttcattgattaagtaaggtcttattgtgattggctcacatcgtttcctagtatttcacaatgtgtgtctcccaaattttccaaatccttcctaattttcatccaaagtcacctcaagcttctagaaccagtggaactactgttctccatgacacccttcctgaatagcctacctcaagctcaccaggcccactcagccacatcataacttccatctaactggcccgctatcatttctctataggtaagccctatctcctcaatcaaggtcattgaaattaagtgaaaatgattgaaatgaccaaggcatcaggaacagtagtttacagttcttccacatgcatactgcaggaacacaatataaatttcatgataacaagtgatcctcttgggaggaaggaagacttggtatctgccaggaatatgagtggtatcagccccagaagaataacaaggtgacggtgaggacacacaagaccaatttcccaatattgtcaaggagagtgtggtctacaaatgaatagaaagcagcattttaaaaatgatatagactcaactaggaaatatcagattgtatctcatagaaagagtaaattgtttgctgaaatctttgtttcagctacatatatgtgtgtgctggatcatgatgtgaaatctatttcttactctgggacaaggtcagagaggtttaaaatgcactgctttaatttgtctcaaaatgtgttccacaaaaaagcagttccaccaatgtgacctgcagaaaagggctccaaagtcgatgatgttcaaaaatagtagattaaaccaaattaaacagatattttaaatgcctgaattaccagggcttttaaaacgttaatatgatcacaagtgttcaaggctagaaaatagtattgatgcaggatattttcttgaccccttcacaggacctgtgacagagctgtcccgtttactcagcccaccatgctaaacccctcacaggagggagcgtgcaagtgagtgcaggaacaagcctgctccttcggcaccagcaggaacaaactccaattactcacttgggcctgctgtggcgcaccccttgcgggaaggaacgtgtagggaagtgagtgcaagaaatggtcagctgctttagccccagcaggagcaaatcatgtgtaggccctgtggcagcatccaggtggggctgactgtgacccaaaggcctcagagggcatgttacaatgctctcttaggtctgctgtcagcagacaacagtgtgttatcagttcagcgggccctttgcctcatggagtgcagtggcttccctctgccagtgagggcaaaggggcattataacagccttttggggtacccgcacttgttgggtcctgaattcttgtctggtacactggaagaataaggttacctagacaaatggaaggatgattaatgcggacaattttattgagtgatgaaagaggccctcagcagagggggagctggaaaggggatgggaggggaaggtcactgtcccccgaagtcaggttgtctctcttcctttctcctccgaggccaggttgcctctctatgacattcagcagtggctcagaagccaattcacctctccccaatgtccagccatttcccctctctaccagctgagcctggggtctttataggcacaggatgggggtgaggcgagccataagtagtttggaaagggcagcattcaattggtaaaaagacattattcagaaagaagtactcgggagagagcgggtaagcaggggtagaagctctcactttgggccatgggttcaggctttttggcttaaaggtggggctttgccagggacctgccttgtctgccaagagtttctctgcctcctgtctccatcagcataaagctcattctaactatatggccatgaaacctagggcaggtcgaggaactagcctctctcccaccacactctgaaaaacagtggtcaaagccagtgctgctgaagacacccgcatcgcctctgcatttcctgtctgatttcccctctgacatatgaccgccctgcacagcaaagcccattctagattacaggggagtgctcagtaagcaagaaaaacactgagaacatctgggagaaaaaaataataagaaaatgcctgaaaatttggtttcatgttataaggaatggaaaattcatttcaattcagtccccaaatctaatataggtttctcaggggaccatttgtgaagtagatgtgttacaataaaaaatgttagtagatcaagaaaatactgaatggcctacactctagtgacactagtacaaaaggagaaaaaaaaaaaaaaggaaaagaaatgagatgaagtgtgtttaaatggcacttgcccaggtctggttattatcctcagcatctgttagttctgctgaactgcatttgccttggtactagtcactaccattaaatttagacagtctaaaataattgttatatgaaatacaaggtagataatttgttatttaagcatcagaaagtaaaagagcatcaggtagtaaaaataatcaaaacaattcataatattttctttatgaactcatgtactctttcttaataggaagccatgatttttattttttatatgaatgaaaacttgatacacatatattttctttctttgatagatattctctctcaccagtataaaaggaaatagcttaattgaaaaatcaggttaccaaaatgaaggacattaattcaactctggatttcaggtgatgcaaaaaaaaaaacaaaaaaattcaaaaaaagcacaaaaaggactctgaagataatttatgtacttttcagcaaaacacccacaacatgacttctagactctatggtaaatcaaagatggaaaaaaaataaaacctaaaaaaaaaaacaacaaaatgacttactcagctgtttccattgaaaaattacttcccattaggagatgaacaaaatgcagcatttggttaatccctggcagtggcttaccattctcttaatactttcttctgcatctacacagttcttagtcagcacatatctgatattttgccatattgctattttaattacaaaaagctaatcaagtgaaaactaatttaaataatcaagtaagtcaagggcaaattaatcctgattcgtctaatacaagtttattacatcaaaatccctatctactctcatcagagaatttgggattgtagttgaattttctttttaagcagcactatgagactaccaggaatacagacagaactactactgaatttcaacatcagagacagcaagcagaatatcatagatacagacagaactaacactgaatttcagcgtcagagacagcaagcataatatcatagttttataaaagtgatctcagaacattcatagtaaagtccatcaagcggaaaagaacagaacagaatggtctcaaagaattaaaatgttgactattaatctcaatgcccagaaaaacttgccttcatccaattctaaggagccacttttgaagtccatcataaaagccacattctgtaaatcttgacactggctcagtgctcagaaactttcagttaagaaaaaaaaaaaaaagagtcaagggaaacacaaatttggctaaagaaggaactaaaaccaaaacgtgataagtgattataaaaccattttcaataagatgcatagaataaggtacaatgtctaaagaatgcaaaaggatggaggagcccagggcaacttgcttctttaaaaccatttgatttcttccaaacagacaaaattcagggaaggaatagtggaaatgaggaaaatgagtcataaatatatgccttcacccacatctcatgtttccttggttagactaaaatattttaatatttacatccctatgtactgtatatatatttttgctatgccatcataatcaaaacaactaacacagcaatattggataccaatgacagtcaaaggccactgaataggccactgaataatggaattgtatccaatcgtccaaaagtaacattacttgatgtgttagtcagggttccctgaagggacagaactaataggattgatgtatatatgaaggggagcttatcaggagaactgactcacacgatcacaaggtgaaatcccacaataggccatctgcaagctgaggagcaaggaagtcagtctgactcctaaaacctcaaaagtagggaagctgacagtgcagccttcagtctgtagctgaaggcccaagagcccctggcaaatcacagatgtaagagtccaaaagttgaagaacttggagtctgatgttcaagggcaggaagcatccagcacgggagaaagatggaggccggaagactcagccagcctgctctttcattttctgctgctgctttattatggccacattggcagctgattagattgtgcccacccagattgagggtgagtctacctctcctagtccactgacttaaaagttaatctcttttggcaaccccctcacagacacacccaggaacaatactttgcatccttcaatccagttaagtcgacactcaatattaaccatcacccttgattagcagacaatgttctccccctttgcacacaggtggaacagagatggacatcacccatttggggtttgtaaagactccagaccatgtggccctatctgggagcctgatttgtctaagcatccccttgacgttaggcactcaggtcatctcaagcatttccccattgcaaatcacattttatgaatacctgtatacatcaatctttccatttctagttatttcttcatggaagaagtggaataaagaactgagttaacaggaatatttttaatcctcttgatacattttaatctggttaattaaaaaaaaactactggcaagccacattttgccagtattttgtttttcctaatctcggattaccttcctactctttttagtctattctcttctcctctgcctcttccccaccacacccctgtaccctgtgctccagctccaagaacccttcctgcacagaaaagacaggatggcactttgcccttccatgctagctcctggctttgtttcattttcacatgtagtgccttcatgcccttctcctcttgctctctaactctcctgattacccccaccgagaatggctcacttcctcatcaaggttactaagtgttctgttcatgcctcatttgtagcaagcacaatttacattttctagaaatataaatttgccaaaaagctgctccagctgaaagatggtctctaaaagtactgacaaaaatgcaactggtactgcaagaccagagcttagaaaatgcttctgcacataaaaggcactctaaaggaaatgcaattaatacaggggaaattcaaaagacatcttaaatggcctcaattatactctttcaggataatttataatctgctaatgataaaatgcagatggcggactatattaatttcaaaatgctctaccgcagttttactagatatttctgggactataatgcaaaaccaacccaagacacattcagaaagacttctcattccctccaactacagccaagttgaattccttactcttgttaggcatgcatactgtggatctcaggttttaatgttctctgtattttatcaacagcttgtcttccataataataatactttcagtcctctggtctcaacattttgttgcaactttgttgaaacttcttaatttaatatctgaattcatattaaagccttctatgtttctttgagattatttttttgctgggagtctgctgttttcagccacctatcagaaggtaactcatgaaatagagtataattgtcagggtgcgataagtttttggcatattttctatgtaactgataggaaatataatacaaggctgttaaataatgaaaattttaaaaaggaataccattaggaaggttttctgtttgggtgatggatgtgatctatcatatagttctaaataataaattcagttttctgtctcaacggttgttctcttctttctcctcaggaaatgttacacgctgagcctctgtctcccagaacagtgctcctgaatattgaaaacatgctgcccagatctttctttcttctttgacaaaggctacttatcttgtagagtgtaaaagaccaaagctttttgtttgtttgtttgcgtttttttttttttttttcttttggtttgtttttgagatggaatcccactctgtcgcccaggctggagagcagcggcacaaacttggctcactgcaatctccgcctcccgggtttaagcaattctcctgcctcatcctccagagtagctgggactacacttgtgcaccagcacgcctggctaattttttatttttagtagagacggggtttcaccatgttggccagtctggtcttgaactcctggcctgaaatgatccgcccgccttggccttccaaagggctgggattacaggtgtaagccaccgcgtccagctgcttgttcctcttctgccttcttcctattcctttctttcctcctcccgccttcatccaacacggtttgtggtccatgttacttgggactattataggcttcaaacgagtctcgtatgagcagtctctagtccatattccacccctgtagctagtgcgcccatgttaaagctctatagtgttcacattactcccctgttcatgaatgctcattagccttccactaactaccatattaaatcccatctccaccttggcattcagggccatccacataacgctaaccctaagcctagtcagagcccatttacttgtgtttgtacctcctattgtcctcccacactcacccttagagcccctctggaccaggctctgtgtcaaaaacaccaggtgatttgcttacctttaggcctttgccttgcctatctctatctattaaattctgccgatcttcttatcgtaaatactgttttctattgactaattatctatgagaatcacacagatactcatacgtgagcattgcttttctaggatgcaacagaacttaatgtttcttatagacctggccatatttttcttttttagtaagcttttctatatattagcaacacacacttggcaatttaattttaaaaataacatttgcaatacaatcaaaatctgatctacttagggacaagacctatagactgaaaactagaaagcactgctgagagaaattttcagaaagtcctaaataaaatggtaagcatgtcttttacaagtatctgaaaattcaatattgttcagatctccccaaacagatctatagttttaatgtaatttaaatgaacatctcaaaaggcagatttctttgtagaaattgacaagaaagttctaaatttcataagggaataaaaaggacctaaactagccaatataactttgaaaaagaaaacaaagttggagaacttctgctacttttctttgagttttattataagttacagtcatcaagaaagtgtggtattagcatcaggacagaggaagagatcaatggaacaggacaaacagtgcagaaacagacaaatactaatctgctaatttttggcaaaatgtaagtgtaattcagtggagaatggacaatattttcaacaagtggctctggatcaattaaattgatctgatctatggcttgtaccttgtaacatttttcatagtcctaaatatgaaggtctagaaggaaaccaagaagatttttgtgaccttgaactaggcaaatatttcttgaatgtaacaccaaaagaatgatccacaaaagaaacattgtataaattggactttatcaaaatttaaaacttctgctctttgaaagacatgtttagggaatgcaaagacaagcatgcacagactaagagaacatatttgaaaattataaatctgatgaagaacttgcatctagactctataaatacttttcaaaactcaataataagaaattaagctacccaataaaaaacaggcaaaagattcaagcagactaaattttaacaaataaaatatatggatggcaaataacaacaatcactgatggtcaatagtattagtcattcagaaaatgcttattaaaattctagcaaagcaaattatagtgacataaaaccaagctgtgtttgcctacaaatgatgggactagaggagtgaaaggaagggatggctgaatggcagtcggagactttcctggttctggacatgttcattatgatagcagtgatagtttcacaggtatttacagatatcaaaatatataaaagcatatacacttatagcactgtgtcaaactatacctcagtaaagctataaaaataatcatgctagcaatgatctccatttttcaagttagtaaaataattttcagaaaaggaaacgtctgcatgtgtgagagagaaaaaaagaccacattagcctaaaaacaaacaaacaaacaaaaaccctgcctaaatcagatggctgtcctgggactcaaggaactgtgctttaagaggggactttctcctgtagtcccagctactcgggaggctgaggcaggagaatggcgtgaacccgggaggtggagcttgcagtgagcctagatcgcgccactgtactccagcctgggcaacacagagagactccgtctcaaaaaaaaaaaaaaaaaaaaaaaaaaagaaaaagaggggactttctatcaggcagagataataaaaagcactagtcaaaggaagaggcaccttatgcagaaatcactgtcataatccttcctgtctataggcaaggatggctctggaccaccaccaccccctgcattctaatttgagagtagatacactactccaacccttagggtctttcttgggttctaagaacactggatgagaaaatctagctaggatcaggcacatctatagcaaagctcacaggtttatccacaaaggccagccatgggctgaccacgtgagcattctagggatgcgatccccagaaatctaggtcacagacaatcctctggaaggtacaaagaggacactggagcaggagatgtggtgtccagcccagtaccccctaggaaggccatgtatgtcactaaaggatgctcacttaatacaggcagaatctcatcttctcagaggtatagcagccctcccttatctgcggttttactttccacagtttcagttacctgcagtaaattgcggactgaaaatataaaatgaaaaatttacagaaataagcaatacataagtttggaagtgtgcagcactctgagtagcatgatgaaatctcacgccaccttgctctgtcctgcctatgatgggaatcatctttgtccggcgtatccaccctgtttctgcagcctgccattgttcattgacattgtctgctcctgacattgaaacttgaacatgctcacggctggatgatccagaatcacctgacgcagataatcctccttctgacctaacactacgtcacaatgcctgggccgttcaccttgctcaatccaatcaggtaggcattttatcaacgcaacataacaagaagtgcaggtatggtaaaataagatactttgctagagagaccacattaacataacttttattatccaacatattgttataattattctattttatgattattgttgttaatctcttaccgtgcctaattcataaattaagctttgtcataggtatgcatgtataggaaaaaacagtacagtttgtgctctgtatccacagattcaaccaaaagaaacaaaatgataaaaaagtaataaaacaattgaaaactacaagttgaagaaccaacacagtataaaaactatttgcattttatttatttattcattttgagacagagtctcactctgtcgcccaagctggagtgcagtggtgcaatgttagctcacagcaacctccacctcccaggttcaagcaattctccctgcctcagcctcctgactagctgggattacaggcacatgccaccatacctggctaatttcaccgcacctgaccttacatagcatttaaattgtattaggtaatccagagatgatgtaaaatatacggaaggatatgcgtaggttatgtaaaaatactgtaccaatttacatcaggaacttgagcatcagcagattttggtatcggtgaggagtcctggaaccagccacccgacagacactgaggcacgactgtttgtattgggtttggtactgcccaaagtttcaggcatccactggggatcttggaacctatctcccattgacaagagggaactactgtaaccaagaaactttgattaacaagagaaaactgtatggaaaaattcactaattaaatgataaacataatttacaatataataccttcataagacttttctaactcatatgcaaatagtaaaaatacacaaaacaagcaagaatgcaaaaaattttccctaaatcttaccaatttgcattaaagaaaaatttctggccgggtgcggtggctcatgcctgtaatcccagcactttgggaggccgaggcaggcggatcacaaggtaaggagttcgagaccagcctggccaatatggtgaaaccccatctctactaaaaatacaaaaatcagtggggcgtgatggtgggcacctgtagtcccagctactcgggaggctgaggcagaagaatcacttgaacccgggaggcagaggttgcagtgagccgagatcgtgccactgtactccagcctgggcgacagagcgagattctgtctcaaaaaaataaataaataaaaagaaaaatttctcataggactacagttcccctgggatattactattcatttataatctatcattttgcaagctgaataccttcttaacaatttcttaaagtgctatgaatgcctagacttctaagacagtgatgccagtgtctctaacttcctgtatatgccacgctagtttctgtatagaataggttatcaattttacgtctgtgttaaggacaggaatcacaggacatctcacttattaaacggcatctatggaattatgccaaacacatttatctataaagaatgctggtcctcactatttttcattaatcaaatgcaatgtgtaaccagttacaaagcctgtagtattaatagaagcttctaatctgtatagcatgctgctttcttttagctgaaataacatttaaaattcataaatattggaggtaaaaagaagaaaaaagattataatgtgtgctctggcttgtagcccgaggagaacagaaacaggggaaaaacaggtaatgctttccagcgatgagtgatgaaaaagaagcacaacaattccagtgactgtatgagaacagccagaaatcattcttctaaaaaatagttttaagcagaacaatgatctagaaaaggatcacaacacattgcaccgccctgagcagtcccataaagcagtgtgatgcctctataaagcaaagttccgtccaacagggctgtcagaggggaacatgagtgaaagggagggagcgccttgcacatttatatccatgctgcaatgatccccacatctctcatggtgcccagcgcacgtctcctcctgcacccacaaccaggaattaggctccacgttcacctgctctgcagctacaggccttatcctctaattaaaccaaccccactgctctagaagaatagccctgctcggtgactcactaacatttaagaatacacacatgtgaaactaagatgaaaatgagggcggagatgatttatgtgaaaggacatttaaagatgaataggttttgtgaggttgaggaagcctgcccctctagagacagaggaggcatttgctcaagtgtggaataccagctgttgaaatgttaagtcaaatgaagtagaaatgtaatgttatttaacaatggccgaaaaggaactcgctaattagtatttagcaaaaaaaggttttgagtggtcaacctgtgtatttgtttatttgtttgcttttgtttggagacggtcttgctctgtcctctggagggcagtggcactatctcggctctgcaacccccatctccatctcctgcctcagcctcctgagtagctgggactacaggtctgcgctaccatgcccggctaatttttttgtattttagtagtgacggtgtgtttcaccatgttgcccaggttggtctcgaactgccgacctcaggcaaacctcccaccttggcctcccaaagtgctaagattacaggtgtgagccaccatgcctggcctaatctgtggactttttgtgtgtagagtgtgactgttacaaatgggaatgccctaatctatatgttactgtggaattttcctatataacaaaagaaacttctaagaactgctaccatttggaatccagtaattgtatttatattgaaatatttattataatgaagtatagcagaaaggctagtgagttacagaacaatatcagaagcctatgtgccatctaaaattttcttttattttttaaattaaaatgatctcaccaagcttaatcatctctaaatctaaaattttctaccaagtttactaggacactagaggcctatttctccagaaaaaatggtaatactaatttttacatatattagaaactaaacattttccaggaatgtacaattactctggaaattccaaatctttatgtcaaaaaacctagaaaatctgccaaatgtaccatgtctaaacctaagtgggtattgctactaatggtatctttactctgtctttatatagaaacaggcttatttggaatttagggctcagaaatagacctacacatacatgacatggtcatttgattttcaacaaatgtatcatagtcatccaaataaaaaagtaacaactgcatatccatatagatatccatacctcacactatcataaaatttacatatgttggatcctaaacctaaatgtgaatgccaaaactatggagcttctggaaaaaaaaataggagaatatttcatgagttgggattaggcaaaggtttctttgacaggttagagaccacaatatcattaaaaagtaataaacttagaaattaaaacatctgttcataaaaaatatgaagaaaatgaattaccaaactccagactataagaaaatagttccaaaacatacacctgataaagtactgatatgtaataaatagatcaaagcttccagaacaatatatacatttcctaatgaacctaatttgaaagtgaacaaaatacaagaagagacatcacgaaaagaaaaatatgaatcactaaccagcacgtaagaaagcacataacattgtcagtgagtctgaatggaatgccagtgcacaggcaccagaatgaaagcctgacagcatccgaggcggcggagccaccgtaatgctcatgaagagtcagaggtttgaccttttgctatcaatgttgttataaatgttaatgcacaactatctgtcagcccagcaattccactgcaggacatttactcaagagaagtgaggccgagtgtggtggctcatgcctgtaatctcagcactttgggaggccgaggcaggcggatccccttaggtcaggggttcaagaccagcctggccaacatggtgaaaccccttctctactaaaatacaaaaattagccgggtgtggtggtgggcacctgtagtctcagctactcaggaggctgaaacaggagaactgcttgaacccaggtggcaagggttgcagtgagccagggtcatgccactgcactccagcctgggcaacagagcgagactctatctcaaaaaaaaaaaaaaaaaaaaaaaagagaaataaaagcatctgtttaaaagtggtttacacaacaaatgtttaccttgttgtataaatgctctattcaagagagtcaaaacctggagacggcccaggtgtccctctacagtagacaaaaatacttctcagccataaaaggcatgaacggttgctccacacaacagcatggaaaaatcgccaacatattttgctgaatggaagaagccttacaccagagtagagaccacatgactctttatatgaccctttagaaggcagaaattgtggtggaaaaaaaatcagaagtgtttctgcccctgctgggtggagggcttggaactgaccaggaaggagcatgacatcattctctggggggtgataatgctctgcagcctgacaggggctgaggctgtaccactatatctttgccacaactcataacattccaccggatataaaatctatctgaaaaactgaactatgaacatgtattgaacttgtttgtcatggtgttcatgttgaagtatttcgaggtgaagtatactcatgtctccaactcactttaaaactcattttaaaattcttcaaaaatgagacgaattggtaagtggatggagaaggatagatagatatttagccaacaaaggaaatagagtaaaaagttaattgcagagctctatcaaaaagcaatccttacccaacagcatgaagagattagtagacagatgctctagcttcccattctctggaagcacaattctatgagacattctccatagctcctcagatgcccaatgagactgtgccctaattgtcccctgcactataaactcaactacccactctttgtcagctttgctttattttccatctgactttcccaactcctcaatgtacttcccaagattactcccaaatgaaccacctgcacctaaaacagagtctttggttctgcttttacaggaacccaacaaagatgataatatagggaatagcatgcatatgtccaactgtgtcagaaatgaggagccaagctgatgagtggatctacagtgatgttctaggaaatttaaaatgtagaattccattttcgcattgtcaaatgcaaggtgtacaattttgagaattttaaataattgaatatataaaatgaaggctctgaaatatctgttgcgatagaggtaagagatctgacagcttgtatgttggcatcacaaaactattgtcagttgttacataaatggatggtaaagctggaatgcctggattggagtctcggccctgacgtgtgcttgttaatccctcctgcctgggtttccttgatctcttaagcaaaatgttgaaagagcagctggatcatggtaaatgctattgaagtgtgctattgtttttattattgcctggcaaacactaaggaagtctatccaaggaattgtaacagaaggaaaatgagggatctgactattatagagaaaagtaattaatttccacgaaacagtcagtaacttggctaaagcgagctttggattatttgtcaattctgaaataacagggatttttttttttttttcaaaacaagtaaatttaggacaaataagatgacgtacttcacaaagtaatgaaaaatgtatgggagccattgttcctcagggatgggaaaaatttgaccagtgtttgtgcaaatttggggaaaaaaagtcatggactagcactaaaggaatgagatctacctagactttgaggtttgtaaagggtcttaatgaggcaaacaccaactgtgttctttcttgattctgttcattacctcatttaattttcaatggtcttgccgtgaatatttgcatgagatatagaatatttttaaagcaagaatattaataacagtttttcattttaggctcattaaataaaaacgtcattttttcactaattcacatgacatttattgagatgtattaaaaaataaaagaaagactttgaagacaaaattgctcaaaggttaggggcaatctgctcttcttggagtaaaattcaagggccattataagaagtataagtcaaattatagtaccaatcaaagaataaaatatttttgatggaactgatataaaaaagttgcgtatccttgtaagacgaatttctttctctccctatctctgagtagctgcataaaccactaagtttttctagaagcaagtgataatgctttatcataggtacaggcttaaagaatgattaggtacacttaaagttgggtactcctatcaaaatccaagacagtgcattgcttctttcctttccaaattttttttttcagtcttgtggcccctaactagtaattaagagaactaaattaaagttcatactggctacttgaaatcttacttttaatattctttgcattatgcatggaacttgtctatggttttaaaatccaaggggaattatgacatttgtaaggcaaacccaggctttcatccatcattctaatctgttttacaaaaaaaaaaaaaaaaaaaaaaaaaatcaaagcagcatttgggggacaaaatgagtgacagaaaaatggcaaaaatgtgtcaacaatagtgagatttcagagatccaggagactagctactaacctcagcatctcccgagatactccattatcgctatttatgttattacagatgatataaatcttacgtacaatcattgtacactgaaaagtagcagaaggaacagaggtttgtgaccagaatctatgacgcagggaaaattaaaaatgcatgaaccattccatataggagggaattgaaaattatatgcaaaagagtatatgtacacccacagacatgctatataaaaatgaacaaaatttaaaagcttattgttacccattgttctgatacgtatttctgttttcttggaaggttctttgctggccggccagattcctaaattttatatcctgctgcactagtgagatatgtaagaggattccaaacactcaagtgtccaaactgagctgtgctgaagacttcaggctctccttcccgtaagatgagaggtcatcaggaagatgatgctctgtgataacaggattgaggcagaaaagctatttgtcacattcccttgtttggattttggttttggactagaaagaacactggcttcaaagtcagaaatcaagaaccaaagcccagttctaacgtgttttattagctgagggacttcaggtaaatcatttagcatttctttccttcagtttcttcagatatttaatgaaagaattagaccaattgatttcaaggttctcattttgtttcaagattctacagttataaatcataaataaatcaccagtaagtttgcgtttgtcaaacaattcaagttactaccactttacaagggcacatattaattttcttaaaaatttatcacatgttatgtaaaaaaataagacttctgaaatacttagacaaaccataaatgtgcaaatattctatttcactacctcatagacaagttttagctgattagcatgccctgatgaaaatacacacgatatgcaggtgtaggagttggatgaatatttttaattgtgtatctcctctgtaggccaaaactgttcatctactaatacattagccttaaggcatgtgccacttttagtgactcagttgttaaaactgcgttacagctgcatttgctcccaaaaaatattaaagtcctgtaagatttctattaatgaatccttttgatcttctattttacatcaggtaaaaggtttcaggagcttctccattgttacaacatctccttgtatctaggaggatatgggggaaaatagcaataaaataggtggggatgacattctgatactagagagcagttaaacgtgatgggggaagaaagcgacgatccaacagaatatcctcgagtaggaaaatgattttatcgcatgactgcctacctcattacaaagtgaaattcaccactatacattttcgtgtgagctttcatctgctgtacaggagagtggctccctgggtttcctataacagctgttcccatgaatctaccagatattttgtttccacttttacctttcttactctctgtctccatacccttctgagggatgagggtctgttgcctaactctttcattagttatttatttatatctgctctgggaaagaagattgtggaaaatgtgagagcaattcacacatcaacgttttaagatcccgtgtacaaatgggattgctccggaaaagcttcttcccacaggcactaattaaaaagcaggaagttcacttgagcagcatttttcttccgtttattttcctttgtaatagacatgctactttttactttaatttgaacattatccctctctgtccaaaaaaatacaaaaacaaaaaccaaacaaaatacagtaaaggaaggcagagtataacattaacaatttagaaaagatattattttcccctaataaattctactgcattcttggaaagcattaaaagtataacaggtcacacatccttgaaatattagatgaaggaatttgtgaagacagactattggaacctctgagaaattagctgggcctctacttccgtggtcattctgaagcatttttagatgctggtcacgattaatgctggaaacaacgttagtgacagttcttctgtgcttatcacatgcctttagttcaggaccgaaagaaggaaggaaggaccacaaatggtacacgaatgggctgcacagggtggtttaaaaggtaagaaaccaaagtgattgcttgtgtctcatttaagttaaatttaccacaaagttcatattcaataaatttaataagaaaggtaaataaaaacaatcacagtaagaattacatatgaaaataactatccattcattctattaacaaactaataaattattgaacatacactatgagtgattctgtcctagatactggagattttcatgatatactaagtatgtttcctgcaagagttgaggatgtcagaaccactgggatactgcggttgaatagacaccattgcctcttggtggtctgaggctggtaaatacacaggcaggaactacgcattgcaacagaaatacctccaaaggtccttatgaggatggtgcacacagaaaaaaacgtagggtcatggagaaactggaaggaggaggatagaagaaataggtgaaacaggctaagatttatccaccccaagttgggagatggtattccagtgggaaaaatttcactgctaaaactaaactagactagcaattctgtaagatgtaagagtgtgagtgatgagctgagggacagcctgagtggttgaaacgctgcttttctgatgatttggctgatggagtggccctaagcaagtttcttcaccgctccgtttcagattcctcctctgtcaaaccgggaaaatactcgtatctacagtaagagttgaaggattcaatgaaggatttaatatatgcaatgctgagaaaggtctgtggtgttcagtaaaaaatcagggtcttttagtttctttcgtagggctgcacacgcctgacacaggggatgtgaaacacagacctctcatcctacaagtcccagctgcacctgaccccagcagcctaactgcccctggcccatgactctaccccagcccattatcttcttcataatcacaatttataacttggctattgctacattacatggtgcatttgcctatgtgtatacttgcttattttgcatttattttcctcatatatgagccctaggaggatacggacttgcctgtatttggggactggaacatataaggtgttcaatgagttttgttaaatcattactgatgatgctgatgatagcctgccactacatagctcttcctttgtgctactcttctaagcattttaaatacactaatattcttaattctcacagcaactccaagaggcctgcctcattaagtgggtcctgttactgttttatagctgaggatattgaagtgcacaggataaaaaagaaaaccacctaaggacacagagtaagtgatagaactgagtgctgagctagcagtaggctctcaaaacatattcttagccattaagctgcctggttctaagtaactaaatgacagatcggagcggggtgctgcctggggccctggctagccagtaggcagaaatggaccccaagctacccagggatgggagatggggcagatattaagagaaatgaggcacatcctgtactagacaattttcctagaagcccagtggctgagctgtttcatctgcagccaagagtgatgttccattgtttcgcatgcactctgtgagccgcctgctgcctgttgcctgagccttactccttcatccagcagagccaggccggcccacaccccacactcttaccacagatggactgggtttgaatcatggctgttaaatgcccttcaacactagtcaagtgattactttctttatttcttcacctgcaaaatggggattataaggtacctacctcataggtttgtggtgagaactaaatgagttaatacagagaccaatgcctgggacaaatgtagctcctctaattaacaatttgaattccctggtcccttggtttagtccctgtttgtcatgtactttacaaaagtgacaggttcctattcttggaaatgaatctgtctatactcagaatcagaaaaaccaaaggaacaaaataaaaatggaggcataccagccaatgggtgcctcggtggtatctccatgaaatctaacccatcagaggcagataagcacagagtccaaggccttcctctccagaagaaagaggaagaaggggggcgtgtgggagtgtagagtgcaaccccctgaggggctgaacccacagaaacagcctaggggtgagataaggggtcctggcccctgaagacaccctggggaattgaatggcttggggatggggaaggagaaactggggggcagaggtgaatacctccccatttctcaatgcctggcacctgccattctgctgttcctttctttccaagatcaaaacaggacattggccatcctcctgggttgtgcttccaaggctctctttgatcactctcagccctccagcttccagctgaaactgacctctagtggcctgtacactggtcttactacagtcattgcccccagattcagaactcccgtctcatgtcctgattgctgtgcagtcagcatctccacggaccagcactctagattatagcaccgagtacaagatggaaaaccaaggaatttcaccaccagttagtgttagacaattcattgttctttagtggcttgagatttaaagtggcaactccataaaaactgacgaagccttccttggtgttgacctttgacacttgtgagcagccacatgtggagtgcgtcctggacattttcaggtatctattttgatgcagcttttttttttttttttaaattaaacagactttctcactaaattgctttgtcatggcctcagggagaatctggcctacaacactgtttactatttcaagtcatgtgtgaatttgatgccctcatttcctcttcttcatgcttgtcttacaccaatcaataaaggaaggaactgggtcatagtctcctggggatgactcccagagttcaaattctggctctgcctagctgtgtctttggaccagttagtttcttcatctctataatggaattgcaatattactttatagggttattgtgaggaataaataagataatgggtataaagtgcttggctggagcaaatgttcattgggtgtcagctattctcatcgtcacgatcagtctatgagatggagtccactgtacttggtacttggaaataagacgtgtttatagatctgtgctgacatgtcagttttcaagagccaccatatatcctgctctatgcgtaatctttgtaatttagagtaaatgttaaggaagagagggcaggaaggaataaaatgtaatgagcaatcattggacaaataaattgcatccactttttaagtgcattttgtatacagtttaaaggtagaattcctgaagttatacgattttaaaatacacttgagaaaggtgatgggctgtccaaagcaatgattttcttctaagaaatacttacacatatagaaaatttgtatctttatatttgctgatgtgaggctgctctacactttgttcccttccatcagcacgcaggaaataaataaaatttgcccacacgctaaataaaagtcagctgaatcccaagtccttgccgtcccctcaaccacacaaactcatgcacccataaatatcttctttttggttctgagtgcacacagaaccaaaggaatttgtattgaaacgtttgatttcacttaacctgcatatttctatttctatatatcttaactctgaagttaaaatacaattcttccaatgatatgaaacacagtattttaaaggtatcacacatcttgggttgttagcaagaatttatataatcatttatccaaatcactatctattttggcttcacaccagacttctaatcaattctatatccttgttcaaggcatgtttcttatttttcaccactagtcaggtattcattcccttgtgctttgttcttgttcatttaacacacaactagtcccattcataggaaacacatcctaatccaattggtgttttacaaattgaatcttcccaacagaaagtcattgtgtccctcctagttcagaaatactaactgcatgcacttgaagttaaatcaaaggataattactggtctaatattttggatcatcttaaatatagaaccatattgtgctacagctggagaaattctgagagtttttagataacttggaaattacacagcctaccgaggtgtctttccccaccctgtgaggctctactaaagagacaagggggacttcacagaaagtttaattcaaacttaattacacttgagcctgaaagttgattaatcggttacatttgcaagcagcagaaaccaactctggctgtcttatacatcttgtacaccttgttgtcttatacaccttggtaggatgttagcctccaagtctccctccaggcaagctgtcccagaggtcatagagcaggaagacttggaccaaattaaaatgcttgaatcacgtaactttttaaaacatagtttgagaaacaaaagggaacagaaaagaaaagtgagccaggggagaaggtgatttttgtttattgccttttatatctattatattcccagcaccacctacaacactggtccggtacatagcaggtactttatgaagatgtcctgaatagctataggatataagtatgcaacccttttgtaattattataagacaatgtcttggaaatcatagctaaaaacaaatcaaacgaaagaaacttagtctcatattctattgtcaaaaattcttccatgatggtatatgcaatagaagctgtactggtggatttctcccatgtacaggttagcacacaggtaacatatgacctacagagctgcagaggatctgtctgcttagtgctgaaggccaccacttgatatagaaagtagaagtggggtgtcagggtggtagggccactggtccacgggacatactgctggaatagcaagacttggacccctgcttctgtttatcctaaggaagtgactggtgctcctctgatgatgcaatgcaaatgtcctgcagtctaagggctgttgtctgacatccagtctcagtaaatatctgtgctgccccatctccatgaattctccatataaaggctatttgagaagccaggctgtgagtgctctccaccatgtagccttcactgacagaaaatctgctcaatgttttaattttaaaggtagattatggattcttttataattagttgtagaaaagatcctctggcaatatggtagttagaacacatctttgccacccttcgctctcaattaaatattcaactcttacctgctaagcagggggagcttggggcacatgactaagccttaaagtcctataaaagtatcagcagaggggcctattaagatttggagaggggtggaattagatgaataatctaataaagaataaacatccctgaagagccaagaaaattatgtagaatttaagttggttgaggctaggctagtgttttaagttggttgaggctaatttaatttaagttggttgaggctaggctagtgaaagaactgtgcagtcactagactcaaataagtataaagagccacaccgtctcgtggataataccaaataatagaggacccataagtaaatctaggactatatggtacttcattttggccaggtgatatattgatatgttgggagaaaggattatttaataaatggtaatgtcacagaaggccatctattcaaagaaatgaatttgggccccttcatcacaccacatatgaaaggaaatttcaggccaattaaaagttttaaatgtagtaaactaaaaaaatagcagatacatctgacatctagaggctcggagaccttgataatcgacaggtgactacatgaaaatatttgtatatgatgataccataaataaaaaacagcagacagtggaaactgatagactagaacaatatacatgcgactcccacagtagagaaaaggttactatctgccataaatacggcttacactgtgatttgaaaaccctacctaatgtatgggagcagagagaaatgctcaataaacagatgaaacaaaatttaagttacaagaatattttgttttggctaatcagactctgaacacaatgaaattccttttttttttttttgggaaaaggagtcctttcataaaatgaaagcaaaagtgtgaattattacagcctgaaattaaggaaataagtataaggacatatattttactcacacacaaaaaaataaataaatgcatataaatatgtatacccctattcactggattgctgtatatagtcacacacacacatgcacaggcactcacaccaaaatctagaaatatcagtaacaaatcaataggcaaatgtttaaatcaaagccattgcagcagagcatagaatattatgcagtcataaaaaatttttaaaaatagaactataaaaattacctttgagagaatggctataaatgattaagagaaacaaattcagaagaaaaaagaaaaaacttatttctatgtgtgagtgtgaatgcatgccagagatatcagaaaggattttcactaaaatggttagcaatgcttgtatcagcggtttctacctcaccttttttatattggttaagtgttatataatgagagtgcattgcattatttgtcacataaaatttaatttgaaagctatttcattgctaaaaggcactggtataactataacttatttttctcatttaaaaatattctatcaaaataacatagtgcttccaccaggtgtgtgtcaaaaaaagaaaaacaacaattactaatgcctatcatttaaaaggactttgatataattaagcgaaaaaaaaaataaaagcaaagcacgttctctttgtgccttccaactacaccaagaatacaacaaagacggcagaagtttgtctgtacatttaataaagaaaacaaattaaagagagtgctttgcactgggacatttgaatccagtggcagctgccagattaaaaaaataaataaagagccatagatcaagctgcagctgcgtgcctccaactcactccgcagcacaggcccaaagccattgtcagtgcccccggatgtgtgggtgtccttcatttctctttgaatgtggccaggcctcttgaaggagaacactaggtggcatgcctaccaagctctgaaacaccattaaccaccaggaaaaaatgcgattaggattctatttggagatcatattttcccctgtaggctaaggaggcattctctaacactgacaggctctgagtctctttagccagaaaatcaaaaagtttctgtgaagccactaggtaggacttttagaaatagagtcgctacatcctctaggctcctgggaaagaacctgtagctgaattatttttgtgggtcatccgtaaaatgttaattgtggattgtcaaacccttactgcagagaggactttcacagaaacagttctatttctgataaatcaattttagcagaagagtctcttttgacatgcttaattcaatgagcaaattgtaatgggcctatcccttaagacactggtgtttgtgtgtttgggagtgttcgctcagcaatcttggccctgatgctgggggaatttgaacctgacaggcccagaggatggggccagcccctttccctggcctatggctccggtgctccagacacacacacctgagctacctcccttaaaggttggaggtcaattaaatccctcaagtacctactaccaagctatttgtttaaagactattttggccatttttttgatcagtaggatattgtcacgtgctgccaaagtgctgcaggtggacatgtttgtgtgttctgaaggacttacatcatcctgcaatggtcagctttatgacacaaagaatgagtgataactcagtcttctcagttttgtgtcgtttgtggttttgtttgtgtttatttctttccctatctggggtaaaagcctcagtccctgattcagcagctttctatctaggtgtctgatttactgaattgcatcatctcttcctcatcagtgttttcgcttgtttgcttgtttgttttgagtcaagggctctccgtctgtcactgaggctgagtgcaagtggtgcgatcacagctcgcagcagcctcaaactcctggcctcgagcgatcctcccacctttgcctcttgggtagcagggactacaggtgtgtgccaccacacctgatgcctggctaatttttaaaatttttttcgtagagacggagtctcactatttcccaggctggtctcaaacttctggcttcaagcaacgctcctgcctcggcctctcgaagtgctgggattacaggtatcagccactgtgcctggcctcccttcagtcgtaattgcattttgaaaactgggcctgcagctctgtggataccacacatgttctatttgagcctatatttctctgctggccgaatttcttaggaacctgtgccaattgtttttcatctttgatcatcagcccgaaccatgctgtgtccacctgaggggacggtccagcatctctgtgccatggcagatggactgccggggctccacctggttttggaacctgcagtttgcaccatggctctcctgactgcagagccaccggcagctgctgtgtttcctcatttcctctaaccccagtctgtggggccttccccttcagcctgctgcagaacccatccctctggtcagttgaaaaatgtgggtaactgagttggaggtggcatgaggggactttctggaaaaggtctaaaagtctgtctagaggagcgtatacatgtgtgtaggtaagaatggcatcaagttgcacactgaaggtttatgccccttactatatgtcaacaacaaccaagaaaagaatcacctgccaaagtcagtcaccacctacttagttccctagagttgccactggctcaattcatgagcttatgtatgtgccaaggggaaaggcttcctcctccactcaggttttgaacattgtaaacactaccaagcagcaaacagatagagcctgaacgtgtgaaacttaaatatctatttagtgtttgcctcctcttcccatttttttttcctttgacagaaaaattgtagtaaggggacagtgctttttgttatcttattactgtgtgtgtgtgtgtgtgtgtgtgtgtgtgtgtgtgtgtatgtgtgtagcaaagtctacatcctagaaatgtatgctgcatgccacagctgggggcctttgtgatacatgtgataggtgaaattcattgtaaaggcatatttgaggtgatttttccttattgtaattctctgtgaattgggagctgcactgaggaagtgacaaggatgaaatgatggttactatgatcagcctgttttccccaactaaacattttcacttggttgaaagctaccagagactacagtcaataataacttaatcgtacatttaaacttaaagagcgtaattgcattgtgtgtaactcaaagaaaaaatgcttgaggggatggatacctcattctgcatcctgtgcttatttcacattgcatgcctgaatcaaaacacatcatgtaccacagaaatatgaacacctcctatgtacccacaaaaattacaaatgaaaaaagaaagtcatcaggtctcgaatatactataaacatatgtgtttacagtctcttcaaacatataccaagaaccttatttaaatctcaccaaaaagaattgtcggctcacaggacaagcttaagagctgtccactgtgataatgtgacaatcccaaacgaatcttttctcctcctttttcatatttctcccttccccacattgactgaatgatatgttgtcggttccttttgttccaatcaggtagttttcaaaatttcatggcaggggaactgagttaaccaatatatacatagcctaattagctttcaagttggctttatggggcaaacaagcaagtgcgttatacaacagggaacagtgggctcccctccctcctgtatctcaatgactgggcacacaaatgcatccccatatattaactggacaacacaacagccccagctagaccagagatggtagacaccaaagaggacatcagggaacaggcaaaatccaaataacatgattctagtttaaactggattggcctcattctcaggtgaaaatgggtttacacaatgcatccctgcaacatttgtaagcttatttgttcctttacaccacgtttcattcagaaagaacgtgaaacagcccataacaatacaagcaagtgaagatatctgtggaggggagtgggctgaccgaggaacagaagggtaggaaatgttgacccagtcgggggtgacgttccagtcccaggtcagttcccgaagtttcatgtgcttgctagaggcaggacacctatttgtttctaagctttccagcaagcataggaaagggaagtgggattaattacataaatcacacaaaccatttgcatatttctttgctatttctggtactgaaaccaaagaatacaagtggatgcttggtgttaccaacatctgcacatgagctgaataaggatgatggtcatattggctctggaaccacttacagcttctacttcagatcatggatttccacacatagtaggtattaaatgctttttgaatttaacgggacaagggaaggtaatcagaaaatgaagaaagaaaaagagaaataaatgcataaagagggtcaggcttggacaaatattgatacagtgttgtacaagaaccatagaatccaacatggtacacctgagatacaaaataacaacagcaaccacaaagagaaacatggggagaatcagggaaagaaactaagaatcataagtaggaatcactaagtgggaatcaggtcctaagcaaattgctttatgtgcatttgattatttattccatcattgcttgtcagcttccaactatccctgcccaagagaaaagtgcacagacacactcagatttaggggtaggaaagaagttgagaataagaaaagaggttctgaaaggttaaggatcttgccaaaggtcacacatctaggaagaggaacttggttaccttatcaaaaacaggaaatccattctcagtttgataatgagtcagatattgtactgactcattatcccagaatacgtacaaacattctcagtgatctgagttcctggcgtattttcttttgtattgcaatctcacaaataatgtgtagagaaagaaaggaactgcatgcaaagtgtgttctttttacacacttactttgcatccaccagtttctaccctggacaaagacaggggttggagctgttatttgctgtattactgctgtactagtcccttcttgatggttccaaatacactacactctagtcattaaacacagatgttgcctggagatcaaacgctacacttaaaatcatgattcaatctgcgtttacatttagaatgggtgtaaacttgaggagaaatgctgtattcagagatattgaagacagacttataaaatataatagaattttatattacacgtagaagcgtctcagcctgaggacaagtggcactagctgtagttgccgtcaggctgaagcctgtctatggaactgggcggggtggatctaccgggagtctactgacatgggacagtgaagaaccacctgggaaaacatcactgtgtgtcaggagggtgtgcaggcacccaagcatcatgcaaatctaacacttcagtctgaaacatgggatggcaagttactaccactcagccagctcccatgggctcatcccaggatcctcgcaggagtacacgggaatttttctcttattaaaacatgtgtgggcatacctcattttattgcacttttactttattgtaatttgcagatattgccctttttacaaattgatgttctgtggcaagcctgcttagagcaagtctattggcaccatttttccaacagcatatgctcattttgtatctctttgtcacactgtcttaaatttaaccttcaactaaataactattgtattatttgaaacgttcaagtaaactaaagttttgtgaaaactgcttttcacctacttctaaaatgcattattattgggtcatttctgacacctttttttcttttttttggtgcttttctgccgatttgaagaaataatgataaaaaagaatttctataaatgtaaggatacttggttaatgtatatttgcatttcattgacaaaataacattttccataaccatgtggtctcaagcagataaattcctgtccagaagcacggtgctaccttcagcatttaaatgtcgggaggcccaatgtgttctcacattgagaaccacatgcattggaaggtggctgctattcagatagggaagatgtaagaggatggagaacaaatgaggtcctaaggagacatgtaaggcattgggagttcttctgctgcagaacccaggctgcagcccaaagggatctgagagacagctgctactgacagggaactcacacaggccacatggagctgtttccctgccatcatcatcttctggtgggtctccttgctgacccactctgaggataagaaggtgaaggagatgtccttgacagatggcagcctatgaagtaggtttctctgtgtaagaaagtcacctcccctcctgtcttggtatggggagggaaagactgtaagcctctctgtcttataaaaatcaaagatttgtggttccaaaattatatgccaaagtatacatcttggaaggaattcaatatggtgataaaactataagttgggaaactaacaaccttggtcctagtcccagatctgatctgtcactgctgactgcatgaccaaggcaaggcctgtctgatttctaagctttgggctcaatagccataaaactttactaacacttgaattgccgcagtatgccgcccctcgatccctaccatacaccccatttatgcaatagccaagtaacttttttccagctctttcttcctagttttagaaaaatacacttactagttctaaaaatccaaacaggtgcacctgactgccccagggagaatcccctgaactagtgctatctaagagaattttctgttgacaggaatgctctaaactacaatgaatgcagcagcctctagttgcaactgcccagtgagtccttgaaatgtggccactgtggctgataatctgactatttaattttctttaattttaattcatgaaaatttaaaaagtcatatgtgcctagtggctgacatattggacagtacagctctgtatcaacttttgctaattaatgtacatatccaggatcttgtactttatttgtccttttaatcaatcaaatccaatattcaataagcaaaaattactgattgcataataggaggcttcacaaaagggcagagtctagtgaagtaaaaaacatccactgtcctctctttctcttgattacttccaacatttacaaatttgggcttgccccgctgatatggtttggctgtgtccccacccaattattagttcccataatccccatgtttcacaggagggacctggtgggaggtaactgaatcatgtgggcgatttcacccatgctagtctcatgatagggattaagttctcatgagatctgatggttttataaggggcttctcccttcgtgcggttctcatttcttctctctcttgctgccctgtgtagaaggacatgttgcttccccttccaccatgatcgtaagtttcctgagacctccctagccatgcggaactgtgagtcagtcaaacctgttttctttattatgacccggtctccggtatttcttcatagcagcgtgagaacggactaatacatccagcctcctttgacttcccttttgctgatccccactgaagttaaagatgcacatttcacacgtgctttaaagattctgaaatctgcatgtttggagtaggccaggcaatattgagaagttttggtatataaacctttgagaaacttaaagtaaaccaattttctccactttttaacaatacgagtttctgtctcctaaatgaagcatttatttcaaaactcttatacacaaaactgtaatcttaaaataagggtgggggggtgctcctgactgccttggtcttctgttctgactaatcttaacaaagaaagcctcatctaataaagacaaaagtggcatcgttatgaaacttgtattgggctctgcttctgaacatatatactggcattttcctagatttgtgatattatttagtacatatttcacctaaactatgtattccacagcacattttccaatgttatggatattttttctaaactcatcttaattttccaagttcaatacaatgcatagccatttgaaaataaatgcccactaaatttcaagctgtacaaggtaaacttactttttccccccactaaatgataaacttgagtaatatatagaacctaacatttgtgccaattcactctcctgccaccccttcttcaaaatcataggtttccaaataaaggaaacaaaaacttacggctgaataccctgctccaaattaaacataaagtaatcaaagtcattattaaatgtttttcatgttgtcgaaggaaacaaaacaacaggaaggacaagagtttaggtcaagaggttccggtgttatctgcgtccttcattataagtgatttcaaaatctttttccctccaggaaaaactagtgagtaacagcttagtctaaatgacagcagctctgtggtacgaagggtccacatttcagctaattttcagctcttcttatcctgataccatgagatggaatttaatagatggctggaacatctataacatgacatttaccaaaggatgtgtcagcggcatccatggcctcaacaaagatggagccttcaaaacataaatcaaagaaaaatataagaacatcttagaagaaaaggatgacagtgatcctgcacatttaaaatattttaaatgccttagggactctacggagcaagtagtgttaaaaataatgatgtaccaactaaagatatttagctccctgttaagagaagaggctatgtagcagaaggagaaaatctttagattttttttttcaaaacatgtggtttgagagcccacctcacactgttcctttggtaattctcttattctctgtgaaccttgtatagttttcttgggtgtaaaatagtcacaggattcccaaccttacccaattcacatggttattaaatcaataaagacaatgtgtgtgaaaatactttttgagctgtaaaaggctctacatgaaaagcttatgtaatagaatattaaattggaggtttcaattaaagccagatacaagagatactataaaccaaaagaggtgctgattgcctatgtgaatttacaaatctaaacatcactgacataatttttttaacagactttttttttttttagcagttttaggctcaaagccaaatcaagcagaaagtacatccttttcttccaaacatgggctattttgaaacatctcatgaacatcatatttatagattggtttgttggagtgagtggagataatgtttgaaggtgagataatgtttgaaggtgatttctttgtggaagaaaagggcttctatggaaagactccactcagagagcttgatatggctcttctagagttaaggagaaacagtgatatgatttggatctgtgtccccacccaaatctcatgttcaattgtaatctccagtgttggaggtggggcatggtgggaggtggttggatcctgggagcagtttctcatgagtggcttagcgccatccctctggtgctgttcttgggatggtgagtgagctttcacaagatccgtttgtttaaaagtgcgtagcacctcctcctcactctggacaggtaaaacatctcacatctcctttgccttctgcggtgactggaagcttcctgaggtctctgtagaagcataagccactatgcttcctgtacaggctggagaaccatcagccaattaaactccttttctttgaaaattacccagtgtcaggtacttctttacagtaaggcaagaaaggactaatacagagagtgagttcaggtctgacccgagtcccacttgataatgttaaaggctagctactttgttggtatagttatattgggtttagtctgtgatcccagagtttgttaaaacaaaatatgtatgagaatgcccaatggaaaatgaaaaagagctgcactgaaaccactttagtttctacccaagatgtcctggaagaccaaggagactccaacagagaaaatcggggtggataacagtgaaaaaccagcagctgagaaagaagtgatcaccggaggaggaacatcagtatatgcttggaggtgaagcagacatttcctctggtgacctctaaacaacttgtacaggagccaatgagataaagtttgcttttcacacttcctacacttgacagcttaaacatatcccatgacagtgtcagctgagtgagaactttcctgtgccctcttgctaagctcctaaattgtgcttcaacactgaggtatcagaaacagaagagagcaaaatggcagtgcaggggagcaagttcaaggtggggaaggacggaggatgccccccaccccaatatacaccacccctccagcaagtgcccagcctaatgcaggcccagcaggagtacatggcaagctttttatttgtttagttggttgttttcaagagactggacactactatgtactgaaataaagctgtaattgaaacttaaagttatccatttggccctgggagaaaatctattaatataacatgacatttaccaaagaatgtgtcagcagcatccatggcctcaacaaaaatgctatctgccaggaggacatggaaactcctttagaggagacaaaagaatcctcagtaaaaggaaccaccaccagatacagcgtgatgggttgtgcagttgaagctacaaaaggtttgtcttggacattaatatggtttggctgtgtccccacccaaatctcatcttaaattgtaactcccacaattcccacgtcataagaggaacccagtgagaggtgcttgaactatgggggtgggtttttcctgcactgttctcatgatagtgaatgagtctcatgagatctgatcattttaaaaagaggagttccctgcaaactctctttttgcctgccaccatccatgtaagacatgacttgctccttcgtgcctctcaccttccaccagaagtgtgaggcctccccagccgtgtggaactgtaaatccaataaacctctttcttttgtaaattgctcagtctcgggtatgtctttatcagcagacatacagatataccgggagctgctttacaaaaatcaccagtaggcatgaaatttccagtggctcaacacgtcccactatgaccaaccctggtgataagctcagtgtctgacacagtggctgccacacctgctcgctctgaattgtcatttccaaccctgcctcttcattctccaacctgaacaccaacatcattccacaaagaaggccctgtgtacactctgccttttccttctctacagtcagtactggatcaatgtccacataggccctatccacaacccaacagcaatctcctggtcctacttaagagcacattcaccttctaatttcaggatcttctttcatagtcttgccatacctttcgtggctccaacgctgttctttgaaaagaaaacttctttgaggcaggagaatactctgtccctttttaatgcttgaatcgtaagtttaatacagaaggaaagccctaggaagtaaatcattgtagctgctttaaacatttgaagagcctacaggtggaacattccttagatttcgtttttttttttttttttaaataacaaaactagaagaatgggtggaaacatttaggtcagataactttctctcaagctctttaacaatgaaaacagttttgtgaaaagcaatgattattcctttactcaaagtgctctagcaaagtcagatgactacaaagcaagcatgtaagagtaattatcttctataggagggaattgagattagacgactgcaaagttgattcctattctaattatcttctataggagggaattgagattagacgactgcagagttgattcctactctaattaccttctataggagggaattgagattagacgactgcaaagttgattcctattctaattatcttctataggagggaattgagattagatgactgcaaagttgattcctattctaattatattctataggagggaattgagattagacaactgcaaagttgattcctattctaattatcttctataggagggaattgagattagacaactgcaaagttgattcctattctaagtatcttatatcggagggaattgagactagacaactgcaaagttgattcctattctaattatcttctataggagggaattgagattagatgactgcaaagttgattcctattctaagattatggataggccaaggtatacaatgactattatatcattcattatcatagtcattgtataccttggcctaccattaatttacttcatgaaacatcttaaacatcaaataataataatagtaataagaataaaaatatctactatgtggcaggcactatgctaagcaccaaagtatggtccctgccccaaggaaatgaatctaataagggagcccagaacagggggacccaaataatcaagacttaattttttggtcatactccatttatttcatgaactctgtttatgcaaagtttatatttttatgataacattgaacaatagacatattatgtcatattggtttatactgacctttacctaaagtactttaaataaaaatatcctattcagagacaaagacaaagagcatggttctcatttgtttgtagcacattatgggaggagtagagttcatttctccatgagatactactgctagctttaaattatggccatctctgagtgtacgcttattagcatggcattctaaattaatatgaaattctgtatgcacaactgaagattcataacacattaaaaaaaatagggtcattctgacactagacagaaatataattctttgaaactagccgtgggagaacccgtagttcaatcataccaacaaatgactgaagggttttaatcatactcagagattcaagtggaccatgcccagtgcatgccatagactctggcatcagtgagtatcgtgccctacaacaaacccacttggctaactagtcactttacaaatcatattctatgagcatttcccttttaattttcataatttcctttttcccagtacgcaatactcttccattttcttttcagcaagggaaaactccatgtttcacttctaatccagttctagaatcttaatccccactttagaaaacagagtccagtgaattttactcttttcagggaaagcctgcagagtaagtgtcaactctccctcaaccttataagaaaactaatgtgactcaatgtgagtgctttcagcaagaatctgagctcaagttccccagattaaactctcagtttggtttctttctcgccgggtgacccaagtaaagtcaattaacctctccgtttcccacccggctttactgatgcatttacgcaggtagctggatattcccagatggaagagcatgcacgcatacattcataatgcaaactcatatcacagtactggtctgtactggcttgcctcattctgaagcagtattttcagggagactcccctgccccgcacattttatcactgtaagataagatatttgtttcttataaagcatcaacaaaggatctactatgtaggaagaaaaggctactaaattctatttatgtttccccagtgagatttttgagccattcgcttcttaagcacataaattaacccactgccctacagatgtagtttttacttccacaagtcttgataaagctcctcagtgctcaaacggataatatgtcagtttcactctgcagagactcaggaaggtacatctatgtgtagaaacaggcactggagaaaagtagcatttcacacacaaaaacagtttcaaggctagccaagtctagtacaggcaaagtgatacaaatagggcatagaacagcagggtttccacgcaggaaagaaactgatgagttcaggaaagtgggctaaaacggtgatgcatttacaaatgtgatagtcgctgatcattgccaacccaacgtgcttctcaccctctgtccttgctcataggaatccgattttttttggagatggaatgggcccagactaggggataaaataggactggtctaagccaatcatggcaattctgtttccatgtggcaaacacttgcttttcaacatgcttcgttactatcactggccatatggcccagttataaatgatgagctgtaaggagaggcctattaggaggcttctaagaattatctttttccattttgtttatttttatgtatttatttatttttgagacggagcctcactctgtcacccaagctggagtgcaatagtgccatcttggctcactgaaacctctgcctcctgggttcaagtgattctcctgcctcagcctcctgagtagctgggattataggcacatgccaccacagccagctaatttttgtatttttagtagagacaggttttcaccatgttggtgaggctcgtctcgaactcctgacttcaagtgatccaccgacctcggcctcccaaagtgctgggattacaggtgtgagccaccgtgcccggccagaattatctgttttatatagaagagacaggcactgctgtgtccgttgttatcctgccttgcacacagaattgatgccttgatgctctgttctatgccatgaaggacagtggctagtaaagctagaaacagccccgtcagtgtgtgagtcaacaagaatgtcctgatgggtttatctgctgtgtgagtgcctgatccctgccaggagacagcatcacgaaccaataaacaaaccaaccaagtttttaaacatgatacatacatgtaactacaacgtaaaatgaaacaataagacatatgaaaaacgttctttagagaaccttattttttcttttatgctttgtaggtactttaggttgagttttctcaaacccttctatgtagtatcaagaaatatttctcttataaatattttaaaaatgtatcatcctgcacaatgaataagattgtagatcacttaaccaatttccaattatctaaattaatgactgcatgtcactactaactgacagactttgtaaaacttttaatatcttttacataaaaagtaagtaatactggcttggtgtacctcattgccataatgatatgcatatgtgaaattagaaaaagcactatacaaatatcataacaattaaatatttaggtaaagtctgagcttagctcatgatttatggtaagcattcaataaattatagggatttttttttttttttttttttttttttttagataaggtctcgctctgtcactcaggctggaatgtggtggcatgatcatggctcactgcacccttgactttccaggctcaatggatccacctgcctcggtctcccaagttgttgggcctacaggcacatgctaccacgcccagctaatttttttttttctattttttgtagaagcaggttctcactataatagtagtcactccttatagtatacatacaacaaaaccatgtactttggaagtaatgcaataagtaacatgttttaaaatatatacacatactttttcagagtaatatgcttttaacttcctgcccacaattttgagaatttcaaactagcagcatgggtcaagcgcatggctgggtatcaaaacaaaaacactgagacactctacacaacaaaatgcaaagcgacatctggtatgttcccatctctccagggtcctcatgatgctgagcttttgagcattctaaaggtacacttggggaacttgcgtctgcaagaccgacttctttttctgtctccctttttcttaaagagtagtgagtaaaatcattaccaaacaaacaaaaaacagttatcattacagagggatctctattaaagaagcaatgaaaggctagcactactgtgggctggatgaaaataaatagctggattgaaaagtcaatgaattaccaacattgacccacatttctctagactttaattaactgacatcatcccaatgaataacatatgataaataaaatcttaattctaaaatactaggcaaaggacaaaggctctcaacgtacgcatttctgtgatacagaagagtaacaacgaattggctaaaattgccggcagctcagctagataccattttacttatttcagatcaatgctgggtttctccctcttcgccaaagctgaatgtgcatcactctggcttttgcccaggtccccacatagactttgataaaatacttactcagtccaccttcggctatcactcctccctgaactcgtctatcccctccatcctcttcttctcttaactatgcctctgctccatgagaccctcagctaaacattggaggagtctttgagagccattcaaatgatctgatgttttcctaaaaattagtgtctttgaacaaatgaagcttttgtgacctatacatgtgtgtcctatggccatttgtaggagttggttctaggaaggctgctgaaaatccattcaccaaaggctgattcactggctggccaacttacctaatcgtttactcaaaagttctaaaatttgattatttatgaactgcacagtgtggtctttggtgtcctgagctcttcaggtcccctcctggcccctcagtgtacaactgcctggagctgttgcagaagggagcaggggcataaacaatgaacatccctaaaatgctcctaggaagagaagaggtgttcacctataacctgaaaagtcctggaaattcaatataaaatacagaagatcctaaaagctgattaaaagaaacatatttttggtaaaccaacaaacaaagaaaatgatttggaaaatgttttttaaatctggagtaacagaaaaacaactaaaatagagattagaaagaaatcggtataagccaagagttcccatatggaattttgaagtttaggttatatttataacaatagacgtacaagtatattaaagaagaaaacgttcttaagaagatgaattcacctgtatttcataactttcaacaaattgatcattcattaaaatctgctaagaaattattgaccattttgagaataatcaaatacagaatacaataaaaatacttgaataaattccaaaagaatgtttcaaaacaatattattccttatattagtaaatgtggtaaaaatcagcaaaatagtaagtgagaaaattcaatggtatccatatgaggtgtgtgttggtggaaaagaacatttacgggtttgaaacccaggcatgaattatcaaaatgagtctcaagaaaatggcagtagcagcatttacttacaattttaaattccttctactggctgatactgatgccctgaaatggtttcgatcaaccgtctttaaggagacccctttacatatatattgtatacagtatgcaaattctaaatgtaaactatcaagaataatacatgtataaaaaataaatcatcaaaattttaagttctttatggtaatccttttttatatgtttatttttatatgtttactatgttttttatatgtttatttttaccttaacctggctcttttggaagtattagctttggtaaaagggaaaaagaggaaaatattttaacctttctcacttctctatcgactggctctttgcgaggtgagtgtgcatcatttgtgtgtggatgagagcccgtgataaggaccaaggagaacacaagcaaagagagtgggcgtgaaaaggagatgaagtaagaagcgtccacaaggccaagagaaatctcgtggcagaacagatggtggcgtgaagggcgacagtgaacacgggggccaccctggctttggtagatgccagacatgcattgtgttctgcacactttccaccctggagcttatgaatccacacagaaaccagcttcgctgtagatttaacactgtaacgcgatgcaaaacagaatgcatggtggccggttccactctcactgtcgggacatccaaaacatgccctacaaatactgtcaataacataaaataatgcgtaatgcctcctccactgtgctttcaaagcactgaaacgcctgataaccaaatctacaataagcaaagaggggatatcacacacttaggcaaaaacaccccatgtgaaaactagaaagtaagcttaggtctattctaagacttgaatttcttacataaatgtgagagtaattttgataacaagagaggtaagaagactcctggccaacaattaatctgtaacaaatattaagcttaggaatgattttacatttagactgtatttcttaataaatttcctcacataaattgtgcctaatctataaactaattttaaacaaaatccatcatgccaggcactttacatcttactctatttattgcaccatttctcatcagaaaccttttagctttaatgctattccatggcagagtatctcattagagtggcaaagataaagttctttttgagataaagtaattacggtgattgtagcggggagggggtcacccaaagttcttggctacagtaatctcctggcttctgattcattttaagaccaataaactgagtacaaacaaaaagatgttaatggtggataactctggttacctagagtttgtcctggagggattagcaattcataaccttaatcagaactagagtcctggagaattttgctcccaggaaaatatttcaagaccagatgctgtatgtgctctcagctcacttctatgtcaattctatcttctaattattattaaagtcaatcaagtatttcactctataaaaagccttactatattttaagccaattttctgttccaaagactagtcagttacttcctatcccaggggctttgctttcttgaggaggcacaagtcagttgaaatatgggctatggccaagacaatgatagtagcaagggacaggactcctcagccatgatcagaaagagtactgttaggatttagtgagaagccttcaggggaaggaggaggcttggttttcaaatcatgccaagggacagacttaccattgccatggagtcaaattaaccttaccagcccagtcaaaataattaaaaattaatacagtctctgataaagtttgttgatataaattggtgctagggaaatatttcaaggaaacaatgacatgagttattttaaattattaatttcattggtcaggaacccaatcagaattaaatatgcacatataaaacaacctcccttgtgtgttcaactctgtctcatttctgcatggacctcagtggatgacttttgaagaagcagatgaaaagtgaatgcttgccaattagctattgttcaccgttttccagtaagcattcatatttctaaaggattatagtctagtccaaactctgatcaaggtcaccatgcaagaaagaggatattctgatatggagatgaagaaaatttgagtccgggttggttctcaacttacctatgaggtcaggtgaaaacttcagacatcagttccccatgcctaacatcaggacaaaattaactatccatttcctttacaatttgttagagtatcatattaaatgtgaaacatgattaaactggagcatcacatttgaaaagcaactcattattattacatgtaaattttaaatagcattcaggaaatgttagaattaagaacaaatcaccaataaaaactttagaagattaccatttagactcatgatatgagtggatctcgttgcaaactgatttttccaaatgagaaaaaatacaattatactttcaaaaataacccaggtggctaaccaggttccagttttcctccttaggtataaaaatcttgctgaagttcacataaaccacatgctgctcacctataactagtcagccacacaagatcctatattgtatttttgttcttgatcagagacaattatgtaagttatcgatccttataaagttctagaaaatgaaacctcagaattgcctattattcacacagcaatctttacacttggcaaagtttagcacctactccattattgcaaagcctaaatttgctggtgaatcagtagtgtgactggtcggctgatccacagaaatattatttgtaggtgttactgaatgtgtatttttgttattgaaaaattgaaacatctgatcttctcctatggactagctacactagatctagttactgtactaaaatatggattatataagttatctttgatttaattgtccctaaatccataagcatatttttttcaagagtatgtttcagttatattttaagtacaagggaagtagttagaaaatagaacactgattactagatttgtatagtgaggactatatcctagtaaaggccagggctatggaaaaatacaaagcagatttttcactcctggcttcgatatttatgaactgtgtaactttgggctcattacttaacctcatggagtctctttgtaaaaacactggatgagaattggagaaaaatagaaatacaagaatataaggataaggaaggaaatcagtacactgtagtgaagccatcataattgctatgcttcatttcattatatgatgccagacagaatttctaaagggtatgaattcatggagtcaacatagaaaatttcgaatacaaatgctatttattcagcattacttgattcgtgtctttctatggacaaggcactttgtgaggtgttaaacataaactagagacccaagctgaaagttatctgatcttataacaaggcttacaggctcttcgaacatagacaagtaaggacactttggtagaatgaagggcaggaagtgaatgatacctgcaatactggagttgacattttggcccctcaggtaggaaatgaagagaggagaggccaacagctctagaaaaacttcagagaagggtcaatgatatgcagagcagaaaacagtgcttggggaagaaacagcatgaatttaaatatcaaaggtggagcatctctgggaactgagaaaaatcccaggtggtcacatgactgggctttggagatagaggtggagccgagactacaaaacacagggattgaacatccctcccaggatgctgggcctggggagcagggtggcatgacatcatcacagagcctcagcctgagatggaaatgctcacagcctcttgatgcagagcagtagaggtaggggtggttttacttctctgaaatcagttagccaaagcctagattgatttcatacatgagtatatataaatatatatacatacatacataaaatagtaatattaatagaataacaataaagaattttacatttctaaatatttatgttctggctactgttctaagtactcttcgtaaatgagctaatctgcacaaaaggaaatagatactattgtaccattgaatagatattaccaagttggcataggtaagagcaaaggaagtcaggattctaatggggcagactggctctggctaactgatttcagagaagtaaaaccacccctacctctactgctctgcatcaagaggctgtgagcatttcttaggctcacaggtcatcacctctcagccaagccttactgttcctgaggattacgacatgtcaggctctggtaagtacctactattaatgtaccatttagtccccacaacactctattttggcttgttatgtttaggccaatgctacaggttggttttctttctgtttttctatttttttcccacacaaagcatattattaaatgagaaatcccatgtaaaattccagattgatgatttcttttgattaaaaagaaaacaatacagccatactgagtttccctctcacctcttgccagcaactggcagaagcgacttttcaacatgaattccacctcacccttccactactgtcctcaccgccccctactgcccacatctaacctaacttctcatcacctgagtgatcactgtggacatatgagtatgtgacatctatcgtaattatatctgtgtgttaaaaaaaaaaaaagctgaaaagctaaaggagttaaatgtttagattagacagtccaggttcaacctccaagtccacactcataagttcctcttttcttgggcaaatgccttaatctctttaagccttattatcctcacatctaaaatagggttactaataatgcttaactgagagtgttcttatgaaataattaaaccagataatgcctgaaaagaatttagcttggaattcaatattcatttttattgccatttttaccaagaataccaggaagttggtataaataggtcatatatgccacctaaagcaatcaggacttaggcacagattggggtagatgaggttgtgtcttgtgttgagaaagccagaggagaggagcaagtggaagcaacccctcttggggacattgggcctgcagcatgctgcccggcaggagagctgcccaagaactgtcccagaaagagccccgtgggcatcattcttgtgtggctttgactctataaatgaatttctctagacagctgaaatgttcatcaaagtgaaacactgaatcacagctttctgtaattccaccattttctcaggcctgagaagatggatccatgatttctcctttattaggtggatcttttgagttctttcacaggccccgtaacacccattctacagggctgccaccttgaccctggcccacagctcctcatctgcgaaccagatgaaatgcgccttaattagcctcttgtctttcacctgtccccatcttcaagtctaatggcaaactgtcctcagcatgaactgtcctcaatagcgtttgacacatcaccctggtttatacaattttgctgtggtttccgtcagcttgcagaatagaatctgaacatgccagtcatcactggggttcctggctggtgcctggggtatttacccacacttgcacacctgactgcccccagcactgtgtccttgacacccccgtgtctgtgttctctccaccgcggggactggacacgctcggcctgcatgccctctattgcaaccacatcacatccagccaaatcccttggagccaccgagccggaacctgacactttctatcggggtcagcaaacctgttctctaaagaaccagtgagtatgtattgcaggctttgtaggccacccagtctgtttcccagctactccactctgcacttaaagcaggaaaggagctgtaggcaacatgtacagaaatgggtggggctggctctccattaaactttatttatggacatgagaatgtaaatttcatgggtcacataatgttattcatcttttgatttttcccaaccatttaaagccataaaaaccaactttgcgtcaggggctgcacagaaacaagcagtggccacagcagacttcagttgactgacccttgctttatatgcatactgtttgctgatccatactctttttttactttttaaaattaaggtataacgtacatttggtgcaccaatcttaacgcaacagcccagtgaatgttgacttttgtatataaccatgctaccatcacacagatcaagatacaaaacatttttagcagcctaaggttcctaaatggtcccttctaatcacaccgtaacagaagcccaacctctttttgctgccaaagcactctccatacttcctttcataggcctggataaagtaatggggaaacaaccctgtgtaatctaaactttcacagagcagaaagaaatccagaagacaaaggcgcataaacgaaacttcggctatcattaactatcacaaccacagaagagaatgtcttttcttttcaaagacgggtgatacatcattagaaaaactgaaaggcaatgtgttagtacacattcattttcctggcagtctcatgctgacactgcatttccttacctgggtcaaggtgagcgttgcctgcctgcaggtgctgcactgtaccctgagttttcccggctgcactctttgacaggggcctttgcaatacacataaaagctgttgtagattgatctacctgctggagaagaaaaagcagaagaagtggctaataatgctgcatctaaattgagacaagaaactctttaaaagcttgttagaggcaaattttaaaactcagtcttcaggaacattttgaaacattactggaataaatattccaatgggaatacaacaatttaatttagaaaatctaactttatgctccaagagtgaaatcttttctctctcttgccaacagccctgtgacttactcagcaaagtaagcagcctactgccaagagaatcgggcaagtgtatctgcaacacagtaaaatcagaggcactctttgccgaggaagtttgaaaagatgacaggaattctttcaggatgctcctgaattctatctcgtgcttccagacacagttttgaagactgcagatttttcctcataatatctacagagaaaaaccagcccatttatcgtgatataaatgatatgatcacagtttgctgggcttctagggttgactttctaactcacagtcacacataaaataagaaaagaggccaacgctgaggaactttcagagaccaagcagctatgtgcagaaatggatggtttgcatttcatttatgatctctctacctaggcaaacaccattcaaataatacattttcaagagtaaaaggtgaacaaacaactaattcaatagttcaatctcagatcatttctctcaactgtcaccatatagggacactctgtaaactagggaaatttaatcaatttatacttccatatctgttaagaattaactttattcagaagcacttaccagaaatacaaccttcttcctgaatttctaaattttgaaaattactaaatagttttttcttttaatccttacctgggtggataatataacagatcatgacataaaagtttctttgaaattttactatgatcatcagaggcacctagagataatatatttttttttaacatttggaatgaaaatcttcagcctcacaaatgcatatgatctattaaaaacaactagaacaaaaataatgaaaaaaatgagattctaaagtcctttgcagcttcatttcccgaatttacaaaaagagcttttgcagacatattggattatcatttgtttagctatctttcctaatactgtaggtgacaatactttgcaaaatctgaagcacaacaaagatgtaaagtttcatggttttatcatttgtttgcaatatattttataattattactctataaagattaatatttagtttccagtgggaaatggaagataaaatgtaaatacatgtttatattgatgtgaaagtactattttctgacacttctgtgtaactttaatgccctaatgtacaacatattcaagtacataaatatgacattgctgttagcaaacataataatgacataaaatgtttcacatgtaatatacatgcagcatagaaccatgtattaatgttatagaaatatttgtaacaactgactgaaatatctgtaatatgtaagtaaatgttaatggaaatatttgtaacataaatatttgcaacatgcagagtatcaaaagatcacaagaactgtgacaattctgacgtgcactaagaagtgcatagaagaagaagtgcttagaagaagaacctttactgttaaaacctttatcagcaacaggaacaaatccaatttcacaatttttataaccttttgtaaaggtcaaacaataaaaagaaaaaaggaggaagaaaaggaacaggaaaagcaaaagctttgaaaggggagtcagggctgcaaatacgctagcattgttgaaagagcatattagcaagagttttacaatattaaaagaagcatctcagaaattgcaggaaactaagtgactcttctctctcccttaaggcaatagtgatgtttgcaatattgtttcagctaatgatatatcaacgcagaatctgaaagctaaggaacttttccacctccgaatgctactaccttcgctgaagtccttcagaagttattcagaaaatactgtatgccaatgtctgtgccctagaagcatacaagatgacatgcaatctattacacacactgctttccagacccagccacaagttggggattaacagccagtctaaggaagatcaaggtcaggccagtcgtggctgcagcgcttttcaagctgttggctccacttggtcaagcagctggggcatcaggtaaatcttgagagcccctccagaacggcttccctatttatttagctacataacacaattaaaagttggcaaggttttctgtgtcatgctgtgacctggacaggcatgaaaacaaataacaccccgacaatcttctgggcaaggttcccatcggcctggctgaagggcctaaagtagaaactcttgaatatggagtcataactcttagaggaatggcaaggcaattccaaaaatgacctgagaaacctttcttgtggtatgtagctgtctctagtcaatagcatgaatctcaccctttcacttgttcttggaccttaaaatcctttctctctcctaatcaactcttctgtatggcagcttcttgattatcccaataactaaagtagcttatgtttgtgttcataagagtttcctctttttgtatagtaagttttgaaacatagagagatatttcaaaaattgtacaaatcacatccttcattgtaattcatcacttgcagatatttcgccacgtttgggttccctgtgcgcgtgtgtgtgcatatagctgtgtacacatatactacatgtataaactatttggttgaaggatctgtaacacagtttctgacatcatgctacttcacctctaaattcttcaacatcctaaaactagggatgtttttcatataaaaccatttagctttttaagtgatttggttattttgtagttctattcatagactaatcaggtatattttaagtaggcattacagaaaatgacagtggtttgcaagctaataaaagatgacaataaaaaatattggggattctctcgtcaaaccaatttaggtggtgctaagtgaagccacattaaacaagtcccctgaccataccccttctcagagctgagtgactctgtaaaaatgaaaggatgaagcacaggacatctcaaacttctcctgaccatagatgccttcctggaatgctgcatcgtgtgacactgtacttctcagaaaaaaacaatttagaaaaaaatatcagatgaaggattcaatccacttgtagggcttgatttatagaaagtgaaactgctcatgtttataaacccagatttaccaaattctcctggatatctgcctacggccaagttctttcctccaacccaaaacatcaacgaactcatataattactttgtcatgtgccaggaggttaagtctacttatgtaatgattttgcaaataaagtatgttaattttattcagaagttttgttttttttttttcctgcagagaagttaaaaagaaaagtgtactgagttcagggcccttttaaagcgtgagtcaccgtggccattcagaggtccactggctttctaccattccttagcctaagaagtccatcttcttcttcttttttttttttcttttttcttttttgagatggagtctcgctgtgttgcccagactggagtggaatggtacaatctcggctcactgcaacttcctcctcttgggttcaagtgattctcctgcctcaacctcctgagtagctggaactacaggcgtgcaccaccacacccagctaattttggtatttttagtagagacagggtttcaccatgttggcctggatggtcttgatctcttgacctcatgatctgcccacctcagcctctcaaagtgctgggattacatgcatgagccaccacgcccggccaagtccatcttcttctttagttttctctcacgctttgcctaacagaaccctcagtcaaatcttctcttttcctttcttttcttggtcaaaaaagttgctgaaataacaatgtttacaacatattgaatagagccaatatttgaaaatagtatattttatttgcttgggattttttagaaaccagtataatctttacagttatcatttttcttttatgtattttagataataggcttaagggttgaagacaggatacttaggaagagtcgttctgattctaatggaaacttttcattaacctgagaagtttccatcactagttgtcactgagaatttaattgctgggataatttgttttctaggtggggagagagtaagatttaacatatttcttaccttggtaaaatactgttcagtatcaacatattgtaacagagcaaaacagcaggaacaggacggattttaagtgatatttatcacatgagctattaaaatattaagtagaacaatgtcacccaagagaactctctgcaatgatgaaaatgttctccatttgcactatctcatattaatatatacacacacagacacacacacacacgtacatagcatatgtagccattagctacaactacctatggagaacttgaaacttagtgaggaattactctctgagttttattaatttaaagtagtttcaatttaaatagctgtctgtgggtagcagctaccaaactagaaagcacagaagaagagaataaaaaccactggtgtggctggtcccctcttcaactgacaacgcggagactcactgggcagtgaaacagcttgttttaatctgtgctcatataaaaataatgttggcccgagagaaggagaaggaagaaggttttactcgtggcactggggtaggacagaaacaggggggacttccgtagtgctagaagcagagaaaaggttctcgccatcatgtgcccttatttcctacaccaaggggatctgttcttgagacgcacctggacagcaatggctccatctccatttccatcaccacctttgaaatctgacccatatgctcaaggtacagttagactggcacttcttgtatgatttctgcccttgatttccattatcatatgatatttccctaaaaatgacatctaagagaaggaaagtagccagtgcagtctcatcctcttcgaacagctggcttgcaccaacaccacagaaccagctactgataaggagctgctggcatgaggcgtcccccaagcctttgtccaaagccccccacattgccaagcctggctattggtggtttcagctccttccctctttcctccttctgactacagagttgtccttgtttcttacacatcaagaatgctgctgctggtgtcattagctctcatttttcagttacacctgccatattccctcagttcagccctgcgcctagtcatgcagggagtcacctcagttctggtggagccctggattctcctgtggaatagatgcatggccagagtttctggacccgggacagggatctggtcagaagtaacagcaggggcacagaaccttcttcctcatcatccatcaggattattgctactgtatttctgggtgctggccttcagcagggcttgaccacatttgctggaatacacgtctccacaaggacacaaccagtatgtaccaaatgaacagaatcagcaccacctctgatgtccagcaagcgcttctttacacattatggagagagaacccacttttcttcatgttgagtgaaggtattcattagttctagtttaaccaatatgtacagaaatagtccaaagtggttccacatgaaattcatttggactggacttcctgaatcacctcttctaaggacaccttgctttggagccttaaaaagatggggatcggcctgccgcagtgactcaagcctgtaatcccagcactttgggaggccgaggcaggcggatcacaaggtcaggagatccagaccatcctggctaacacgatgaaaccccttctctattaaaaatacaaaaaattagccggcttggtggccggacccctgtagtcccagctgctcgggaggctgaggcaggagaatcgcttgaacccaggagacggacgctgaagtgagctgagatcccatcactgcactccagcctgggtgacagagcgagactctgtccccccaaccaaaaaagaaaaagatggggataacgaccatttcaccattatgcaggttactgggggaaaagttgctaaactgggcaggtcaaacacggaggcttcattatctcactagaaatctccctctagggagccacagtcagcactctctggaaaggtcatgcagccaaccgattcacttgaccgtcctaacatcccactcagcgcatggccccgtgtctgcccatctttccgtctcactatgtgagtggaccactctcttcagttgaacgcttccttccctctccttctgaaggctcatgggacctcatgtgcacaccactggccctcaatgcgctcaccttgacctttctgtacctgtccaaacttttctatggatacaacctctctgtgtgtaacacttcactctatttcatatgctccaaatggctagtgaagttccctgaactcaataaacactcaataggtatttgctaggtcaataaattctcccatatttttaatggggtgaaaactgaagtgagcatggtggtgtcagggcaacaaatataaaatagaatgcagccatgatcattcaatatctagaacatctttcctaccaaccagacaccctttaaattgttgggatatcatatttgaaatcagtaaaattaaacattagaaaaattacttacataagaactaaaataaaaaaatgtttatataggacttggtgtaactgaatgttaaggagaaaaagtgaaattctaagtttaccaacaagtagaactattctaaaggaagacagttattacatgaacactcttcactccaaaccttgtccaataggttattacacccaactgaatcaaactgcctgttccatgcttttaacgagccataaacttaactcctgtggagtaaccaaggttatgctatattgtaaacagcttccaattacataaccatccatccagtgaatgtacttctaaaaaatacttctaaaacatgcttagcaatctctaaggagactctacacttaaaagttataacttaattctcaaatttttgctggggttttaaattaacgtatctgcacaataatttgacctactgaggcaaaaactgctgattaaatctaatacctttttctgattttttggttgttgttgccaatttattttttcatttttcattttgaaaataataatgaaatttcccataccaagacaaaactgtagagtgaagcaaaatttaagaattaggtttaaataaataacaaagtacaaagccaaaaagagtaaatgtagttgctttttctttcagaaatggatacgggccaggaaatgggcacagttaaggtggtgccaggaaagtcacagctttccaaaagttgaataaactccataatataaatgtagatggaagaaaccatcaatgctgcagataatgtgtccagtttcctcacaatgacatctctatagcctggggtatgtccatcttggcttaaagaggcagcacctatgggaaaactggctagccatatgtagaaagctgaaactggatcccttccttacaccttatacaaaaattaaatcaagatggattaaagactaaaatgtcagacctaaaaccataaaaaccctagaagaaaacctaggcaatgccattcaggacacaggcatgggcaaggacttcatgactgaaacaccaaaagcaatggcaacaaaagccaaaattgacaaatgggatctcattatactaaagagcttctgcacagcagaaactatcatcagagtgaacagacaacctacagaatgggagaaaatttttgcaatctacctatctgacagaaggctaatattcagaatctacaaagaactcaaacaaatttacatgaaaaaaacaagcaaccccatcaaaaagtgggcaaaggatatgaacagacacttctatgcatccatagaacagacagctatgcagccaacagacacatgaaaaaatgctcatcgtcactggtcatcagagaaatgtaaatcaaaaccacaatgagataccatctcatgccagatagaatggcaatcactaaaaagtcagaaaacaacagatgctggagacgatgtggagaaacaggaacgcttttacattgctggtgggagtgtaaattagttcaaccattgtggaagacagtgcagcgattcctcaaggatctagaactagaaataccatttgacccagccatgccattactgggtatatacacccaaaggattataaatcatgctgctaataaagacacacgcacatgtttgcttattgcagtactattcacactagcaaagacttggaaccaacccaaatatccatcaatgatagactggattaagaaaatgtggcacatatacaccgtggaatactatgcagccataaaaaagaatgagttcatgtcctttgtggggatgtggatgaagctggaaaccatcattctcagcaaactatcacaaggacagaaaaccaaacactgcatgttctcactcataggtgggaattgaacaatgagaacacttggatgcagggcggggaacatcacacactggggcctgttgtgggatggggagaggggggagggatagcattaggagaaatacctaatgtaaatgatgagttgatgggtgcagcaaaccaacatggcatatgtatatgtatcaaactggtatgttgtgcacatgcaccctataacttaaagtataataataaaaaataaaataaaataaaataaaataaagaggcagcacctctctggagccatgacctctttgtcaaaccctggcctggccttgtcacctttgggaaatcagctggccctcaatgcctgttctctcatctgcaattatatgtctactattattgtctcagtagacaataatagtatctaactcagtagactgtggtaaggattttaaaaataataatggaggtgaggcacttagaacaatgtctgctatacatggaatgttcagcacatgttgtttatttgtatttgctgccaaaaaaattctgaactcaagctcctcccacggattcttcaagctgtaggcatttacccctcctacttcctcaggtggctactttcctgtttaataaatgttgattcttagacagtatttccatcttaaatccactgcatttttgtaaatagaggaaatataaatcttaaataattctttttaaaattacttcattcccaaccaaatcctttacaattaaatatttaataatattatggaacacaaaccctgatggaaagtcccaaaattgattgaaatttttctagaatcatatttgtttctgtgaatcacttttttattatgaggtaagagatacaggggtggactgcagaaaagttaggaaggaaaataataaacaattacatgatctagtccagttgataaaattttcaagttggctaatatgctttaaaaaaaagtatttccaaaataaaagctttttttattgtatggttgtggaatggtactaaaggggattcaatatgtatttcaaaatttaatatgaatggcagacttgttaaatttgcatccactcttctttgaaaggtaggtacgattgtcagcatttcataacaaagaaaacacaagctaatgggttgaatggtgtccccaagacagcactcggggtcatcagagatttacaggtaagccttcctcattagaaagcacaagctttccttttaaccacatgataataaccttgagtcagacggtggactttacaaaatactgtaggggactgattccatggctcttgcaaagtggcacttacacacagatcggcaattatggacccaggccagcagtcacaaacaccactgcaggtgctggctcactacccccacatccctcatgcaatcagtgctaacagtttcatggaaattcccattaatgttttaaagcactggcattcagtaagaatgtgcaggtacagcaattaccaatgaggaaaattaagtctcattttcaaagattagcacatgttctacaaattgaatgttatcccaagaaatggaatccatggaatgacctgagaatcaatacaatttcttttttatttttacagaagtagtacttttcttgctatttaaaaaataatttaaaattttttaaaaaaacattctaagtgttagaaaaacctgttacgtaaatgaaccctcagaggaatggcattaattaagagagtagagcaacacggtgtgagcctccaaactcccacattctttgttcatcttcaatagccaatataattagttttgtataaatattttatttacatataatatttcctatcttcactgctaacataaaataaacctcttacaaatttcgatgctttaagcatcttatttcacctgtaacaaataagacaaaacattcaatgttaaaaaatttggatcatttctagtattgatttccaaaagcttttggtggtgattgagattcataaaatctctactacctcttaaaagaggagaagacatatttttctctagtaacatactgataagttagaaacacatggtgatgtcatcatgctggggggaaaacatagattatttttttcctttaatcaagactgataagactatgaattacatattgttctaaaagtctgcactggaataactccagctgaaacactcttcactggtactgtgggaccatgaaagtctttctatatcatgagtatctcagtcaaaaggtttccaggaatccatctaagacctcactcaggggccgcctctctcctaccctaaacactccttgctgtaagttcccttcaagttgaatgtctgtagcaggctgagctatcccatcttctgcagtgacttcacctgtttaagtcagcaatcccccgagatttgaagcttctcaagggcaagtttcatgtcagtggtctcacttctattccccacccccaccttcaaccaaaaagaatgttgtcccaggaagacattaaaccctgtgaatgatcaagtaattaagaaattggtgagattaagaaagctcgcttaaactcaacattttaaaaacacaggaaagttgctcggcctgtgctacagattacagtaatgtttctgtttacttttgatattgtctctgcctaaagaagaaaaacatcgggctttgagaatgctgcagagtcacaggccggcatgtattcttcattgcctctataaaaggtaaacttagagaaatctaaacatgcttatatacagtcaggcattgtttaacaacagggatatattctgagaaatgtgtccttagacgattgtggaattgtgcaaacatcagagtgtacttacacacacctagatggcatcacctagtacacagctgggccctatggtacagcctattgctcctaggctatgaacctgtagagcatgttactgtactgaatactgcaggcagtaactgtaacagtaactgtaacacaatggtaagtatttgtatacctaaacatatctaaacatagaaaaggtaatgtgacattatgagggctatgatatgactgggtgatagaaactttttagctcaattaaaatcttatggggccattgttatatatgtggtccatccttgactgtatgtctttatgtggtgcatgactatattagcagtcaataggaaaaaaaatgaagatataaattgataatttatcagtcagtatctagctttctaaatgtactttaatcttgtctgcaaaaaggattgggttgtttgggaaaagggagaatgatggttagaaagtggggtggtggtcctaaagaaacagaagaatattaaaaacctatcaagatgccatctatcaataatgttaacaataaatattgggggaaatctcatggactcaacactagtagtttgtgagaaaataatgaaacaatcaagacaagcctccctttaacagttttcaaatcctagaataacactgagatgtattccgaaacaccgtgaagggtatttcacaatgcatacacaactgggaaggagcctagcatgctcacaatagtaaaacgatgctgggcacagtggctcatgcctgtcatcccagcagtttgggaggctgagacaagttgagcttgagctcaggagttcgagatcagcctgggcagcacagtgagacttcatctctacaaaaaataaacaaaaaaatagctgaatatggtggcacatgcctgtacctccagctaggaatagctaggaggctgaggtgggagaattgcttgagcctgggaggtcaaggctgcagtgagctaacatggtgtcactgcacttcagcctgggctacagaatgacaccctgccttaaaaaaataaaaaaaatgtatattttgtagaattattactatagtaaaaatatttccaaaaaaaaaccatacacacacacacacacacacacacacacacacacacacacacacacacacacacatatgaatagtaagaagtaatagagtcttatattgaaagttctttgatgtcctattctggaattattctagcttcactttcccatgatcctgtgttctatccagatgcatccactcatacccttaggaggccagaaggcagccatgcaccctagatcaaaaggtgttggctcaatgctgttagggagtgaccccagacacatcccctatctctctggagcttggttcaggtctcagacgtacagcatacacacacgaacaccaaggtgccaggagacactgcaggaagaccttcaaaggggaacagatcaaacaaataggcacctgaaggaagggaagggaagtttagaggtggggccaattcaacacccagagttctatgacttccaattgcacgcactttgtttcagctgtaccatcttttctatctccagtatcctaggttttgagcagcagaatcgtggtttccctagagagtcaagacagaaaccacagcacagactgcctcctctcctttcttcagggttggatggttctctctgtgtagttggggatggcagccactggttacctgtggctctgagcacatgaaaggtggttcctgaaactaaggaattcatttttaaatcttatttacatttgtttaatttaaatttaaacagccagttctgtccagtggttatccaaatttgggcaacacaggtctaagggaatgaattccttcttaacacagattgaaggttccagggaagttacctgtatatttgcagacttttatccagtacatatgcaaataatttctgtccagtgaaacagataacacccaaaatgtgtggcctggcggaaatttcttagttgataaatagatagatagaaagatagatccctaatttctcaaggctctctgaattggtcatggtatcttatgatgtccctcattcattaaaagattaaataaaaatttttacatgtgttcactttatatttgctttataattttaccttttgtaaattatactttaggatcttatttttgaggagagagaagattgttaaggctccagcttggagttgtctctcaataagtaagcaataaatattcacctttcttcctcatcctttatccctgctaacagcatctaggaatccttatttcatcctacttccccatctgcaaccttattgggcccagaaataccacttcctctaggaagtcttacttaattcctccatttaatgtaaatcccctccccctaaatgcccactacatttgagttgcatcattcttaggggtcgtaagctacattctatctcacaatatcccatagataattttatctctcctaccaggctttagattcttttgaaggtgaaggctacattttattgcattctccctggtgttgatgaataaaaacggtaaatattatgtggaggaaccaaataactagacttgaaactaatggtgtggtataaaaaagtctttcagcttgcaaaagataaaatcacaatcaactggccttaaaataacttaatctctgtgacaatataatgaggaatgttcttccaggcccattaaaatgacatgcaatttgataattatttttacagtgtcaggattctaaactaaatgtttctcagcttctgttatctggtgatactaaatgaatgttgtcaaaagattaaatgtaaattggttataaatcttcatttaaccacatcatgcagggaaggttacattacagccaccatgttcgtgtcatcattaagaaatggagtcttattttaatagtattaagactattgaaattattgtttattctatctaattggctttggagttgaggatgaagcttttgatgggcatcactgaatacaggagcaaaactgaaataaaaatgaggggcaggccgggcggtggctcacacctgtgataccagcactttgggagggcaaggtgggtggatcatgaggtcaggagttcaagactagcttggccaacatggtgaaaccccatctctactaaaaatacaaaaattagctggcatggtggtgcatgcctgtaatcccagctacttgggagactgaggcaggagaattgcttgaaccgggacccgggaggcagaggtagcagtgagcaagatcgcaccactgcactccagcctgcgctacacagtgagactctgtcacaagaaaactgaagggcaatgaacttaaacccttctggaccccaaatggacaaatggacaggatggggaatagctgcagccactatctgcaggaaacactatcattgtctgaaaggccatcttcactttctaactagattttccaaactaattaaacaatctaatttcagtgaaaagtccttcttttaaaaacccagtttgcggccgggcgcggtggctcacgcctgtaatcccagcactttgggaggccgaggcgggtggatcatgaggtcaggagatcgagatcatcctggctaacaaggtgaaaccccgtctctactaaaaatacaaaaaattagccgggcgcggtggcgggcgcctgtagtcccagctactccggaggctgaggcaggagaatggcgtgaacccgggaagcggagcttgcagtgagccgagattgcgccactgcagtccgcagtccggcctgggcgacagagcgagactccgtctcaaaaaaaaaaaaaaaaaaaaaaaaaaaacccagtttgcctggctttttcaggaaatgacctatggtttgatcacctgtccaaaccatctggcggcaggaatgtgatctagttagactctcacagacggtgtctgggaagctccatcattgggctttaatgttaaagccacacggccacacagccaggacactttgatgaacagccactcacggacacagtgagcccatcatgagatgatgagaccaagttgcattacaatgattttgacagccagcaaaattatatttaaaaatgaaatctttcttttggttctgtatttgaagtaaggaaaatcactttgggggtaaaatcagggttttggaagaaactgatacttcttattaggtttaatttaactggcagtaataattaggacatgataattataccaggtgaagcctgcaatagacttagttctactttaatacttaattgatattgcaaacaccaagattttcggtgtacagacaaatatagtatccttgtataaatgtatatgctcaactaatgcagctattctacaatcgaagaatctctccttaatcaaggaaaatgattcatatcagaaaaactgtaaaaagcacctcttgacacattctccatgtgctacatgaaccaaggcccaatcatttgttcccctcagtctctctcctgatatgcatggtttccacatccctttctacagcctctgtgtgggggtaggaagaaggaagcagaaaaacaaacacacacatccacatgttccttctccttactgctctggcttctcagacttggtcccactacttacatttttttgtttgtttatttgtctgtttgtttgagacacagtctccctctgttgcccagcctggagtgcaatggtgctacctcagctcactgcaacccccacctcccggattcaagctattctcctgactctgcctccctcccaagtagctgggattacaggcgtgtgccaccacacccagctaattttttgtgtgtgtatttttagtagagatggggtttcaccatgttggtcaggctggtttcgaactcctgacctcaagtgatctgcccacctcgccctcccaaagttctaggattacaggcatgagccaccatgcccagttttaaatttttaaaagagtattaataaatacatcaatcagaggaatatgtaagattctactgagaagcacaattcctattagcgcaagggagacaaaaacactatcatggtattgttaaggctccagcttggggttgtctctcaataagtaagcaatattcacctttcttccctatcctttatccctgctaacagcatctaggaatccttaatctatccgacttctaagtaggaggtgagcaggggtgtgggaaaacattctggcaggatctctatgcaaaagaaacaggtggtttagggtgcgattgagaggtagacatgtcccacacagctccagcacagaactgcacgccggggtgacaggtctgcctttcagaggactaagctgctgtggcaacagccagccacagccctccagaggaaggaccacagttcataaactttagagtctctgggagcacttgctggggagcagcgtgatggaggtgctttccagaaggcggtgctgaccaggccgctccctgcggaagcccctctggggaaggacactgggcagcaggaatgatggtggtggctcagcaggggtggagaactcctgtgtgcagcctgtgttcctgctgagagaggccccaagccctggagtcatgacatcaggaggctgtcgtgactcgttcactaggtgtgggaagcccagcactgtgtagtacatgctgcagagggcagaaccctgaggtgtgtggcagcctagagtcctgctgagcatggcagccggggctggaaacagtgaggcctgttctggagtgcctctgtgcaaatccacctatctggggttggggattggacatgagttatttattcgtttattagttattaatttttaagtttaccagggaaattgcatgcatagcaaaatatggaaaccattcattaaaagattcatgagactaaggtatcagttcagtggacacaaaataagcattccaggagtagaaagcaccctactttgtggggtgacattgagacagtgctgggaacctaacagtgaagctccctatgtgaggacctggtgccacaaatggggtggtagataatgcacatgggcctccactcatgttcctccgtggcagcgaattaaagaacatccatcttcttacttcttttctgtttctcagttgccaaccatatgcctgtttagttacacacctcggcatggtggctcacacctgtgatcccagcactttgagaggccaagaaaggtggatcacttgagcccaggagtttgagaccagcccgggcaacatggagaaaccctgtctctacctacataaaaaataaaaattaataaataaattagctggtcatggtggcatgcacctgtactcccagctacttggcaggctgaggtgggagaaatcacttgaacccagtaggtcaaggctacggtgagccatgatcctgccactgtactccagcctgggtaacagagagagttcttgcccaaataaataactaaataaataaaataagaaatcagccaaagacttcacttgctctgacagaaactttcacaaaatctactagaacgcagtggattcagagatctgtcaaacacttctttatctaatactgcataggtgactccctgtctagaaaaattaataaaaactgacaagccacctgcactgtagctcttccgcttcctctactgttcattattggctttatttcatttctatattaaactgcatattacaaactcaggccagctggatctttgcatagatactatatcttgtttctgccagagatgatttttattcagaatgaacagtaaaaggcaacactacgtagaaaatgcacttgagttttaaaataaagatgaaaaaacttgtgcatcatccaatggtcctccgcagcatggaggaaaaaaaaaaaaacatacttcagggagataatatctttccttctccatttcacaaatgggtatcttcaattaaaacacttgtttagattcattagtgtttccttgatttgattcttcggtccatgagtaaatacattttagagattaaatgattagtttctttacatatgaaatagggctaatagtatttgcctttaatgatgttggagaatagtaaataaaataaaatacccttgccaggcatgtacagttgctcccttgtatacataaaggattggctccaagacctcctatggacagcaaaatccaacagtgctcaacacctttatataacatggtgtggtatttgcctataatctgtgtatatcctctcatatattaaaattgtttcatcagcaatggggaaaagactccctattcaataaatggtgctgggataacaggctatagatatacagaagaatgaaattcaagatggattaaagacaatccatcttggagttcatttttctgtatggtgattcctatacagaaaaatacctatcaccatacagaaaaatcaactcaagatggattaaagacttaatgtaagacttcaaactataaaaatcctagaagaaaacctagaaaatatccttcccattctaggccttggtaaagaatgtatgcttaagtcttcaaaaggaattgcaacaaaagcaaaaattgacaagagggacctaattaaacctgcataattaaagagcttcggcatagcaaaagaaacaaacaagggagtaaacaggcaactacagtctggaatcttcaggaatgagcccagcaaggccagagttcatgggggaaaaattttcaacataaacgtaaaagagtgactaaatcaatcaagggtaagaagtgaagattcaagtacaaagcagagggcagcaaaccaggtacaaaggaatctgtcacctatgcagtgagcataacccaacaggtagtttctcaaatcagagacccaaccagtaaccaaggtaaaagagggactaaatcaatcaacgaaaaaaaagtcaagatgcaagttcaaggcagaggtcaggaaacggaactccacatggacacagaatggtctactcatggcgcagccaaggggaggggcaggcagccgtcagggaaaagtactcaaaaaggcaacacttaccgaatgactgaaatttggagtcatggatttcagcagggatttgcagtgaaagaaacaggcatatagagactaagttcccaataaacgttacaattcatcctttcactctcctcttgaaatgggatgtattgtgaatgtattgagctaaattatcctgcatggctttggccagctatcccattctctggtgagtgtttattttcaaagagttagatgagtgaagagcggagaatggtaatgtaaccaatctgatgccttgttagaaaatcttccctcatgataccagaatgctttggtgtgaaagactggttcctgctggaatagtttcttttttaagactaatgcacaaaaatgcatattctgcctatgtttcttcccatgatgtgtattcatttagtgcgtaaggaattatttcttttcttccttgttcgcctcagtcctagtgcccagctcagtatcttgcatttgctgctagttgatgacactgaatttgcagcaaaatgaaatagaccttcttcaattggtctggtctgtttgtcactgagtatatgtgtcattgctgtgacagtaacctggctgatgaatgaaatttactggactatgaacagtaataagatattcctgaagccctggtttctcactttgctatcttaaaccaaagctattaaactcttcaaataagcatgctttattcagtaattcatagacttcaattaaatttggagcagcagagaactctgaacattcccattgatgccacagtggtatggccagagctaggctcaactgctccaaaatcgtcagccaaatacctcagtctcccaagccaaaatttgacatagactatgcttctccggccttatttcattactcaaaataagatgattgaaaaatgtatgaagcttacagtagaatactagtgggcacaagagaggagatgtaaatattcaggtaaaactcaataagttcagaaaaagattttcagcagatgcaaattaattggaaaaaatgtcagatgataaatctttgctttaccactttgcagtctgggtttgacaaggacataatctctaaaaaggaaggattttcaaaagaatcaacagaacattaaaggtatagagaattcagacactaattcaatcatacataatcttatctaacagttaatacactttctaagatgacgtaccagttggaggataagatgcaaaggatgaaaaagataaaagtagatttaatgcaatgttttacaggtaaaacattggttttggtttgaataacgaccttttactcttaccactttggacaacataggaggcagaattctatgataatccccaaaattccagccccctaatatacatgtcctatgtaagtaaccctctcgccttgagtgcaggtggcacctgtaaaaatgatcagatatcctcctattaggaggttatattaaataccaaagataaaggatttttgtagatgtgcaaaaggtcagaaatcggttgattttgaattaatccaaaaggagataccctgggtcggcctgacccaatcagagaagctcccatagaaaaacagtccagatcttgtggaaacgaagatacggagatagagcttccgaccgctttgaagatgtgaactatcatgctgagagtcccacgtgtcagggcattgcaggagcctcaaggagctgaaagcaaccatggctgacagccagcaagaaagctaggacttcagtcctacaacttcagggaatgaattctgccaacaatcatgtcagtgtgaaaaatgaatcccaaactgcagaaaggaacatggcccaattaatgcgttgatccatccttgtgagaccctgagtggaggatgcagttaagcactgctcacaatgtctgcgggtcagacctgaggaaatgcgggacctgactcacagaaattgtgagatcataaatgggtgtcgtttaaagccactgcactagtagtaatttattacacagcaaaaaatgactaatacgtgtggctggtttacttcacctcactgttagttttcttttttttaattttattttattattattatactttaagttttagggtacatgtgcacaatgtgcaggttagttacatatgtcatatgtatacatgtgccatgctggtgtgctgcacccattaactcatcatttagcattaggtatttctcctaatgctatccctcccccctccccccaccgcacaatagtccccagagtgtgatgttccccttcctgcgtccatgtgatctcattgttcaattcccacctatgagtgagaacatgcggtgtttggttttttgtccttgcgatagtttactgagaatgatgatttccaatttcatacatgtccctacaaaggacatgaactcatcattttttatggctgcacagtattccatggtgtatatgtgccacattttcttaatccagtctatcattgttggacatttgggttggttccaagtctttgatattgtgaatagaagaccataataggagggcactttaagaatttcatgtgattgacactcttggcatgtagctagcatgtaataaaagctcagtagaggcagttaatcataataatagtgctgctaatagcactattagtagcagcagtataaactgcagtaattgtgacaggctggaactcctagatatgcttgtaaacaaaattaaattgggatgaagaattctacaggctggtatttgactaaattaaatcaatgcttgattaaatctattgacatctatacgtatgtgtatattggcttattccaaatagacacgtgacacacacacacacacacacacacacacacacacacacacacacacacaaacataatgctccagaaacagcacagtatacctttctacaaatacactacacattttcctacctttgtatctctttcttatgtcctggtttttccccctgaaatgtcattcccacagctctacctgtaaaatttgttgacttttcattgcctacctaggatattgtgtattaacaatgttccaagagctgttgttgtcgttttgtaatatgagataggaatcatatgagataaatattactattattccaatgtatccctttttaaaggacagggaatgaaggactacaaagactgatttggctgtgttcgtggtgtggtgtcagcatctgaaattagtcactcaagctcctggttgtgccttccaccaccacaataagctttgagtcgatggcccctcatagatactcctccataccccaaaaagatttttttttccttttcttatctcttaacgatattttatttgacttagtagggtttaagctaagaccaagctgagctatatttggcatatagatacactgagtttacagaactgcctaacaatgttctggtcaacaatggactgcatatacagtggtagttttataacattacaatacggtatttttactgtactttttctatgtttagatacacaaaaacttgccaatgtcttataatttcctgtagtattcagtccattcacgtgctgtacaggtttgcagcctaagagcaacagctgtaccatgtagcctaggtgtgtgcgaggctataccatgcaggtctgtgtaagtccactccatgatgttcacacaatgccaagatcacctaacggtggactactcagaatgcatccccctcaaaaagtgacccaagactgaatttacatccactaatgtgcatgtggggaaggacaagttggagaaaaagcttgatgcgtgccgtcatttatactttcccagttggaggagagaagccaatcaaagggaattaacagagaggctgcaggccttctggaaggaatctatcttgagggaagtaggcctggggaattggatgctgctgcatcctctttctgggcacggacccaccctgacccagccactctagtattatacgccctagggagaaaatcatggcaaaaaattaaggttgttgctgcaatccccagggcccaagccatcttgctctgagctgctataagagttttacacagtgcaaagccattttctgatcaaattttataaaaaaccatactcatctgagatgccctgggttagtggtacccgaaactcctggtgttcttgggagagacaggcctgttgtcttggttcattttctgtggttataacagtatacctgagactgggtaatttatcaagaaaacatttatgtagctcacagttcttgaggctgggaagtccaagattgggcagccctgtctgggctgcatcataacatggtagacagcaacacgtggtgagagcacatctatgagtgagcaggtgcaaaagacaaaacacaaagagtgaccgaactttataacaacctgctctcatagtaactaatacagtccctcaaaagtaagaacccactcttgtcagatggcattaatccatccatgactgtaaataccttatgacccaagcacctcccgaagttcccaccacctttaaaccaacacacctacattggtgaccaagactcaacaggagcttctgtgagaagaaaccatattcaaaccatagcacctgttgaacttgagaaattcaggcttacatgttattgtggtctatttttaaagctgagagatcgggataccttctttcatctctttggtatcttcagaagtttgaaaagtatttctaagttaatctaaccttctttttcatactaacctgacactgatgtggccaaagagacctggagaacctgagatctctgctgtgcacatctccccaacactatgcaccttggagctcctcatctctgcaccctccatggagccaactccaatgctgtacacacagcagaggcttaataaatgtgctttgaccaaagattttgttgtatcaacccacagtaacaaaattgacagtagatgtagctgatgtgtttaacttcagaaaacatatatggggaaatctcatataaaaggacaatgtggatttacctgggaaatagttattaactaatgtaaactgctggctacagaaaatgactgctgttaatgtagggctgtatatatatatatatatatacttttgttatatatttatacttctattattttattattttatttcctaaacatatatgtttaggaaaccatatgtatatacaaatggaaagagttggaagcaatgatcccccaggggaatctattgcatacaggtagggagaaggcatcaataagtttaataataataataataataataataataataataaaattagatcaaactgggcaggttagaaagaacttaaggagaaagagtcagtgcttaccctaagaaagaaaagactcataaaaaaagagagactgagaaaagcagaaaaataagaatcagggctatgcgctttgagacagacaggcagacaagacagaggcagagacagatacagagagagagagagagacacgcaggcaccagaaaggagagagtgctcccctccaaggctgcgctgcaccccttcctgggtgctgtggataggggccctagggctcctccttccacaatggcactgtaatgggaaaggcccacaacaagcatgaaaccagtcctcacgagcagagccatgtgggtcaaattactgcaatttgggagaaattctgcaaagacatttgggagggatttgtgcaggaggaacaccaagaattttgtttgtttgtttgtttgtttgtagagagagccttgctctgttgccaggctggagtgcagtgctgcaatcttggcttactgcaatctccgcctcctgggttcaagcgattctcctgtcccagcctcccgagtagctgggactacaggcgcctgctaccacgcccagctattttttgtatttttagtagagacggggtttcaccgtgttggtcaggctgatctcaatcttttgaagtcgtgaactgcccgaagactccatgagtataacaagattaacttgagcctaagaattcctaggcatgggcagctcgctgcttcagccactggctcaggccaaatcagttcttcaaaatcagtcatggctccagtcccctccttggtatatgctgctacttatgaggaaatcctaatcctgagcacagaagttcattctcttgctgcgctaatgatccggccagaaagtgctgacagccggctggctgcctggctggctctcctgcaaatgcacagtcttcttgtcatacagcaggaggagcacaatggataaccagtgtatatatctacatttaactttacgtaactatcctagtatacgtatgggacttgcatacagtcttccgcatatgtacatctttacgtagttggtatgatttctctgtaataaagtccaaattttagtgtgtgtgttaattctcttaacatccacaccctttactcattgactattgcattcatttttagctatgcaacactttgaaaataagggtttttttcccccaccttaatgtaataaaccaaaccactgcaaattttatcttgcttttcattatctggaataatttagctactttttttttctctctctaccctttatatctatatccattagaacacagttcctgaaaatcatggtttttgaaaacccaaaacatatccaattatagtttaaatgtaagagactctctcaatgatcaataaatctgacacccacaaacacttgttttactttagaaatggcgcaaatatgtgagtcccaaattatgaaattatggtgttgattttcactttgtgcttgacctctacctgaaggtacaaagctgaggtctaatttgacattaattaatcttactctcttcccctcactcttaaacttgaaaaacatagtagggaaaaatgcactagccttctaccattcttatgccctatgtgacataaaaacaaaagtgaagttagctacttagtcaaagctggcaaatgcattctcaccatccctagtgtccatacagaaaacgtgcatgccttctggacagaaaacactaaggttgtgttcctctattgaaatttgggggaagtccaaaaagatggacaaaggatgttgtattttaaaaaccagtagttccattaaaaaaaaaaaaaaaacttaactacttagtgacctgagtgacatcaatgtgttcttgtgagggctattttctcatgtttggtggtgaatgtgcagacacaatgtttatcgtagagagaattctccaaatagaaggtgtagaaacctcactacgctgagctcattcaaggacctgggcataaagcaaattacaagagggattgaaccacgtaataagagagaagcctttagtctttatttctactgaagcaggtatgctttagagagacgtgtttcaactgaaatgcacaaaccacaaaatcactaaattcaaaattcaaaagagaaattcatcataagggctgtggaattgacttcttagagtatattttgtggaaaatagaaatctggagcactacattttagatgcaaagcataagtgggtccccgatgttacagttggtcaaccacacgtacagacagggactagagactcttctctccaccttcaaaaatgacaaatattggtaatgagagtcccagaactaatcctttcctgtataaatgtgaatgctcatttaaaatttgaaaaataaagttatgattcattaaaatgaaaaacaagaaatttaggggaaaaagttcttagtccattgatcactcatctcactttgctgaaagatcgttaaatggtttgaaattaatgtctgataaatatgtgagctgattgaagttataaatatcttcaaacagctattcaaagcttattaaaaatcttcactttaatgaggcgaaaacatgaaaattgactctacctaatgcctagcagagtccaatattgcactttacatattggtttacaaacattatttccaggtgtctttaaatagagctccaatcttgcactgttctgatttttcaaaatccttccagatatttggactcaagtaccatcactaagaatagaacccacagtaacatcagcctagccacaagcttccacatgcaccaccagtagctgctgctttgcggtgttgtatgctggatcttttgtacacctctaaatgatggaaggtaccacagcgcaatctatgggaccacttctgttttctatccaaactcgctgctcaagtgatcttctcagtcctatggcttacgtatctaccctttgctttttgctaaatttatgtttccagctttgagctgcagatttgtacagcaaattgtctccctgactcatctgccttgccatctctaaattactatgcccaaattagaatccctgattgttcttcaacaaaacctgcttctgcctagtctcccccatcccaacaaaaacacccccagtcacccaggtgttcaagtaactgtgattcatccttaatttctctatttccatcatattcagcttctaatccatcaacagatactgtaggttttatcatcaagatcactccagaatgagaccacctctcaccaccttcagaatgacacaagcgtcacccacgcaagcacctgctcttacctggaatccattacctgcatccatttcagcctgcctgagccatttctccaacagaggctgggcttttcttttagaaacatgaattagagcccattattcctttgctcagcacctgctgatggctacctatgcatattctttacacacatctgcccctgcccctctcccagatcaccagttcattcccagatccagccactctacatctacatacaccaaactcaatatctgccctcggccttggcacttgccattccctcttcctttccactgttcctctcaacattgcacagctagttccctcaatctatccagcactcgacttagagaagcctttcagaaatagtctgtttttgtacaaacgaccaatacctgtatcctttcgatctgtttgacatttctgtatggactcataactagctcaaattatatagcaaattaatttaattacttgcttactggccatctttcccactataaggtcagctccatgaggctaggaatcctgcctgttgttttcaccattacatctgagtacttagaaccactccgccacagagcctgcactccgtaaactttcctttattgaaggaaacataattgaatgtgcatcccttttcacagcctgggtaccagacaattcttatattctattattgtaaaggtaaactgaagtgcaaataaacataactttgaatagcaaggttgtaggttgaaatcaagtagtcattacatatgtatatatgcatgagcatatcttactgaagcaatttttatattattggcctatatggagccagtgaatactcaaattaactgtaagtgtgtctatctgttggcatgagccaagaagtatgacaacagtgacggttcacagagcaggatgtagctggctgcatttgctgtataccaagccagctccttggctagaagcaagtgggaagaagcacaccctctttgaaataatcctgcaagaggcaagctgggcttgaagtctgggaggatccaggggaagagtgaagaggaaggcactcagctgataaccaacttcctcacttgctccacttatatttagtgattgctctgatcacaatttgaataatgctcaccagagactgttagtcagaacaatgtgtcccctaggactgatctactgacttcaatttcatgttctaatacagaacagcatacataacttgaagataggaatctacacaactgtgaacaatagaggagggtcacagaaatctaataacagcctggagagaatcccattcttgctttgctgtcatgccaatgaattgcattctacaagaaactctgttaattgactgctcctatcttgcaccaggcaaaccaagtcacagtgaagagaaggtatccatggctctttaaagcagtactttataaaaattctatgcatgcccatctgaaaataacttaaaatctctgttgtagctttctgatcttctttctatctcataaaaaatatttcaaagtaacatcgtgggttcagacacctgtctccccaatgtgatgtaaattcattggactgatggttcctgtacgacaaatgctggaggtgctgaaggcattccatagatagcttatcagctttctcagaaattaagaggaaattcgctcctcactggaaacctcagataaatatgcctccctctctctctccttttcctttctccctctccttctctctctcctctaaactcagttagtttccaaagaaaatatttcagagagctgagagatcctccctaatacagaagccaaccctcctgatcaccctccatgtaaactgaaatactaacatttctcaatgtttataaagaaaatttactttctgaaagggaaaaccaaatttattgtcccagtgttataaatagtgtttgtaattacaaattgatttcagagaatgtgaagttcagttatgcctaaatagataagcatactttttaaatgggtaagaagtcattgggaaaaaatttaacagtggtgttccctaactccccaaaatctcttcagatgaggaactgcattttatttatactgagaactgcaacaaagtgataaggtgtgagagggaatcctggaaagacagagcagacagtatcagctgcctgctggatctgtatctaggacagtgaaatatcacaatttgatcatttgggaaaataacagccatacacatagcacggtcctaggaaaatcatacttgtgtggtaatcccattcaataggttaataccgaatatgctgaggttttggtattgtgaaattagagagttacctattcattcccaaatcaggaagcctaatttaaccacctgatccgctgtcccaaatgattaactacatcccagagagagaaaaatatatatgaattaaacaaggcaatctctcccagagaagacagaaggaaaactaaggaaatgcagtgctctgtaatttctctggccccacctcactaataagggcctggctgggttaaggctgctgtgtccacagtatcatagtgtcatcacctgtcacctagagatgggggtctgtcactgtgaccacttccataccccttaacctctcagggaggttaatttcacagcccttggaaagccaatttctaacatagtgtcagaataaggtatcactttcccagaacagggagagaggctttatctcaagattatgcgaaacgaggggtatgtagggtatgagcagccacatagggatttggctagcctgacaatttctgcatctcctgactcctattttctgagcctagctcacggcactgttgctgacctgcagtgcctgttgaaggctatgtgctcagggcctttgcagctcccctcccatgcctggctactgtccccttcttctgcaggggctgccttcctttcctttgcaggggtaaaaggatgatgaccaggagaaaggcgacctttcctcctcactccccaactcctgggggttcatccccatcttcctcactaaatatagctcagtttatcaaatggccagttgaatgtcagggaaaatggacccttttcctcagaagtggtggattaattgcttttcctttcacttttctgaggataggcatataatggagcagccgcttggtatgaaatcattgatttgcctcaaggttgagattaagccagtcacttcaaacattttaatattagcaaaaggctttgtgtgattttttcttctctctgctgtgactttattcaaggtctttagatcacaggggctttgacaagtttgtcagtgatcaggggctgccttaatcaagtaagaaaaaaaatcccgccaagacctcctatgcatttatatgttacaggactgtttaatgccagtatctgcacaaagcgtggtgtgtaaactacaggctttagaggatattaattaatacagattggagaatttctgatgcagctcattaacagagatcaatatttaaaacttatgtttgggtaaaaaaaaaagtcatggtaaataattgagtaaaagaggaaatacacaccagcataaaagtgtgtttatttattttgcacaaatatcaccatgagcactaatgaacaactatatttccttacagtaaaataataccacatggagacttctaaaagaaacccattgatagagtcctatagtcacccttgtgtacaaaaagtcatgtgaatactgcaaaaagaggcacatcttgtcatttcaatattaactctccaagaggtttttaaaacatctccaatatctatatgtaaaggttattcattaatattggctattatttggatgtgaatcctagaaaaaatatagacatttttaaagcaaagcatatgcaagtatttctatatgatacattaaggaatgtattgactgaaaatacaccaagataatgcatatctcgtaattcagattgaaggaacttattctaaggaaatgctatacaaatatgcacatacaagatgttcactgatgcagtgtcacaaatgcaaaaacctggattaaaaactaatagcctcagttatgttaatggaaagtgaaatactgtgaagccattaaaatgactctaatatctgaggagaaaaaacctcctcctcattttatagacaaagatggtcaattaaaaaataattaacgaaaaaattttccacttttggggaagccattttattgaatacactcacttatttaaacattcaagaaatactggacgtgtccgccagatttcatgtggttagaaacttcatccccaagctcatatattaattttaagtggggcatttgggaggtaactaggattagatgaggtcatcgcagaggggacaccctgataggactggtggtttcataggaagagaaggagatacgaatggacatgcatgctcttgtcctctaaccatgtgaggcagcaagaaggccctcaccagatgccggtggcatgctcttggactttccagcttctagaagcatgagcccaataaacttattttattaacagattatccagactgtggtattctattatagcaacagaaaatggactaagacatatactgaagagttgatgacaaaaataaatatgtgattttgacacattctatgaggaaaagaaaaagatgcagctcagaatcatagtattgaacctaacataggatgggggaaaaaagcagagaatgtgttgttaggatactatgggaaagtgagaacaggtacacgacaatttgcaactaagaatgttttggactcagagggagaatgcccctggcatcatgtcaaggctgggccacactgagttggggcagaggtggggagacagaactgaggaaaagtggagccaggccccagtgagctggctttaggattctgaattttgatttatttcagttcagtttatatactaaaaggtttgattcagttggttcattgaaaagatttaccagggaagaaatgacacaagtcatatgttttaatttagttatataacataatatagagttgtccctgaggatctgaggagggttggttccaggatgcccatggatacgacggtctgcagacactcaagtccttgatataaaatgacagagtatttgcatatagcctacacacatcctactgtatactttaaatcatctctagatgacttgtaatacctatgacaaggtaagagctgtgctaatacttttcatatttattttaaaatttgcattatgttttatatttattgttattttttactgcttttccaccaagtattttttatggattggttgaatctgcagatgcagaaccaagaatagagggcagactgtggtgacagacaccgtctgtgttatcacttgaagagctgtcctgtgggagaaatgacagcatgacaaacaggctatgtggacttcagcacatcggcacaatgtgcctccagttttttcatctggaaaaacaactggcagtgggtggtaagtgatattaatgtcccttccagttccaagtgcagtttagtgctttgggaatagtattcagagattctcttatggcagtgacatttttaccagtgttaggtgaataaaatataactttatgaaaaaaatggtataaaaggattagtatgttatttttcttatacaaaggaaactagctgaatgagaggcttaagggatatttgtcttttattatgtgaggtttttttgaaatttaaaatatgaagaaccaaaacttaccactaaatcctactgtccagattgcttttaaaagttctactgtgagaggtaaactgggaatctgagtgtgtttccagttgtgtaataattacattgccttattgttttttagccaggtaatattcttatctggaggcgatgtttaatattgtttgaatatctatgtgacttgcagcactatcataaatgagtcttacgacatgcctccgtcattctgatattgtggacaaatgatgttatagctatctacgaacattacatataaagaatgcatattgtcaagattgaattttacctgaggtctgagcccctggaaaacaatgaaaattaaagaaatactcctcatggccgggcgcagtggctgaagcctctaatcccagcactttgggaggccaaggcaggtggatcatgaggtcaggagttcgagactagcctggccaacatggcgaaaccctgtctctactaaaaaaatacaaaaactagcgcggtggctggtgcctgtaatcccagctactcggaaggctgaggcaggagaactgcttgaagccgggaggtggaggttgcagggagccgagattgcaccattgcactctagcctgggtgacagagcaagactctgtctcaaagaaagaaagaaagaaagagagagagagggagggaggaaaggagggaggaaagaaagaaaaagacggaaagaaagagagagaaagaaagaaagaaggaaaggaaggaaggaaggaaggaaggaaggaaggaaggaaggaaggaaggaagaaaggaagaaagaaagaaagaaagaaagaaagaaagaaagaaagaaagaaagaaagaaagaaagaaagaaactcctcacccttcagtgtgatcaaaaacagcttactgccaggtccccctttccccatatgaattagatgtgtcacctaacactggtaaaaatgtaactgctataagtgaatctctgaataatattctcaaagcactaaactgcacttggaactggaagggacattaatatcacttgtacccgttgactacataggacaaggccagacttccaattcctatcctttgcctcaacaatgattagctggattgcttgtccctactgatgaatcagaaatgcttattggttaaatttggtgaaggttctctctatcctcagaaccctgacctcaaccccagccagcagagagcctctcctgagaagaagctggccctagggtaaaaccctctctcatttactatcccatatgtctttcttccaccccactcctccacaccagttcttactagcttgtttattcccctgtataaaagaaagcccaagcttggtgtggtggctcacgcctgtatcctagcactttgggaggccgagatgggccgatcactggaggtcaggagtttgaaaccagcctggccaacatggtgaaactccatctctactaaaaatacaaaaaaaaaaaaaattaactgggcatgatggcacatgactgtaatcccagctactcaggaggctaaggcaggagcatcgcttgaacctgggacgcagaggttgcagtgagccgagattgcaccattgcactccgcctgggtgacaagagagaaactccatttcgaaaaaagaaagaaagagagagagagggacagagagagagagaaagaaaggagaggaaggaaggaaagagagagaaagaatgggagagagagagagagaaggagggaaggaaggaaggaaggagagagaaagaagaaagaaaagaaaagaaaagaaaagccccttttgcctaacccttgagatgcctgcagatcttatggtcagagcattcttctattgcacccatcctcctcccactattcgaatagcccatccctaagcccctgcaataatcctttctaataacgtctactcttactaaattgagatttattttttatttgacagggtttttaatgagaaatgctttttacgaggttagaatagttctggtggttgttccttagtctctcatcacatctcctttatgacttggaaagataaatttagcatggaaaaaaatgtgattattagaaaacaaaaagaattttaaatcatgaaagaaatttatgcaaacaatagggcaagacctagtacataaaaagagtcagtgaagcgaataaaaacaacaacaaaacagcaccaccaccaccacttaaccacaaagtgaaacaatttacataatgatttcttgcttttcttcttcatattattgaaagtttctttgttcatgttatctccagtggtctgttaaatgtttgcaatgcctcagtgctcctctgaacaactttgttaggaatgagaagtgctctacctatcaacaacaaaggcagccgaatggctagaaataagtttgttgaaaatacttcttgggttctgccttacctgtcaatcacaaaaagaaggtggagaaaggaggcatgcttatggcatcccagttttaaggaagaacattttagcaataagcaagcagtcaccaaaaggattcaaaaaggcagtgggtttagggtgctttgtttcactgtgaacatgaactgtcataaatgcatatctgatattttaatatcagatatttggttaaaaaaaaaaaagtgaggtaggagggtgcatttcattatctctcccagatacgtactggccatctggtgggaaagaaaacaggcagtctcagtccagggaccagaggatctcctttgtccctgtacatacacgcaagaacgcacatattacattatccaggtagagagcacgtggtaggttacaaagaagccatgaggaagaaataggaaacctgaattgtagttgcactcctctcaatatcctcatcagcaaaatgaatgagttgttaataattacaattgtaccaactgtcatactttgccatatggcttgtatatgtgtttggtattttaaatctataacatacagtcatgtgccccatctgcatcaatcatggcatgtgtatatggtggtattttgtattttaccctactttttaatgtttagatacaaaaatactctccattgtgttacagttgcctgcagtattcagtacagaaacatgctgcatgggtttgttgtctaggggcaataggctacaccgtacagcccaggtgtgcagtaggctataccatctagatttgtgtaagtatactctatgttgtttgcacaacaagaagattgtctaaccatgtgtttttcagaagtatgttgtcattaagtgacacgtgactatacataaatatgttaatagcttgtaatgaagacataagctctaattctgatcaagcctagacaaagcaacttacatacataattcttaaaataaaaacccaaggaagacgttagtattccttgtttctggaaaaggagccaagaccctgggagttaagtggccttctatgaggccagatgactgggccaggacccactacctggctgaccccaaagttcacccttttattcattctgctgcattggttgtgacctagaatattctgttgtttttctggtttagagaaacagaaagaagactcagagtagactctgaaatgtccactccccacacattgcccagagccactggaggtacaatgtgccaggcacagctgtgtgggcagcaaggcacgtggagcaggaagcaaaggatgatgccgaggcacgggccacgtgtgcagtgcccgaagggggtctcctctggtcgtggctgtgcaccagtgacagaagggtttacttactatgatactggagaccaccatgatcactgacatttccttaatgatgcacaaaatgaagcgcacaagtatccaacaaatgaccagagaaaacgctagcatacttctctgaatgtacacttcagagaaggagggaaatgcttaaatgtaatattttagataaatcactgaatacaattagtatagtaagtacactatggatttgatggtatgtagtaatacgtctctatggcaagctcatctcctggaaaactggaactacatttgtccacaagcctttctcactgagcaggaacacagcttgcaggttggccgactcatctccccagattttattttctattttatctatatttttcctggctctaatttgtttctgttttgttacattttatagattcctacaaacctctttaactattttgtaatgcaagatatttgagcataaatccctaaaagacatattattttatgatgtaaaggtttcattttttccattttatagatgattaaatagaggcccggcatggttaagcggcaagcccagagtcagccatccaacgcagcgcagagctgtgatacaacccacttccactcccacggcatctcggcttcgtgggagttgaggagcgtctcaactgcatgtcaggagaacccatgaaaaggaaagaacccagaacaaatgggtgagaaagttcaagactatgttcagcgtaagagcaaaagcctcctgagaattctgcttgcagcccattcccaggcattacagtgcaaagctaattagggagaatggcatgagtagaagaccaccaagaccaccagctgaaacgggtgttctcatggcctccagtgggctcgactatttttatatttttaatattttggtccaatcactactctatacaacttagctgtcttaaaacaataaagccaaaacaaaaataaaacaataacccaggcctcccagatgttggcttcagtctgtgttcacaagttatcttcctaatataacagcatgagtactacttccccatactgttctcatgagatctatggccaggtccaaggtcacatcatagtaaatctttatgaaggttaagaaatttataacatttgcatttgttcacgaatgtcaataatcccaaccggcaggttttacgctcaggtttgaatgacactttgctaaccaagccattaaggtttgtttcaaggagtcgggggaagctccccagcagctctgagcaaatgaggagccagagaaaaacaattaaaaattttttaaaataagatctttgaaagtatattattaattctatcatccaataagtgttttcgaagactatgcaaatgacatcttgcggtataaaagctgttacagaacagaccttccaacatttctcagtctccttctttccttcccacgcatgccctatgtgtggactggcagcaatgtttttacttttaagaggaatttcatcatttgggaaaaatttagagatattaacgaaaaattgctatgtgtctcatggctacctactgattagaagcaattaacttatttctattttgaaaaattaggctagcaaatgaagcctgtgggagaagcatatttaataaatatagaaatattaattgtaggaagtaacaataacaccatgcaaagttgtcctgtacattgaaaaatcatactgattgtttacctccttattcacagcaagggaatcaagaccatagaagtcaacctgtagctgtataattgcgtccaaatcccagtgaagagtaaatgctaaagcattagggtgaacccattaaaactgagaaaagagagggaaataaatcaatacttaagagtagagttacctaccaaagtaccattcagttcaacacatttggaggcctctttttcatatatgatgagttttcactcatatacactgataaaaaggtgaagcataaaacatctagaatgatgttttgaagaaggtgaaagaatcactgtggtgaagactatagaactgccctgcctccatctctcctaggcactttagccattttactctaaagcagatttggagttgactttttaaatttcctttcaatgttagaaatttaaattagaaaatgtatgttaaagttgattaaaacttaacaagttattctgacccattttcctcttctactgcaattctgtctaatgtcttttatgatgcctttacaattactgttatcatcatcattattattttagtctatcatgtaggaaaatataactggattttgatttccttaagaggttttctacattatttagatttgtgaaagaatgttattgtaagtaaatagcaccaaatcttaaggatacaatatataactgctaacgcaaacagtatttgagaaatgcatctagatattcattactttattaaaaaagacatagaattggcataataaattgctagataaagcaattgagtaaagtgtaatgagttcaagtagagataagatcattttatggagataaatgaattagagaggttgtgattgagaagtgagaagtggttaaagtgttttaagacaaattataatatctaggtcttatccctacttatattgataggcatgatttggtgggaaaaaaagaaacattgtcactttaagtatttccctatcctaaatgaaagctactttattcaagagtataagctaccctaagtttctttattttaaactttgaatgcttcatcacacaaatgtttatattttaatagaaatgtattatgtctgatgatatccaacatatatatacaggctattgaattctatatgtagtaataatcatgaaactcagtgttttctcaattatatcagcaaattctctaacacagatatgccaggttttcttcaactttgatgaagtcactttagttctagtaaagtagaattccttctagaaggaatttaaaagaagctgaatttcctggcttccccccacccccaacaagcacctatataatttatcagtccatatttcaaactactttatttattcaattacaacacattccatggataattctaaaataaactcccacatttaaaattaaggagccacaaaagacacttttaaaataagaaattgcataaagagagaagaaaaaataaaatttttcacaacctacaaattaccaccaagttttacattgagtttgacattcctggtattcagagcaaaatatggacacaaagactcatgcacacactgggtgacctcatttcactgttgtatgtgtgattcctcattctaagtatagaatccaggaggtgcgggtccctttgtccccaccaggaaaatgcagttttccacagtgttaaggttggttacctttttccaatggcagaaaatgcaggccagaaactgagaaagttgctcagttcatacagaaagcagactgcctaacatgaacctcttagtagtcagagcgacatatgctattgaagtaatgtgttcctttattttctaaatggatccttcccaagtaaaatgtacctaagtacataaaccatttagtgggaatacatacacaaagagttgcctcctagatgtaaatgcctcttgaacaacaatcaactattaactcatgcaaaaatattttgataacattttcacaattatctgctaaattaaaggaaactactcacagcaacaaatgccatcaacatctggcagtgaaacaactttgaggtacatctggacaaaaatgactcatgtctaccctcacctgttgcaggctttacacctacagagaggcagctcctctttgccccaacatatttagtttctggactgcattttcgccttctgttgcaaaatggcaatcaaccttattaccgtagaaaactgcatcttcatggtaaggacaaaggggtctgtacattctggaattatattcaacacttacatttacatgaaagagccttgaaaacaatagaataattagacatgtttgtgagataattatgtcatgtaatgatgcctattacccaaagagctgttggttccttaaaaaaaaaaaaacatttatcagccaatcttgcagacttgtaggatctgaagaacagcactgttctcatcagagctaaaagcatatgctatgaatggggtcctccacatggcaatgaccgcaataaattaccagtgtgtgttctgttttcttgagatgggctcaatttatcattttattgaaaaggttccattatgctaatgtcttacaaaatcacattctgctgttgctggaaggtcatgaggggatataaatttttgcatttagaactaagaagttgtatagcagtcacagactccaagggttaataagaagccatcaaattacattcaaggacttatcaatgacagctcttcagcatgctctcctagttaacaaaagagaaaaaggggaatattgttccaagcttaacatcacacacacaaaaatgcttcaagtataaacgtattaaaacttggttttaacacaggttgatcatttgaaaaaaaagtcattgaaattttatctgtcagtgtgaagtatcagtataacaggtacatttaatacgagtttaatagaggtttctagtacatagtactcagtttgtttaaattagctactatcttcaaagactttcaaagataagtttgctgaagatctacaaagaatgcaaaaattaatatgcatattttagtgtaacctcattgtgtctataaggaggataatggagatttttgactagcatcaaatcccacatctcagtgagttcttagggaaaagaaagatgatgagctaattattcaatgcaaattagatattattccttagagaaatgttttgtttccatcttttcaagaattactgtttccttccaatcatgaaggactgtggatgtaattcacgaatatatggtgccatcaatctatcaataatttgcagttatgggcaacaactgtcaaacagctgagtaaaaacacataaaaccagatagctccctttggaccaattattgtaaaccatagaaacactgaggaaaaacagttgctctttagaaacacttggtatatacttggcatccaattttgtaatgcaacctaacaagcagaatgtaaacaacagtaactgcattgctagatttgtcattctgttttgtctggttcagcagctaagtggttacgaatattaacattctacaacatcagtgtaccttaaattcaagaggccattttgaatggatcactgattgcattttgatggaattcccagggaggtgatgagtaagaagccaggttgtggtctagggctgggcacattcaatcttattctgtattaaagtacagagatggagatacacaatatgctctttcctcacctggaactaatttgacagggaaaaaaaaagctttagaaatgggtctaagatagtttggaaacccaagttcacaaaattgtgtttaaaaatatataaaaggattatagaacttcttgacaaattcaaattattatataaagtttctcattgagtagctccaaacactgtcaaaattattttttctgtcagttatgtatgtcctgtcaacaggtatatgcattcacgccaaatgaacaggccatggaaagtagacatctctttatttgggaaaccattactcaaagattttaccaaaaaaataaaaaaagatttttggaagagcttggggtgaagtggttgtttttgcatcagggtatatggaattaatgttgattcttccaaatcatgatgactctaatgaatctaatcaagtacacataaacactttgatctaattcaaagaatatggaattttgaatcaaaagacagtggttccaatcttagcctcaatatcttttagctatgacagtttggccaacaatttcatctttactctcagttctccataaaagaaggaatgataattatggccctaagagataatgtaagtgtaaatgtttcacaaactgttagaagaaagggaaatacttattattctcttgagcgtaaaatattgtatctctctggtgatgtaatggttgcagggagcaaagtatatttaccaaaacattttacatattaaataggactattttagtttcattctcttaataatcaaaaaaaatttgaaacttagaattaaaccaaagagattactggtactctttcaatgcgatgtaggtttattatatgggctattttacaactcggtaggagcagtggttcacttttttccagtggaaatacaaagaatttctgtccagtggagcagacaacctcaaatattatggtttattgccctgtaaacacttgacaagatttgtatctagtctagcaatcttatgctaacatctctttattaaattgcatatttacctatctataatcaagacactaatttttccaaagccttttgaaccaatttatacagcttgctgcttctcacattaagtaataggttgaagaaaatttttgacacttgtacattttatatctaatataatatctaatataatataatataaaatagcaaaacagctattttaccttactggaaattataatttaatggttttagaggtcacgctcaaatggaccaaataaccttcatttccaggaagtttgcctcatggactaatatactaaggaatagttcctgaagtcagacagatcttgaaatctgcaaccggggttctccactttttcccctttttcttttctgaatttgtgtgtttggttttgcttggagcacagactcacaataatctatttccctttggtggtcacagtgattgggaattgccttgatagtctgactggcaatctctggacctggatgacacagctttattctttgttgaataagagacaacagagactatgtgtaagtcacttgtgtttacttatctcttggtgacctcagatcaattaaaaatcatatgcccactggggaggaaaacagctctttgaggtctggactaatacatttttgtgattctctatcttcttttgacgcatgactgaagttgtaggactgaagctataaattctctacatggctttgcgtctacatatctgtaattcacaaaagctgttgcctccgttgtgtgaaatgtttccctgcttgttgcaggctgaattacgtcaaaattcctatgttgaagctctaacccccagcacctcctaatccaactgtatttgattaattataatgaggtctttcgggtgagccctcatgcaatctgactactgtccttataggaagaggaaatttacacaccagacaagagggtatgtagaggaaaccccgtgagaggaaacggagaagacggccatctgtacaccaaagagacatgcctagaaagaaagcaaacctacaacaccttgatcttggacatttggcctccagaaccacaaaaaatagattttggttgttgaagaaaaataaataatgacatatacaaatggaataccggcaaaattcacagaaaataaagcaaactctgagtacttcaagtgttctagatttttagggaaaaatctcctcttatagaaactgcttgctcagaaatccaatcacatacatatggtgaatctttggacaatggaacagttttaataatttgggtttaagaaaggaaaaacttttctctcatttttcagtgttaaatatgtgataaggtttctattttacattttaacaggttggggtttggtttcccaggaaaagcgtacttaatccgaacttctcgtacttctcaaactatttttcaatcacaaaatcttgcattacagtgacataattttaaagttttttgaaaaatatacatttttagctgactaaatagaataataattctggcaagtttttctgtagtaggttcttatatctttatatataacttgcaaacatggattgatcttcagacagctaggtaatttgtattaaggctgaaaacaaaagcaatgataaacagacataatatttagtttacatatttttggccctttagttatacatactatagaatggctatatttttgagtcacattaattgttttagttttgctactttaggagcctgtagctctaaaaattgtactatatatatttatagctttgttagtctgctaaaatgtttgtgtttgacacacagctctcctattatgactttccagtttctttgtgaaatcaaagatcttattttgaatacaagttataatcggatttggtggctgagacttaaatagaagaaacagtaacagaaaaatacaacgatttatccaaagtaatgggatgagctttctttttcaagaatgaaaagaatagggtattttttccctaaagcaaagtgttgttttgtaccagtatatgaaatgacaccgtgaaagataaaacttgagagaacacagcaagttgtggaaaatttgagggaagtgaattttaactgcttttgtttataacacctatgtctgaaaagaagctataaaatatattaaaattcacctaattttgattggcttatttgtgagataaattaagggggaaaatgatctcataaaacctatatttccaatgcattaatgcaaaattaaaagtagtctttttcttagttgaattaataaattcatcttagaattcttaccaaggcatagtaaaaatactatttttcccttttgtgtgatatgaccagaaagcagagattttataacccaccagaataatctctgctttgtgttgattctagcatagtgttagaaaataaaaatctacaattatgaaaggcaaagtttcctcacttgtgaatgaaccaagattccctgcaatcatattacatttaccaacaattatttttgaacacttgttaatttgattaaatcgataattaaaggcacctaggattttattatagccaaacgaccaagtctactctgacaactactttaatttccccccagccccatgatcagatctaaaatttaaaaatatagaccataaaaattcaacaatatactttatacttaaaactggctttaaaatctcccacaggctccctggagagaggagctggaaagccttaggtttgtttcaagggttttgtatttcttaatcacctccccactacagaagagctatggaatgagctgtcaaatcagaaggacgctcagccttccctgggttcagtttgtgtacatgaaatgttatgcacagaaatctgttactaatcgaacattttatgggaagaccaaggagagtcatcagagcccatgctgtccattatatatatgttcttactctccggagaaacattgatcaaactcttataaaatagtcatacactgtgtcacaaagggttattttacactcgtcattctgatattgctggtcactgtagtaattaatccagccttttattagtatcaaactggtttctgtctccatctgatgcttgcctgagaactgtgctataaaccacaggcctggggttgtatcttcagcgtatactcctgtttccagacttctcagaaaggagtgtgccagatactctgaactactgatacttcaaagaatagactcttgggtactggcgttagagctgacatcagctcaacaactttcagactgtaccagggaatgaatcagaatttccaggacttattttagtctggaaatagatgttcttcatgaaactagcacctaacccaagatccaaaaaataacaattaattacacaagaacaaatgaactgatgagttaaattatggctacttattttgaatgtttttagtattgcatttaatgttaatttttatggatatatgaagttctctttcttcttcatcagtatcactttggatataatagactattgcttttgtatataattttttttttttttaagacagagtcttgctctgtcaccaggctggagtgcagtggcatgatctcggctcactgccacctccaccttccaggttcagtggattctcctgcctcagcctcccgagtacctgggactacaggtgcaccaccaccacacccagctaatttttgtatttttagtagagacgaggtttcaccatgttggccaggatggtctcgatctcttgacctcgtgatcagcccgccttggcctcccaaagggctgggattacaggcgtgagccaccagctgcttttgcatataaaatttaaaaaactgtaagtagtatctgatttttagcatccttcgaaaggcagaaagaaatacttttactgattctccttactttttcatgagaacatagttattaacataggttcaattaggatttgttctcatcttaccaggatacaattgaacaaattgattatgcaacaaaggatacacatggagaattatatatgagaataaatctcacttcatcaaacacagcggcacgctagtccggaaaactgacgagacacgtagctagtgcctacgaagcccagtggacaaatcaggtttactacctggctattagagtcctgttcctgagaacttcaagaagaaaggaattcatcccaatttatatatacagtgcaggcaaaatatggtggagagaatgtcttggaattgtttcccgagctttgagaaagaaaagcaaataataaaggcttttaaaagtcaaatctaagattccttaaaaaaaaatctcaggcagaattaattatctgggtcaaattatatggctatagatttgtaaagcaaactcaagcaggcctatctggttaattaacagtctcattggaactatgtaaaaaataaggccatgtttcatctggatgaaaatagcatttttctgtgattaaaacaaaacaaaacaaaacaaaacgaaacctttgtgggctaggtgcagtgtttaacgcctgtaatccagcactttgggaggccgaggcagagggatcaccttgaagtcaggagtttcagaccatcctggccaacaggtcgaaatcctgtctctactaaaaatacaaaagttagccgggcatggttgcaggcgcctgtactcccagctactccggaggctgaggcaggagaatcgcttgagcccaggacgcagaggttgcagtgagccgagatcacaccacaggactccagcctgggttacaacagagcaagactccgtctcaaaaacaaacaaatgaaaaccgttttgattatttataagggggggggcagggaatggagtgtaaaaaaatagccacaacttagaaatgggccaaatagacaactagatgtccttttggtgcagcgttgagcttgttttcctattggcagggagctgtaccactttgtagaggctgagataccttgtacatttttgtttggtaaagatttccatccagtgtaacagataaccccaaagtcaatggtttaatatcctcccatttatttatctctctcacacacacacacatgctagaaagaacttttcctttgatcctttgatgagtacacagaagtacagagagttgtataatgagtaaccatcccccagattcaattataaataatgtgtaactagctggttgtcccacttccactgatcctaagattgatcacatggcatcagccagattcccttcacttatatcaacccattcactttcatctaattgtttcatctatttatatctgttggcagaataaagtaggacttgcaaaatggtgaatatctaatttcgcaatgcatctccaattattgtctgaaacttctctgtaaagaaaaattttcctcaactactagggctatttggttaccttgaaatagaattcttacaggaaaagctagataaacccttattttatttttttaattatcaatttcctgagtttgattttagggctctagttatttccaggagtttctaatgtatttgggttttttagcaaaattatgacttgttaagtcttcaataacttttttgtcttagattacacttgttttcatcttggattatcccatcttgggacactgaatcttcattagcccctgtgtccttcaagtatgtcccttctgatttcataatctccactagctttcaaataagatagccacacaagatacacaaggttcatcttgcatatgatttgtcccaggcctaaaatcttctattcttcaatgattccttgtcttttttagttaaaaacagtattaagagaccacaatctgagtggccacaaacgtactcctagttaataggtttagatgaatgatccagacactctacctgaaaagaggggagagtgggaggatcaggagacaggaaaacactagtacatgaagtgttaaaactggctgctcatcagaatcacctgtgaaaccttcaacatagagattctcaggcctcaaccattatggaatatgatgatcaaaggggagcccaggttatgtaaaaggccctaaggaaatgaagtcactccggggcccactaggcgggagtgctgagttacagtctccaagcagccacatttccagaccttgggatccagtatattagatatgcttagcagttgaagaatttctttcttatcttaaatagtaatacatattcattctagaaagttcatataaaccaaatattcgaaataaaaataagtcacaatcccatcacaagaagaaactgctattaaatcttgcatctgcattttaatattcttctttatgtatgcacatgcataaacggggatatatatggttagttattttttatagagtaagatcacaaactactcagtaatttggaattgaattttgtcatgtggtgtctttccatgccattaaataatattctcaacatcatcttcaatggatccatagtgtttcattttatagaactgccaaacattcagaacctatggttgtacctcttgatagttttccattttttactaatataaacagtgttgaacatccttctagataatctactgtgtatatctgtaatataattttatcataaactctgagagtataaatgactaagtcaaaaggtcgaaattgcattttctcttgtgagaattctaaaataattccctatcagtttaaagtaagaaaagtctagggcacatgaaaagaactagaaatgaagaagcaagtgtgcataaagagggaaggaaacatgctgactcttatcttttagagctgtcacacattgaattttaatgtttggggaaataaccaatgtagctgttaggaagctgtgattcaaacatggtagcactaaacgatacatcactgtattgggggcaggtgcaacataaacctcccatggatatttgtcaggtgaagaattcaggaataaggtttgcctatctgtatatagaattttgaagtcagggtaccttctagtgttgactgcaatggttaagtcatctgtctgtctctgacaaaagagctagaccctgcttcaggaatgcaaacttctcccactgctatggtctgactgtttctgtccccaaataattcagatgttgaaacctaatcaccaatgtgatggcattcagacataagaaatttggaggtgattaggtcatgagtatggagccaccgtgaatgggatacgtgctcttacagaagatgccctggagagctgctgtgctccctccaccatgagagggcacggctggaaggcaccatctatgaaccagcaagcagccttcggctgacatcagctttaaaggtgccttgttctttcacttcccagcatctagaactggaagaaataaatatctgttgcttataagccactgactcattttgtattttgtcatagcagcccaaaggggctaagacacccacaattgggaatcttggatgagaatgaactatatttcccattttcaaaaagcttatcaatgagtgaataaacaaatgttgttttcattcatttaacacatattattaagttagtaagcatcaacaatgtgcccagcactgtgttaggtactgcaacagcccagagtgagaggaaatgcccctgcttcctggagcctgccttccagcgggcagcctaccacctgcgtgtgctattctggtggccaggacgctgttgtctacagtaacctggtaaattaactatgttaagagagtactttttctttcttcacagaaacaagaaaaattatttgccgtggagtccaagagaggagcatatctatcgaaatggtaattgaaagagaaactggaaacatcacctgtatgaaaaatagtggatggctctgttaacgaaacaggcatgctggtgacaacaggcaacaaatctaatctaatctaatctaatctaatctaatctaatctgtttctccataataagcagcaatcatacaacccactaaatgactgctgttgcttgtcactgaagatgtccatattttactgggacataacatttcttcttggcatgaagagaatggattaagcaaatgaataaaagctatggttctactttaccagcacaaatggacaaatccaaaataaataactgttacagcaactatgctaaccgtattaattaaaatatgcaaggtatactcattctcattttcataaaaggaaatcctaaacgctcaatttgaagtatgtttcctcactatttgtaggaacttctagtcctagaattcttggtccacctttccccaagattgtattcatttgttaaatatgagacaccaccaaaattgtaatgatgccacaatgggagagttaatgaagtaaaaaaatattaaatgagtcaactattattaaaaaagaggcaacttcatatccatcaattagaaatcaaagagtctggctggctatttatcatcaaaaatcttttattggtataaaaaagtccacacaataagcagctttttaaaataaccactcaggccagagtatcactcaccaagctgtgactttatgttctttgtaacaataaagaaattacatggcaaacaacaatctgtgaaaactttcaaatcatactttcctaagctatcgctctagattaaaatgtttgccttagttttcagggggttagagaagagtgtcttatctccaaacagaacaacttcatgaagatgcatacacactttcttcttgcagctaaggaaggaccgtctttgactaggtaaagatccatgtatttgaatcatgaaaatatccaaaaagacgggctgggcatggcggctcacatctgtaatcccaaatactgggaggctgaggtgggcagatcatgaggtcaggagtttgccaccagtctggctaacatggtaaaaccctgtctctattaaaaatacaaaaattagctgggcatggtggtgggtgcctgtaatcccagcttctctggaggctgagggaggagaattgctttaatctgagaagtgggggttgcattgagctgagatggcacctttgactccagcctgggtgatagggtgggactccatctcaaaaaaaaaaaaaaaggaaatatccaaaaagacacattagcaggactcagttcccagtgtgttgtttgaggcactgaccctgatctgaaaacagtgctcagttgattcaatctgaatctgtgtccaccgtcttcctgctcacttagaataagagctgtgtttgcattgcacaatgaacacccacttgctgaaagctaacttgttcctaactgcccccatccttcatccactgccagagccagctttgttaagccccctgtgacctatatctgtgacctatccctagctaatcttctctttcaaaatatgaagtggggtacacactcatcgccaaagggtcctttgagcaagtcccagtagaaaatttatccactttttggatgaagtactcaaaaaagagtactacatttcccaacataaaatggaaaacaaatacatatgccatacatcattcagggctggaaaacaacgaaaatgtaacactccagaaaaacagccatgggaagtattattcctcatgccatccatcattatcatagagcacccactattctaatttagctccaaatgtgtggtggaggtgatcaaactttaaaattaagtaaacaaagagattcatacaaaaataaaataaaataaaataaaataaaataaaataaaataaaataaaataaaaaccctgaccccaaaactagagtaacctgacgtctcccaagtatgggttggggacctagcacctgttctgggggcaattcaggcaggtagccctggatctgtaaacctaggtagtattttagagcctgagcacaatattgggcctttgtacatgtgaactagaaagcaaagggataactgaaatggataacagatagtcagcacttggtatattccaggcctttctctaggcccttgtcacgaagtatctgacatcaacttcatgagttaggtactttttccttatctctgtatgagaaatggggaaactgtggcctggtatgtttaaaaacaaaacaaaacagtgcactattcacttgaggatcttattaaaatgaaggttactgattcagtaggtctgatagggggccaatgattctgcatttctgataaactcccaattgctgctgctggcccacagatcacactttggactgcaagaaagtaaattctccgagtcctagaggtagcaagaagtagagccaagacgggctaagttgcttggctccggggcccacacttactgccagtcggcttagcatttgcatggcagacacatcacagcccaggtaccatgaatgcgctcaaggattcaaaatcaatgtctgtcaccctttttgactgcattttctagcaacaaaaattctgtattcagtgcgtagtatataccaggaactgtggtaaacactggttcaaacgattttcatttaatccactgaagtaaattatcggccatttgattcccttcttacaggaagcaaatcacaaccccactgatgcactgggactctagtgagtttaattatcatgcacagaaaagattgagcattaatttgcaaagaattagaatctaataacacacctctaacaccaaaggtagtcaacctttggggattgaggaagaattgtaagatcttacagagcatcagaggtatcatttggaaaattaattatagtcaaatagatgaagaaggtgtaggagtttgggcctgattctgtgaaattatcaaaaagtactctaaaaaagaatgtagtgatattttccttgtcataagggtttcattttctattatataatagatattttattaattctgtttttcttacataagtagaccataaattcttgatttatgtatgaaatgtttggaagctacaggtcatacaaaataacaccttctataaaatttcacaaaatttccattagtccttatttactcagaacaaatttagaaagattgaaaagagtgtattacagacagttaaattctaccacttaatttgaaattttttctttatcttccctttaagaaagtggaatccagcagcctgcctgcatttttggcagactctgcaataattacgatgctcagatgattcccaagatggacctccccagctgtaaataccctgcctccacgctcattcctgtcaagtgcagatctccccatcttggcatatgggcagtgtcctctgaaacacttcagggtttgaagagtaaaagatgtaaatgatttgcttcactggccatgtaggcctccaggagagggacacccagacactaccatttgtagaggcctgtcgttagaagagcacactgtccagccaggcctcatggagtcttgaatgcaatgtctcccttccccttgaaatcacaatatgaccttgcagaggtgacttcagaaaaatcaaaacattttgaggctccctacaagtactttacttaacttcaacaaccaatgctgtcatttctcacctactctcccccacagttactttttatttctttatgtttcaaaacagataaccaaccacaaaaagcaaaacaattcccacagaggcatgaacccaaacaggcacgaacaaaagcacaaggtagacggggccagcctcagcctgtgctgccccggcatggtattcctctccgcagctttttgtcaattgcatgctgacactccttcccgctctatttcatgacatgtctcctctccttttggaagcatataagcaaaaacatggggctgggtgtggtggctcacacctgtaatcccagcacttcaagaggccggggtcagtggattacctgaggtcagtagttccagaccagactggccagcgtggccacagtttttcttttttttttctcaaaagcaaaaaattctgaaaaagtagtataccttgtgatatagttttaaaatctgactacttggctgaaatcaattaacatgactcttcaaaaaggtccattttaagactatatctactttctaaccaaaacatctagaggaaatgcaaaatttcctttcacctgatagctatattcaggaaaacacaggctactggatattttacataagctctgaagtgagacggtccctgggtacggcttgaattgtctgggtcggttcctcaagtggtctctgcagtttcctcatctataaagaggatatgaacatggtctaccttacaaggctgcaaggaattaaaagaggtatttcagggaaacagggtttctatagtgccaggtttgcggcaagcactcaccgacaccgcctgcaggtatggcccgttcgcgatgttctgggcagtgcagcagttctaggatttgaaaaccttccgggttgtgttgcctccaccctttcctcctgcagttccttcacaagcagccagcatgaggcttcctgaagtcagatcatgtcactccattgttcaaaagtcaaattttctcaacagggtcaaatcctgggcccagcagaccctacctgacctctccaccctgccctttttctgacatcctcttctccgagctccacctgctccaagctccaccccatactggctgctgcgttttctgggcgggggcctgcctggggctcacgagttgctgtcgcctctgccatttggcacacaaatggatgctccctgagggtgccctcctcacagtttagctcatcacacaggcctcgcggctgctgtatattacggaactccccaccaatactctttgtccccttgactctgctgtttctcgatagaacacacacttactagctgctccaaatagaatagctccgttgaggtaggcatcttgtctgtttctattttctgctacatcccagtacctggcactgtgcttggcacagagtaaggactcaatcgttatttgtttatgtagttcgttaactgtatgacggatattggaggagcctcctatttttttgctaggtccaatagcttcatctcatctgtcaggagatgatgaatggcgcctcatttaggaaacaccaataacacatgaaggtaatttacacacaggcaccctggagcccaggtgcagctcaacgttcttattgaaaatgtagtaaaaatagattttattcactgaccatattttaaggaatactattttttactatttcgggcagtactactcaaagcacagcccctgggcccgcggtgttagcatcacctgggagcttgctggaaacgcaacttctcagcttccatccaaggccaactggtctgggcccagtcatctgtgcttttataggtcctcaggtgattctgatgagcactaaagcttgagtggcactgctgtaaaaactacttcaatgactcgttccagttctttgacgtcctcttacaagtctttagtgtgacatgcttgcgttcttagtaccaacagtgtaactggttcttcatgtacatcatgttatcacctctcatgttgaccacttatcttttgccaactaaaaatacttgaaaggcaccttctcgggtttcagaagtttccatttgtttcgacaacatatgaggctacagcccagctattcacccattagagccctcccacgtccagccagcacttatattcttcgaagttaaaattgaagactctggaagcacagaaaattgggatttcttttaatctctttttctgaggcacaggttttcaaacattgtataaccaaggatttttttcatcttttcaaatgatagatgttttatgtgtttaatatgtgaagtacgtaaagaggaatggtctcaggctgctgtgattggcttggtgtgttcacctctcaccgacctgcctctgttctcccacccagcgtccgattgttccgtgagaacaacaggtaggatccataattgtaaggctggaaaaccttagccatagggcagagtttctcagagtatggtcagtaccaacattttggggcctctacccccagacaaatacatcaaaatttctggtcacagaaaaagaatgaaagaagattttttttctcgccattctggccatcaaagaaacatggaaaaacatgcaagataattctgcacatgagagtctgtgaatctctgctctagtaactttacgctatcatttttagtgaagaaaaataatcatataggcatactgtttgcatatagtcatttcaaatcattccattcagtcttaactcaaaccaagaatgaaccaagacatttgaagagatgaaatctcaatttctctgtataattttaaataaagcattcgctctaaaagctaaatgcacaggagttctgttgaatgactgactatgtttacaatttgaagcaatttagtaaacatgtatcaccactcttctaagagattttggggaaaactacagttaattggacaaaaactccatcctcaaagagattaaaaggtgaagtcagaactggagtacaaaatagcaagtaataagggagagtcctaagagttctgaaaaggattccctccagttctaatgagcaggagaggattacttgtagtttagctgttagtttaacacagagttaaatctgaaagttgacctgggatgcaccatctctcttttcccaatctttacagatgcaacatatctttacagaggccttttagtagcagcatgtagggtgccaggaagttgcccccagtgtgtagtggtgcagggagaagtgttaggatggcaaccctgcagcccccaactgcaccatgtagagttgcctgagccagtccctagcctgccaaaagcacaaggctggcaggccacaagacagaggggtaaatgagaaacagggtgatcagaggttagatgtgactcagacatgagtggaaagtcaaggtgaaacagcgcatcatcatagatcatacagtactctgaaggctgctgtcatttaccacattccataaatttactagaatttattctctattgtttgggttgaaataatcacacatttcaatttaaaaatataaagagaatattagacatttagcagaattttctcagtgcctactggtacttcagaccctatatagagagaatactatattttcttaaaatattatggtctagagagagagagagagtcagttgaaagtgtcaataattctaagttcattctcataaaagaaaattctggagaagaccaagggcaattttatgataaaacaaaataagaagactaaaattttcagatgaatatggttgataagagagtagagccagatgcactaggaaatgtattaaagaacatgaatatgtacacaacaggattcttgtgctcaaattgtttttaatattcagataataagtaaaggtttaattttgctctaaacaatgtgatttttttatttttagtaagaattttattttgggaaatcaaattaaagaactagtagataggtctcctaacataataaatccaatctgttatacagttgtacaggaacaaacatagtaaatatagggtttggtaccatttttggtttcaggcgtacactgggggatttgaaacgtattgcctgttgatggggagggacaactgtacatgtgagacacccagaaaaaatgcataaatctcaaagaggtgcctaaaattcaggcttgaataccatcttcaatggcaaaggaagaaagggagaggagaagacaagagtaaggtttgttaggcagattattcagttggtgccttctcaaggatcagagtctccagagactctgtcctcctcatcctagtaaggagagggagacacccttacaaatggagacttccttggtagatataaatttcccttacaaaagggtcacttctactctgtttttagagcttttcctgtgtctactgtttctcaaaataatcagcttaaaataatacttatgctaaagtggcatattttggggtggcatattctggtctcatacacactcaaggtggaattttccattgtttggtttataatgttggagcatgagtattctctagaggtgtcagtgtcagaatgatcttatacatactctggttgaaacgtcagaattgttatgggcttgggttcgatatttatattaatatattattctggtcacaagagtattgcaggggtttagatttatctcatttttccccatttttgacatttatttccatttctcaatttttctttccagacctgaggtgcccagctcacatgaagcagagcctctttccctcccacaatcatctcaagatcaccagagcatcagttaatgccttactttctgggcttatctactcctgtatttaaagatgttgtttctacattttcacttgtccttggaaattatctttttttattttttgcaagatcatcgaaaatttttaagttccttaaattttatttagtaagtttagtaggaggcatttcttattatgttaggcttccatcttgcaggccccagaactttctgacactgtgaaggccataccagcccacaactgccaggatctattgtatgtgggaggaaaatcaacttctaccctgtaaagtcattgtgattattttgtgtcttctgtcaaacacagtaaaaattaattctattacacctttgactatttagattagagaataaaagactaagaggcacatattaatttttttaaaataactaaacaataacaatctttgccaaagaaaagcattttgaaatgggtggtagcatagagagaaggaagagtcctttcacactaaggatgtcattgccattggcatatctggctttagaaactacaaatggctcgattagctttagagttctttctgctttttagaatttttctacatcactagaaacatatctcttatatttaatctcaatatgaaaacctgtttcatagtacttacaataaatgcattctcaaatgttacatcaaagtactccacctacagtgatgtctccttgtagtgaattagagactccaatccaaaacgtatcataaactaaatatgcacccggtgaggccatgctccatgcagactgcactaaacaaacaaacaaaatgctttaataatcttagagcattccaattacctggacttccagctggtggtgagtccttcctgctgtcagtgtgcagaatgacagccagccccacagagtctcctgggaggactgagctgctgaggtccacccgagtcaagctctggggctcccgctcacagcctcccgccgcgtttctggggtcgtcgcctccagttgcattcatttcttgaccttttctccacggtctctgcacaatgtgaacaatgctctgctgatccaggtcacaattctgtttgggagcaaggtaaaaaaaaaaaaaaaaaaaaaggaaatgtcaaacatgaaatgcgagatagagtttaacttgccctccgtggtagaagggaagcaaaagtgacatgtaactgaccaacttaggtgctcctttgcccacagcagttacacactacacacggtagacaaacaacactgaactggggccagaaacagaaatttgggaatacgtgaaacacaatagaatgctgacgtcatattcaaaaggacataaaatctagcaggaaaaaataattaccaaactggatctataagcacagtgaaaacaataattccttttttccccccaagacagagtctcactctgtcatccaggctggagtgcagtggtgtgatttccgctcattgcaacctctgcctgccgggttcaagcaattctcctgcctcagcctcccgagtagctgggattataggcgggcaccaccacacctggctacgaaaaatattcttaaatagtaaaactgattgacatcagaattgatatgtcattcatctctgttttacaaaagtacagaaagtgagttattatcaatgagagggcatttctttaaagcatcggaaatgaatgcgtttgagtaggctccacacacaccgctccacgggcaccaacacacacatcattacactggtggggaagcaagacaggagcacactcttgccacccagggttcattctctttctgacgatttaaccatgaaaaccagctaacatttacgaaaaggttttgcatctacatattgacacgtaggaacagaagactttaacattttgtagcataaaaattaaaagtcagattatttgctagcacaagaactaggctaccctaaatggaattctagtttcagaatatctactacatagggccggccgcggtggctcaggcctctaatcccagcactttgagaggcctaggtgggtggatagcctgaggtcaggagttcgagaagagcctgaccaacatggcaaaaccccatctcaactgaaaatacaaaaattagctgggcgtgttagcgtgcgcctgtaatcccagctactcgggaggctgaggcaggaggatcacttgaacgccacccccacccccccaaccaaaaaataatatctactacatagaagcagttactcatatgcttgctaccctcttaagacacagcaaggaccttactctctcagtaaatcgatgtggccggccgcagtggctcacacctgtaatcccagcactttgggaggccaaggcgggcggatcacttgaggccagtagtttgtgaccagccagggcaaaatggtgaaaccccatctctactaaaaatacaaaaaaaattagccggctttggtggcatgtacctgtaatcccagctacttgggaggctgaaacaagataattgcttgaacctgggaggcgaaggttggagtgagccaagatcatgccactgcactccagcctgggcaacagagagagagactctgtctcaaaaaataaaattaaattaaattaaatacaaataaaccaatgcctttcaaatacctcttgccattgtcattttaggaatgctccaagaacactcaagtgaaatgcatccataactcatagcgatgaatgatgcccttccctgctgctttctcaagctcttctgttgccctcaccatcaatgtccctcgaacagtggtgcccagcactcaccaacacccctgaccccaaatacaatggctagaatctgcctcctccacccaggagggcaccaggacacccttcgtccttaaatcccattccaacctcttctctactcttacaccctggggctccgtctcatccccaggccctgtgcccctccccattctcagagctcccagtctctccctaggactgctcctactcagcagaggccactgtgcatcattctctgacctgaagtgctcccctgcatgacttcccagtttctgtcaaaggaaaaaccatcccccacatcacccgcttcgagccttcccctcccacctaaaaatctcattatcctcccatgttttgtaacgggctgcaagagaatcactatcttgaattcctcctacctaatctttgacatcggcaaggcaccaacagttagcaattctgtctcagaattacccttcacatcttcaactcttttacatctcaatagtcacctccccgttttaggccttcctcatgataatagctttgtaattactccccacatctgatatcgccatactccagtccaatacatacaagaattctgggtgtgtgctacataatctttctaaagtgtctcagtattacttgtaaaatggactgtaacatctcccatgttcttcaagtgtgtttgtacttttttcctttctaaatcatgatctagatttgatttttcatcttccttacccctcctatatgatacatgtggcagattaaactattcttcaaaatcatgcacgcctgtacattagtgcgcatacatcatgctccccacttcctccctgcaatctgtgtccagccacatgaatggctttggccaaagggatgttagcagatgtggttgaaccagggccttatatttgtcccgctgctaaggtccatcaaaagaacatccctgccaggcacagtagctcacccctataatccaagcactttgggagactggggtgggcggatcacttgaggtcaggagttcaaggccagcctggccaacacggtgaaaccccgtctgtactaaaaagataaaaattagccgggcatggtggtgcgtgcctgtaatcccagctactcaagaggctgaggcaggagaatcacttaaacccaggaggcgaaggttgcagtgacctgagatctcaccactgcactgcactgcacagagcaagactccgttgcaaaaaacagaacttcccagaaagcttctacctgttcacacatggcccagacctgagtccaacccactgaggtgaccaagtgcagccacactcacagcatgaagcagggacccgcagctgaagccagcctgaggccgcgggcaccctcgctgacctgtaggcacatgagaagatggcatacttttatggcactgagatttctgcttgtcctctaatcaataatggcagacagtcctctattttccattctatttggacaagctatcactgtccatgatcagctccgtgtcaggcagcactcctccagctgtgcacagcctctagcctaagtcgtttcagagaaatgggcatcaggatccgagtatactcaaggacttgcacaggagcatgtgagctttgccacagaaggaaaagtggagaattagcaccctagcctatcttgaggtttctatccacattttttccctacctttccatgttcaggactcagttacttcctgtgatcctcctagagaaaagtaacacctttctccctcatctgaatctaaaaatctttgcttactgtgctcttcttattgcagtggttagagcttggacagtatatacatatatattgtgtgtgtgtgtgtgtgtgtgtgtgtgtgtgtgtgtctgtgtctgagtcttatcttccaacttattttagaaatacttgagagcagcaacttggccatagtagcattcatcagaacacctcacacagtgctttggagccaggagatgtagaaacatatctatgaattctaaaagtttgaaaaagtgaatgactgaagggaagtaagaaagaatgaaggagtgaatgaatcaatgaatataaacagtcataagctcagtgcccaaagtgccacagagggaaccagcagaacaagaaagaaaggacacagaatttaaagtcaaacggactcaagctctacataatttattagctgtatgaattttggcaaatgattcttcctttcccagctttctgccattgacaataatatatcaactttgaaggctgttttgaagatttaaggaaatgtaaagagctcagatcccgatccgcaatgatacatcgttggtagtattgttaccatttatgagtttcagaaaactaaagaggatgggtccctaatcttgtacatgaataaggtgtcagaattctgtttagctgcacacttctgtttggaaaatatacagagaaggcagaataagcagaagctatcaatgtgacaatctctctggtagcattccaactttctgtgaactaaaaatcgatacaaaaaaataattcctatatcaccatatagccagatgccatgaaacacgtgaagaacctgagtgaattttcagggacaggtaaaatgtgacaaatgttgatgaaatctaaaagatttcaaatccagattttcctaatgctcagggtacagctgcaaaggggaaaagaaagttctcaaacagatttcagtagttacagtgatacttataggacgcatttccctcagttggcatccctgtttctgaaatcattaattgcttaatctttgactcttacagaaaatcttcttggttccagaagcggtgcctttgacagacagtggactcacacaccacactggttcagttcaaagccacattccatggacagtacattggatacagtccagttgtacagccacgcaaaagccccaaatactacttagttctcctagtatacaaaaaaattcctcagatgtgggaagaaagagattttcggtgggaagacatcagagtgctccaatatggtttcaggctaccttagagcagaaacaatgtcttatttatctttgtttctccaataaataaaatattacctgtcaaagagaaaacccttaatacaattctttctttttttataacaatatattaatccaacaagtaaggcagtaacaaattcttcagtgtagacaaaccaagtaggtatttctgtaaccgggtttggtcttacactgtcaagcacagctgatgacccatgggagactgagggatcagtatcttgggctttctgtctataggatccttgacatggaaacataccagtattaacaaaacatccatgggagttttttttgccaaacaatgatcaactctcatctggttggacattatccaataatatacaaaaaactgatgtatttttctttttccaaaaagaagttccttcaacggcacatagttaagatccaaatatttcagattcttccaagcacttaataaagagttacaaatatcatctctaaaatgattaataatgagattctaaaattgttaacaataccacattattaatacattgttttcaggagttatgaaaatagttatgttaataataaaaaacatatagaatatacttagccgtatattgcagaccattacaggttttgagacataataaattatttattattctcacactctgatgagggaataactatcaccatctgctatgtctcaatgtgtcctcaaaatttatttgtttcaacttaaccatcaatgtgattgcatgaagaggtggagcctctagaaggtgattaaatcatgatggggcagagccttcatgaatgggattagtgcccttataaggcagtgcaagtgactttctgtcctttttgcccttttagctcttcccctcttccagcaagtgaagacacaacaagaaggccctcaccagacactgaataccaacaccttgaccttggatttcccagctttcagaattttataaattgcccagtctcaggtattttgttatagcaagacaaagaatacaagacaacatacataaagttagtgtgtaaacagagctagaaatagtgtgtaaatccaagagaactgtgcctggcacagataatgctgttttacagattacttattgtggttgctgttgattccactttatagaagacaaaggggagccacagagaagttcacgatgggttcaacaacacccagctcccgagtgtgaagccagggtaggaacccaggccatcgactcctctgctggtgttcattgactctgctgagaggaagtggagacttggatgaggcagacaaactaggacaagtctacaggggcccatggtgaagaccagggtttggatgctgcaacggaaccaccccaggtacgaaggaatgattcagagaagagccagatagctgaaatgttaaaaacatgagaagacaggatctgggacggggctgtataggaggtagcaaagtaaagattagtccagtgtgattttaaagaggaaacaaaacaaaacaaacaaaaaggatgaaagtaagaacaagtgggttgcagaggaatcagtgagagtatggaaagtgaaaagaagatggtataggtgagctggtaacacacctcgcagactccggatgctggtgctggctcaaggtaaagtctgtacctctggagatcccgtcaccccagggaagactgcacttatcacgtcgtattgtagtttctttgtatgcgttgctctctgttaccagacaataccgtctttaagaaaaaatactgcaactgtgtctgtagtacctactgtagggacctgttcataaaacacactcccctgtgtctactgaatgactctatgatcctttaagcacatacctagaagtgaggaaacattccagatggcgttagtaacttacccaagtcaagtctgatgcataattgggaaatgaaagagccaggcctgcagcctcagttttctggctctgagcccaatgctctatttcaaacatcccaccttggattgtccacctctctgtgctcacgacataagtagacatgttggcagaagtgcccagccagtgtgcttttatcagcatactgatcagtctatactcattggcatacttactgtaccactgtctatggtctgtaaagtaggtagggctgtcttcaatatcttcagtatcattcattcattttcagttccttctaaatctgttaaactctatttcctcatacaaaatgcttaaaatcatttcagtgtatggccaacaaacatatgaaataatgtttaatatcactagtgatcagggaaaggcaagtcgaaaccacaatgcgataccatcttactcctgcaagagtggccataataaaaaaatcgaaaacagtagatgttggtgtggatgcggtgatcagggaacacttctacactgctggtgggaatgtaaaccagtacagccactacagaaaatagtgtggagattccttagagaatctaaaagcagaactaccatttgatccagaaatcccactactgggtatctacccagaggaaaagaagtcattatacagaaaagatacttgcacacgcaagtttatagcagcacaattcacaattgcaaaatcgtggaaccaacccacatgtccaccaatcaatgagtggataaagaaatcgtggtatatgatggaatactgctcagccataaaaaggaatgaattaatggcattcacagcaatctggatgggattggagactattattctaagtgaagtaactcagggatggaaaaccaaacattgtatgttcttactgatagatgagagctaagctatgaggacacaaagacataagcatgatacaatggacttcagggacgtaggggaaagggtgggaggggagtgagggataaaatacaacatatatggtgcagtaggtactgcttgagtgttgggtgcaccaggatctcacaaatcaccactaactaacttacgtaaacaaataccatctgtaccccaataacttatgggaaaaaaatcatttcagtggaaggctgtcaaactttctaatgtgtaataactttacattttaaagactgaacatttctgatttttatttggatttttaatagactacattttctatctagaaaaggaatacaatcagccaagaatgatcagactaatttaaaaatcaatagtgttaacagattctaatgttaaaacatttttacattgagttctttcttaaataactttgaagacacacttttaataacaccttaaattgtccttttttgtgctgaacaatcttggcattctttctattttttgcttcttctgaaaataacttctaacaaacagatttttttttttttaaggcagggtctcactctgttacagcccaggctggagtgcagtggcatgatcaaggctcgctgctgcctcgaactcccagactcaagtgatcctcttatggcagcctcctgagttgctgagactacaggcacacgccactacacctagctaattttctagtttttttttttttttttttttgtagagatgggatctcacttatgctgcccaggctggtctcaaattctcaaattcctgggcataaatgattctcctgccttggactcccaaacactgggattccaggcctgagccactgcacctggctttaagcagatgtggttggaagcccatcacagtttttaataacgtattttctatgccaagaaaagacaaaacggcaatgatttaataagttaggccgaatgcagtggctcacgtctgtaatcccagcactttgggaggtcaaggagggcagatcacttgaggtcaggagtttgagaccagcctggccaatgtagtgaaacccgtgtctactaaaaatacattaaaaaaaattagccagacgtggtggcacaagcctgtaatcctggctacttgagaggctgaggcaggagaatctctcgaacctgggatgtggacgttgcagtgaaccaagatcgcaccagtccactccagcctgggtgacagagcgagactccgtctcaaaaaaaaaaaaaaaggtgttatttaaaggtgttttttaatgtaatggctaagaactattttgtttggtcactgctaacaatgaaatgtgtttcaagacaagatgagccagagatgttcacagtaagtcagaataatcaaaaagggaattgttcccagtgatattttttcacttgaactccagttcccctccatagttttcaatgaacactaaatgccaatttatattaattggatgagaacagaaactatcctttcaaactgatccttcatttaaaaaaagggggacttctaaaagatgaatatttgtgatttagcctttcaatttatttcacatttcttatgactgattttcattatgatcaaaaatattatgctgtgtaaagatactgaaaggccccttctctggttcccaaaggcaggcaatacaattactgtgaaaggtcaattagccccacactaattagccagtgcaggcctgggccttgtcacctccatgtccctcccaccacaggcctgagacctttctgctgctcatgaggatcctacaccagaggggctccatagggggcgggaggggggaccgctcaggaatcactcggtttggctacatgccagcaactgcagtaagtgatttagttttgaagagcagaggacagtgctgtttgagcatgtagggtcgggatttcacttctctgggttccctctttcatgaatacaaaggatatcggatcaccaaagctatgcccattaaacccactttaaaattgtgttttatattgtcaacattgcaagaaatgcctcaagtatcacttcttttttctttaagtattattttattactagttgtgataaatattatgaacactttaaaatatatatattttatttgacagaattaaattaatgtttttaaagccatggaatacgctgtatagaattactggggtcagggtttgagagcttaacaacacacgctcttgatgaagctgacccggaaactcaggcacgtcggggaggtcagcactacccaacagaaccacatgcgagtttatgccacgcttcccaaattccaatggttgcgattaacactcaaaatcatatacctccgcgattgcaaaacaacatctgcgcaaggtgtttactgtgggattatttataatagaaaattatgggctgggtgcggtggctcatgcttgtaatcccagcactttgggaggctgaggtgggcagatcacccgaggtcaggggttcaagaccagcctggcacacgtggcaaaacctggtctctactaaaaatacaaaaattagccgggtgtggttgtgcgtgcctgtaatcccagctacaggctgggaggctgaggcaggatactcgtttgagccgggaggcggaggttgcagtgagcctagatcgggccactgcactccagcctgggtgacagagtaagcctgtgtctgaaaaaaaaaaaaaaaaaaaaggaaaaaaaattttcagaaacaagtgaaatgcttgaccatagaagacaagtacaatctgtgaagaaaaaagaaaacaaagcagaaaatagaatatagtaagggactttctatgtcaaaagcaaagaaaattaagtacatacaaaagtagctgtttttgtaaaaggaaacgtagaaaggaaaatcgaagttagtgaaaatggttacctatgagggagtagggaaatgggttaaagggatcgaatgggagccatgtttccctaacgtgactatctacagtttcaggtgtgaggcacagaaaatgtttcacaaaatcacaacaatacttactaaataaaaaggagaaaaaaagcaaactctaaaactgaaaattaccagaaacatattgagctgacaatgtcagtacataaataaaagtagttcaagtaacttttggacacagtgctctgtatatcctttagtacaaaaaaaggaacccaaaagaaattttgtactttatttactaagttgattactggtatgatataggtgtaggaattcagaaactatttgtatttatgttaagatgaaaaattactaaacttactgatgtttttggaaaccgagtttttcacagtggctgaagaaggtgagaaggagcttcatgatgttggagttgaaataaaggaaacaaaatgtacttatgaatttttaaaaaatccaattcattgaggggaaattactcacctatccagaagttgcagaataatgagacccatgtatatctattcatcaccttattcaacaattatcaacttgagtccaaccttgttttatcagtatgaattatcatggataaatgatattatcaatatcactacccactttcccttcctatattattttgaggcaaatctcagatatcatattatttactcaacaaaaatgatccatatgtatctctacgaaggaggaattttcctataaaacctaactagaataccattagaggaactgaaaaattacaaataagcatttaatggcatcaaatatttatgtgtccataattttaattttttccaaatctgtttgaatcgagatccaaacaagtccatattttgggactggaaggaatgtatattatatcttcttgtaatttaattaattaatttattaatttattaatgtatttatttatttatttattttgtgagaccaggtctccctctgtcactcaggctggagtgcaggcatgatcagggctcattgcagtctcggcttccagggctcaggggattcctaacctcagcctccccagtagctgggacaactggaatgtgccactacatccagctaattttttgtatatgccatacagacagggttttgccatgttgaccaggctggtctcaaacttctaggctcaagtgatctgcctgcctcagccttccaaagtgttgggattacaggcctgagctactgtgcctggcgttcaatgtttttttattaagacataactaatatattgtagttctcccttttaaagtgtataattcagcagtgtttagaatatttgcaaggttgtgcagccatcaacactctctaatttcacaacattttctcttcagttgcttttacaagttccctcacccatctctcttcctgtttttacaattaaatttgaagaaaaatgggttaatccattgtagaatttctcataatctaaattttgccagttgcatatgggtggtattactgaacaagtttcttcattgtccttattatagaaaattttatatttgtggccaggcacagtggctcacgcctgtaatcccagcgctttgggaggccgaggcaggcggatcacaaggtcaggagatcgagaccatcctggctaacatggtgaaaccccgtctctactaaaaatacaaaaaattagccgggtgtggtggcaggtgcctgtagtcccagctactcgggaggctgaggcaagagaatggtgtgaacctgggaggtggagcttgcagtgagtggagattgcaccactgcactccagtctgggcgacagagcaagactctgtctcaaaaaaaaaaaaaaaaaaaaaagttatatttgattctacaggcttgactaggtttaggcttaatatgttttgctgggattcctgtaagggtgctgctttgttcttcaagaaggaagcactatgtgactatgcctgagtctgactacatttggctgtagtgtatcttctttatggaagatacgctaaaattgtaaaatggtgatcttttaatattatcacttcttctcaaactattagataacatatttctatcaagataaattttccctcaatagctattttgttactcagagataaattttgtataggaaggcagaataaatgctctattattttcttggtttatacattttcaaaataagttgactctagcaatgaataaaaatgcaatttttaaaagcattattaaaaaattatagaaaaggccgggtgcgaggctcatgcctgtaatcccagcactttgagaggccaaagcaggtggatcacttgagataaggagtttgagacccacctggccaacatggtgaaaccctgtctctactaaaaatacaaaaattagccaggcgtggtggcggatgcctgcaatcccagctacttgggaggctgaggcaggagaattgcttgaacctgggaagcagaggttgcagtgaaccaagaccacacaatcgcactcctgcctgggtaacaagagtgaaaatccgtctcaaaaaaaaaaaacgaaattacagacacacacatattaatgatgtccatcgattgtacttattattttgattggtggttatctatagctaattggcacatcttagaatgggatcctgaactgtggcagaggcgcaagagtctttggtagcttccctgccatcctgtatgacaagagactccagtctgctttgaacactttttgttctagacctgtaataaatcattttgacaaataaaaatggcatttaaagatgacgatgtggatggttagagatactcattgctagtggattcataaacgtctgtcagctttttcagtgacaagaggtatgttttgttcgttttttaaagataaaatacatcacgagttcaatctgatatttcccattcaaaccgaggagtagagggttttaaataatctccttcgtcttccatcttaatcttcttttctcttgttcaaaatcgtgaaaatgaaatgattagatgtcacataattactcattattttagactacattatatacacaatgtgaatgataccattaaattgattactaatcatagtttaagtttttctgcttgtagttctttttgtcttgggatgtacctcattaaagatgtatagtcaaactgctgtattctaaagtcacttggaataatgtggctatgattacaactaaagatacttgcattcatttttttgactttattttttattcttagaactttctatttaaaatatttaattctgttttataattatggaaaatattttcaagtttctaaagtcaaactttaaaaacataaaattgtcaaagatgtctcacttctacttttgtctgtttaatatattcactatctttttgtttgtttttagatttctgctttacctctaacagaagctggtgtgtgtgtgtgtgtctgtgtgtgtgtgtgtgtgtgtatttaagcacctctcttagataattgatagcatgttatatacttttttcgcttaatttcccctacaattaattctacagtagtatatacacatttccttattatttttcacaaccatacagtaacctcacgtgtggataaatcatagtttattcaaccaataccctatgttctatgacaaatgaggtcccactggccaagtttgggaaaatataaatacaaaaaagaatagattgataacaggttataatacattaaagaaaaaatccatgaatatatgataatattaaaaagtatacgtgtgaggagtaagaaagagttcttccatacagaacaacagaataaatatggcaagaactgtcggcacagacaatcatatttttgaaggcactgatataataattaattcactcaaggatcaccagtagaagctacagcaaatggatccaagattggtgggaatcgggattttggcagtttccaagtatctgcccacagattccctaataatttcaaaagaggagggttatttctgcaatgggagattcggcaggcatcactgtaactaagattcacacgggcattgtcagttacaaaggattcagcattaacgacaacaaagtttaacccaaatttagcaatgaggagacaataaaacaaatcgaggttgcaggataattctgcaaacaactgacccttacaattcaaatttttgaaggtgcaaattaggtgtgtgtgagaagactgttctatactaaagcaaaataaagatacatgataactgaatgtgatctgtatatttgactaaacttttggtcagaataatttaaaaaaattatccaaagcatacaaacaacctttaaaactcatcagtaaataaataaacaaacattaaaaaagggccaaaggctttaacagatacctcaccaaagaagatacagagatggcaaagaagtaggctccacatcttatgtcctcagggagcagcaaattaacgcaagataccactacacaccaattagaataaatcccagaacaaaggcaacaccaaatactggtgaggacgtggaataacagaactctcgttcattgctactgggaatgcaaaacggtatagtcactttggaaatctggtggtttcttacaaaactaaacatactataaccacacaatgcagcaatacctggagtatttacccaaaggagttgaaaactaaaatcatgtccacacaaaagcctgcacacagatgtttacagcagctttattcaggattgccaaaattcaatgcaaccaacatgttcttcatcaggtgaatggataaagtatcagacatacagatcatggaaaattattgagcactaaagagaaatgaagtatcaagccaggaaatgacatggaggaaccttaagtgcatattaccaagtgaaagaaccaatttgaaaaggctacatcttgtatgattccaatttgaaaaggccacatgttgtattatacgacattcggaaaaaggcaacactatagagacattgaaaatatcagtagttgccagggactgagggatgacggagggatgaatagagacagcacagagaatatttaaggcagtgaaaatactcagggtgatactatgttgatggataaatatcattatacatttgtccagacccacagagtgtacaccaagagtgtaccctcatgtaagctataaatgtgaagtgattacaatgtgtcaatttaggtttatcagctgcaaaaaatgtaccgctctggtgggggatgttgataatggagagggtatgggcacatttgggcagggagtagatgggaaataccttcctctctatgatgtgaacctaaaactgctaaaaaataaataaataaaggcttaaaaaagctataaaggacaatttgggaacaattgggaggatctttgaatatggactacaaaagaaatatcattgtatcgatgttaaattccttgaaatttacatcacacattacagcggctacacagaagattgccctttgcctttgtagatataggctgaagtgtttaggaacaaaatgtcagtctatctgcaattatgtttagcttcttgagagacagaggaaaggaaggaggggaaggtgtgagtgagggagacaaagaaagataaagcaaatgtggcaaagtgttaacagttggggactctggagaaaggttgtacagatatttgctataaatagatttttttaaaaaattttttaaaggtttgaatctcctaaaatatcttcatactcagtcactaaatggaaagtaaccactgaaaatcagaaatgttggcgaggtgaggtggctcacggctgtaatctcaggactttgggaggctgaggtgggtggatcacttgagctcaggagttcaagatcagcctggccaacatggtgaaaccctgactctgactctactaaaaatacaaaaaattagccaggggtggtggcaggagcctgtaatcccagctacttgggaggctgaggcaagagaatcgcttgaacctgggaggctgaggttgcagtgagctgacattgcaccattgcactccatccagcctggacgacagagactccattaaaacaaaaaaaagaaagaaagaaagagagagagagagaaggagagagagggaaagaaagaaagacagaaaaagaaagaaagaaggaaagaaagaaaaagaaagaaagaaagagacagaaacaaagagagaagagaagagaaaagaaaagaaaagaaaagaatcctctgtcttaatcctgagttctaatttgattgccttgtggtctgagagactgtttgttatgatttctgttcttttgcatttgctgaggagtgttttacttccaattatgtggtcaattttagaacaagtgctatgtggtgctgagaagaatgatttggggtgcagagttctatagatgtctattaggaccgcttggtctagagctgagttcaagtcctgaataaccttgttaattttctgcctcattggtctgtttaatactgacagtggggtggtaaagtctcccactattattgtgtgggagtctaagtctctttgtaggcctctaagaagttgttttatgaatatgggtgctgctgtattgggtgcatatatatttaggatagttagctcttcttgttgtattgatccctttaccattatgtaatgcctttctttgtctgttttgatctttgttggtttaatgtctgttttatcagactaagatcgcaaactctcctttttttttgcattccatttgcttggtaaatattcctccatccgtttattctgagcctgtgtgtctctgcacatgggaagggtctcctgaatacagcacactgatgggtactgactttttatccaatttgccagtctgtgtcttttgattggggcatttaagccatttacaattaaggttaatactactacgtgtgaatttgttcctgcattcatgatcctagctggttattttgcacattagttgcagtttctggaaactgaacaacctgctcctgaatgactactgggtaagttatgaaattaaggcagaaataacaaagttctttgaaaccaatgagaacagagacaatgtaccagaatcactgggacacagctaaggtagtgtcaagggggaaatttatagtactaaatgcccacatcagaaggagggaaagatctagaattgacaccctaacatcaccattaaaagaactaaagaagcaagagaaaagaaattcaaaagctaaaaggccaggcatggtggctcactcctctaatcccagcactttggaaggttgaggtgggtggatcacttgaagccaggagttcaagaccagcctggccaacatggtgaaaccccgtctctactaaaaatacaaaaattagctgggcatggtagcgtgtgcctgtaattccagctactcgggaggctgagggaggagaactgcttgaactgagacctggaaggtagaggttacagtgagtggagatgacgccactgtattccagcctgggctacagagtgagactccatctcaaaaaaaaaaaaaaaaaaaaaaggctagaagacgacaagaactaactaagatcagagcagaactgaaggagacagagacatgaaaaacccttccaaaaaatcaatgaatgcaggagctgttcacatatacaccatggaatactatgcaaccataaaaaagaatgagatcatgtcctttgcagggatatggatgaaactagaaaccatcatcctcagcaaaccaacacaggaacagaaaaaaacactgcatccatgccataaaatacaactcagcatagtattccatggtgtacaaaaaggatgagttcatgtcttttgcagggacatggatgcagctggaaaccatcattctgacaaactgtcacaaggacagaaaaccaaaccccgcatgttctcactcataggtgggaattgaacaatgagaacacatggacacagggaggggaacatcacagactggggcctgtcagggggtggggggctagggaagggatagcattaggagaaatacctaatgtaaatgatgagctgacgggtgcagcaaaccaccatggcacatgtttacctatgtaacaaacctacacgttcagcacatgtagcccagaacataaagtaaaattaaaaaaaaaataagaaaataagaaatgcggtattactacaaaatttttaggatgaaaaattgtatgtatttcatgctatctgtcatgaattcagctatctaacctgctatatcctacacatagcttacaaactgacctaagaaaggagggaaaaatgaaagcaaaatccaaagttgcttataaaaaagaaatctttgttttggaatatgagaaagctattgtataaatacagattaccaatatggtttaaatagaagaattatagtcaaataccatagcaaatgagttaaaattttgcagctcattacagttttgaggtctctaaagtgaataagcataatacccaaaatactgactttgtagaatcctaaaatccagttatgcagtctacagcagcagtcctgaatctttttggcaccagggagtggttttgtggaagacaatatttccacagatgagggcaatggggatggggtgtggtttgtggatgaaactggtccacctcagatcatcaggcattagttagattctcgtaagaagcacacagcctagatacctcacacgtgcagttcacaatagggtttgcactcctatgagaatctactgccactgctgatcagacaggagctccagcgtcatgctcatctgcccatactcaccccctgctgtgcagcccaggtcctcacaggccacagacaggttctggcgccacgggggttggagacccctggtatagagcaacgcatgggcaaaagcactgcatgagtaatcaaggtcaaaggcagaattaatggatgttctaatttactatggaggcaacatagcaaaacctcttaaacattttacaacaaagatcctgtccatattacagtcttcaaacagatatggacttccatacaagaagagtatattaaaaaaaaaatccacaccctctcagatgttcactcaaagtgataaaaatggaaacaatggaatcacatctgctaaaatccatattagaaagtatacaaataaaagtgcttatgataaacagctaatgagaataaatggatacactattaagctatcttggcagaatttatcaatgtcttagatgtacatgcagaaattctcacatatgtcctcaaaaacacatgtacatggatgtcctttgcaaccacagtaaaaaccatggcaacaatctaaacagtcatcaatattgggctggctgccattcatacatacaattggtaaacatttgttataactctagaagtacacggaaaagaaggcggtctattttttaaataaaatcagcaagttgcagaatagcatgcactattattattagcccatttgtctgtatgttgtatatcactctgtatatgcattaacttattgggtacacatagcaaattttgattaactctgaagaatgggattaagtgatggaagagaggaatttgaatgtttctgaaattttaaaaagtctaagcacacattactttgataattttaaaaagacacctgggaaattatttgcaagtaaaatactcatttaattcctgataagctttcctttctttctttctctctctcttttttttttttgacagaaaagataatgacagtaaatgctttacttagaatagaatggaattttttttctacttttctgtcaatgtctttatggatgatgttgccatcttcattttgtcactgttagttgtaacttctttctgacctatgttttaccctttctggctacaagctcattttacacacagttatttatatgaacagttgggagccactcactcacctctcttttgagaaaagaaaaatatatttgtgctttctaacttttattatctttatgccaataagtctttttattttcacctaagatttgtgtccatttttggaatggcagagatgctggaaatcatatttcaatccaactgaaatgtacgtgtgagtgtgtgtgtttgtatgtatgcatggttttatgtctttagaattctttgtgagtgctccagtaaatctggtgccttctgagacgacaagagaggattaaggaaatggtatgagttttttgtaactatctcaatgaaaaagtagagaagcatagagtgaaaaaatccttagaacagtcttgctctgtcgcccaggctggagtgcagtagcacgatctcggctcactgcaacctccgcctcccagattaaagcagttctcatgcctcaacgtctgagtagctgggattgcaggtatgcgctatcacacccagctaatttttgtatttttagtagagacagggtttcgccatattggccaggctggtctcgaactcctgacctcaagtgattcacccacctcagcttcccaaagtgctgggattacaagcaggaataaatgttactgtattaaaagtattagatcctgacccctgcttgatgtgttaagctcagtgtcctctatctgaaataaagatacacactagcgtgttctccagattcaccttaattttacctgaacaatattctaaaattttcaaattatagcacaaacatactaagtacacatataattcacaaaaattaaaaacatatatttagccaaaagtaaataaaataaaatcagtaaaataaacaaatctgagaacttcatgaatggcaaccacagcctaaatgcaaagaaggaataaaacagctacttcttggctcttgggctttcatgggcccaggatccactaatgtaagagtaatttcagagattttgaagggtaactgggtatatttatgtattgtgttatttctttcttttttttttttttttttttttttttgagatagagttttgctcttgttgcccaggctggagtgcaatggcgcaatctcggctcactgcaacgtccacctctcgggttcaagtgattctcttgcctcagcctcccaagtagctgggattacagacatgtgcaaccatgcccagctaattttgtatttttagtagagaccaggtttctccatgttggtcaggctggtctcaaactcctaacctcaggtgatccacctgcctcggtctcccaaagtgctgggattacaggcgtgagccaccgcacccggccatattgtgttatttcatctcacatcttgaccttgaactttgccagttctcctataaatagcaattccactgtagtgacttacatttgaagtttgggcagtttttgataaatatccttattactggattttcttttcaaaatgaacaagaatattggacaactcaggtcctccgtttgaagacattcacagctgagaatgatattcgtatacatctgggccacagactagcagttcatctagttaatcagttactatgtagccaacctcacaagttgctatttactgccaatatgctgcacagctacaagtgttatgggctaaattgtgtcccctcacaagtcatacattgaattccaaacccccagtatcccaaatgtgactgtttggagatagggcctttacagaggtaaccaagttaaaatgtcagcattagggtgggtcttatctaacatgaatggaatccttttaagatgagattcaggtatagacagacacagaaaacagaccatgtgaaggtacacggagaagacatctgtaagcccaggagagaggccacagaaggaatcaaccctactgacaccttgactttggaattgtgagaaaataaacatattatttatttaagccacccagtctgtagtgaaggttcattttatacaagaattatacaacattttactggtccctctcgaattctatagcagcaggcatgtatcagggatcttcacagatattttggagatttttttttttttttttttttttttccgagagggcctctggcatatactcttgacataacatctgggcaccatgggtagtacctcctttatgacagatacttcattttaattaggggatgactgcattatttcaagacaaagcaggtgtaggttattattgggtgttgtatcaaagaaataaagaaatgtaggatgacatggggttattcatttctgcattgaaaataaggggaaataaggagttatatagtaggatcttcgcaattacactgaaaccagtatagtgcgtgcttgttgaatgaatgaatatcagtaataactctcaagaactgtattaagcaccatatttactaaatatcttacatattatttgtaatcatcaaaccacactgataaataagtattgtagcagagacagctggcacctcatcgaaatctgtttcctcctcttccccgacaccagatgacctgatttcccaaattccttaacatttagggttggctacactgattccttttatctgatgggtatgactagaagagatgtgtgccactttgaagccaaagcatgttcacagaagttgtagtgaacacagacagacaacaaacagataaatacacgacaaaatggttgataaatgtgtggcggcgggggcatagatggagagatgggcaaaatacaagttagagacaaactctcaactgtaagctgggagctcacatcctatggtttcaaccacacaaccaaagactacaaaatgcagcgtggcagcataatcaaatttacatcatcaggttttggattgtcaataaactttctagagattactctgcacagccaaaattttaaaatgatatcagatacaacagctaaaattactgggttgaaactggaagcttcctttttaaacagagctgtaaatgtataaaatgccacattagggcacaggttttatcacgtttatttgctagctaattattgaatccaaagcctttccaaacttgtttttggatgttcttgtgtttgtttgtttgtttgtttttcctaaatctttatagccgtgagccttgatcttcatgttttctttctcagaaatcaatcattcctttgtgctacataccacctcctccttcctgatagtatgtaggccatcttcaaactccctacaacttcaccaacatttccaactcattttcatacttttaagcccactggcattatacatgcaatactgactccaataaaatttatcatgtgggattagcataagcagaggtggcaaacttctcatttgttgctcccaaaaacaaaatgctagatcgctctcaagtaagaagaaacttgtatcacagtgtggtttggatggttgctatgacaatatcgagttcttctttgagaaagaccatgataaggcattcattaggaacataagtacctagcagtgagggttgttttctttttcatttttaaaatatctggccaagtagctggcgtttaaacagatcaagcattttacctacattctccaaactttaatttcataacgactccttgaaataagatgatggacaacaaaactggagctcaaagagatgcataacttacctaaagggatatcactggatttgcatccaggttcatcttgtaaaaccacgttgaactgcttaccttgactgaataaatcagcaatgagtacagatatctactttaattaacacatctaaattttgcttcattctataaccaaagcagttaaagggtagaatttggaagcacttaagatgaaccctccaattcttctctattgtctccaaaggctgtcccatctaatggtacagatgtgtgaaactcagaaaaatgataacagattacagatgagacgcaacgaaagcttccagccaggaaggtgagtgaggcagatagacaagctcatgaatttccagaggaacatatcacaattctgatttgtctgtgaggaaaagacatgatgtctccctataaaaattcactgcacattgccaggcatgggggttctcgcctgtaatcccagcagtttgggagtctgaggcaggaggattgcttgagcccaggagttcagaatcagcctggacaacatggcaaaactctgtctctacaaaaaaatataaaaatcagctgggcatggtggcacatgcctgtggccccagatactcaggaggctgaggtgggaggatcgcttgagtctgggaggtccaggctgcagtgagccatgatcatgccactgcactccagcccgggcaacagagagagaccttgctccttgcaaaaaaatcactggacataatgaaattatgaacataagaaaaggttggatttaagggctattttaatgtaattcccatcattttcatcattcttttgtgattcatattatttaccatggaagacttctatttaaatcaaaaggattaactgggagggttacattgataacaaataactagctatcacaaatagaaatttgtgaagggatggaatgtgagaaaattagctttgattatgaaaaatgaaagagaaaagcctaatgtagaattcgcagctaagtgggggcaacccatgccaatcatttcaaaggctggtcacacccgaggcgtgactaacccagcagcagatggaacctggattctacatttcaccatgcttggggtgggcttggggctccatgacccacaattttcccactgcatttcccaggccaaatgcctcaggttctgtcttattccggaatcctgttcatgattagaatcatgctcaagagctaaaatcttcttctgaacttaagccccactgacggaagcactgaatatgcctaactcttacagtttccctccctgcctggaagtgggctctataccaagccaggtggtccagagccactcttctgcccacatcctatcctcatcctcatcttaaatgtagccaacaagaggaaaaacatccattctggttttggctgctggtagtaggcagcggtctaaggtagctcttgagtgtctcactccctgatctgtgtatctgccttctatgagcagcatctgtgactatgaagaatgccacccgtgtgattaggttacactatagggccaaggagaggggggttttcagatatacgtcaagtctgtaatcggctggcttgttcagcaaaagggagattatccccggcgggcctgaactactaaaaagaagtgtgcaagtgagctccatgaaacggggtctcaagttcagagacatgaagtgacagagacttcacgttcctgctaggcttgaagaagcaagtcatcgtaagttctacagctgcaagaaagtgaacttctccgaaaaggacacggagccctcaccgaggcccccaccaaccccttattgtagcctcatgagcccctaagcagaggacccattaaaccaagcccacaaacatggaaatggtgaaacactcacatttttctaccatgataccatttataaacatcggatacatttatcattccaaggattcttgccatttgcagatacctatgcttggctgctgaggaaggctgaagccccttgaggacaaagaaacatgagcttgttgtcatttgatcaaacgggctcttgaagcttaggtcagcagtaccattgtgaagtctgtttttcactttaaggccatgtgagacaaagagatttgttgtggtctgtagggttttactacaacataggatgtggaatatggcaaaagtgtagtttcctacacatgggtttcctaggatggcagtaatcaagtaccacaaactaggggtttaaacaacagaaatgcactgtctcacagctctggaggccagaccctgaaatcaaggcatcggcagggctggttccttctgagggctgggagagaaggacctgctccagggtgctctccttccttgtagatatccaccttccccttgtgcctgcacatcgtcctgcctctgtgcttgtctgtctcactttttttcccctttttctaaggacacttatcatattggattaaggcccagcctaatgaccacactttcacttgattaccactgtaaagacctgatctctccaaataaggtcacattcccaggtgcttcaaaataggtgtttttttttagccaggcatagtggctcatgcctgtaatcccagcactttgggagactgaggcaggtggatcacttgagctcagcagttcgagaccatggccaacatgatgaaaacccgtctctactgaaaatacaaaaattagccgggcatgatggcaggtacctgtaatcccagctacttaggaggctgaggcaggagaattacttgaacctgggagatggaggttgcagtgagccgagataactctagcctcagccaacagagcgagacactgtctcaaaaaaaaaaaaagattttttgaagaacacaattcactccataacgcccataaaagaggaaggagagagcatccaaggactaggtaccttactggagggcagatagccagctgcctctgctgtggcagcaagacaccaaggtgaccctcccaatttcaatagccgtgggatcatcaagggcaggagaaagggaaaggaagaaccttgaatgtgactgcatatctaagtccctaaattgaaacagaatgacctacctggaagtaagagtatgatttttttctttccttctgagagtggaaatgagggcttgtgagaaagttgaaaaatagagaaagtttcatttcagcttatctgagttgtgctgcatgaatatttttattcgcctcctatgtcctgagcatgagaattgagcaccagaggaagaatccaagactccttcactttatccccagtccacagaccgaccattgtcctcagcaataggctgactgtcattccctctcattttgcatgcagggattgtacacgctgaaaaactcccttctgtctaacctcccctgcagcaggtcaagtatagttgtttgctttaatataagatatctgttgtactaagacttcattgaataagtttcttaaacagacgagcaagtcatttttccactcttgagtggcctcttagtgagttaatcattttgtggaaatacaaataaatctaacacaaaatatcagaattttttccttcttaatagaatttaaattctttgatttaaaacatcataatttattccttgttagatttttcaaataatatattcaaatgtccatgttaaatgtcagattaagagacaatgatttttatgagtaattttttatcaccaaaagttaattgcctcatgtatatttctccactgagttagtaatattatgacaatattaatgccgtagattttcaagctaaaacagatctatttttcaaatggaaaattaattctaaaaaaatgaaagtactaatttaaatcattaatggcaatttcctctttgcagactgccttgaacttttccagttctgccctaacagtccaggagaaggaaaatacaaattttctggcatggaaataacataagaaggagctgcaagtttcttggcaaagacattgacaacttttcaggataatcacaaaagggataggataactctaaaaatgaacataatgctagtctgagccagttaagtgctcactttcatagcttctggtagaaagagcattcatggaattaaatattaaatatgttctccgaagttctgagatagtaggataactgtgtgtacttataagaaaggagcgatgtcatgggtgattttcctaaacatagcagagaatcaggaaaacagccaagcatttgctgagacggaggcacataaaacatgaatctgagaatcccaagggtagaagagagaaatgtggagggttatcatcataaatcatgttagaaactagggcaagaaactcatggtgacctctggacactaaaatgcagctggtcataattaagcttcaggctttgctcttcctgggccagttcattggcatcgtctactgccaggcctcgtaccagtctacagaagagattgcctggaacaagcctcttgatgttattcacacttatgaaccaactctggtactagatgcaaaaagcatgtcacaagagggatgggtgggatgggggggaagggacatcgcaggaatcatgccactttccagccccaccaccctctggtgccacgtccacccttgatcactattaccaacccagtatccctccagcacttcacgggagggtgtcagggatcacaaggaaacacatgggacccacacatttcgagatgcctcacctcctgctcgaaagtcaggtgaagaaggattcttgagccaaacatgaaagattttttgagagctaagctgacaggagaatttcccgtaaaaagatgaaagccctggctttaacagagccccttttcatttttacctttaaaaagcttttcctttcatgttaccctgaggttattcaccgctacgacaacaatctccaaagacgttttctccattatagaagaggaaaaggttggcgttgggatttggtcaggaaatgaagcgttgaagacaaacaagatgttctaatatagagcaaacctgatgagtcattttctaagtgagcagccacttccagatacaattcatagtatcttcctagttattactattattattattgtttttttttttttttttctgagacggactttcactcttgtcatccaggctggagtgcaatggcgggatctcgcctcactgccacctctgcctcccacattcaagcgattctcctgcctcagcctcctgagtaactgggactacagttgcctgccaccacacctggctaatttttgcaattttagtagagacaaggtttcactacattgaccaggctagtctccaactcctgacctcaggtgatctgcccacctcggcctcccaaagtgctgggattacaggtgtgagccactgcgcccggcctcttccaagttattctgtcatttggcactgatccgtctttcaaagacattcaattaatcaccagagatgcaacaccataaaggagcagaatatttcaatatattacctgatatattttcttttgtcattacccttttgtaccctgtagctttctaccttaaaggctccacctacaggcagaggctcattgccttagagaaggagagacttaaaaaaaatcccaggcaaacagagggtcaagtaaccagacttggaattgcacagatgttggtgaatctacagcagccacaatggtccaggattgaatctactccatggaagcttcgaagtgggaagagccgaggatgacctagagcccataagaagataagtctgaatcagctggaggaaggtggatacccacaggatgtgtgatggggtctggatgagagcagctgggtgagaagcagcaccactgccttccttagacccaccaggatcagttctttcggtagtgatggagatggggagggggatataaaaacccccagatctctttgattaggtgaaagtaaagcaaccaatggaatgccctaattctttctgggatctcctacagcacacaaaaaaacctgatttccaacactgggtagcagcaatactgtaggtatggccccacagagtgtctatgcacagagtcctgtggtcgctggggacccaaggggtgcagtaaatacctcatgaagggcaaggaggaggtcaaagagactttctgagaataacagtatttccaaagggtgctggctcaaaaaatgaaaatatgtaagccagatgtttagcatcctgggtaagatattaacaagcttcaacatcagatgtaaagggaaggaaaagaaaattgattccacaacatccccagtttcacttcagtagaggccaataagacagaagccaacaggaaattagacttcccttcttcaggcagaacagtggtgaggccctatgggctgatcatccccaggaaaaggatgaaaggataagaagagggaaagaacccgaatgggaaagagtatttctcaaaggggcccaagttttaatttataagattaaaagaatgagggttaaaatgtaaacaaagccaccaaaatatagaaaacacagatttggaattctaaatccatgtactccattcatggaggaggtggaaacttgctgagttctcggaccactcagccagttcacagacataaaaggagacccagcggagagggagtgggtgagtgggagatcaccgccctggagagggcagctgtcccattggggggccccacctccactttttcgagtgctcttcctccacctcaagcccggtggaagccaggggatgactcagagatggggacacagagggctctcctcccagcctgaagagctagagcaggctgtcaggaggaatgtgaatacagtgggtggacctgtactccagggctgtgggaaagactggggttccccaaggaccagatgtgggcaggtggagagacagaaagagagagagacagaggaagaagggagacagagagtgcccgccaccgcacccggctaattttttgtatttttagtagagatggggtttcaccgtgttagccaggatggtctcgatctcctgacattgtgatccgtccgcctcggcctccgaaagtgctgggattacaggcatgagccactattcccggctgggagaagtcttagggcttagacatgagggccacctggagggtggcaggaccctggaaacaagaagccaaagtcaagtctttagggcagcaggagagatcagaaggggccatgcaacccggctgaatagagaggcatcattgggaggcaggagagatgcagaaaagaggtttccagcggtgcaaatgtactaagagttcatgaaagcccccggtgctgaggaatcagctggaacccttggccaggctccaagtacccgagccaaaagctctgtttcctggccccattctcctccttcctacaccctttcaagcttcctcaaacttcttcagagcttggcctgagagagagaaggaggtgaacagagagagaggagagagacagagagagagagagaagcagagactctaattaaacctcttcctcaatgtcaatgtcaggcagagaagaacctgtggcttgaaatgagcaagaaatacaaattgtggaattgattaataacttgcctgaataccaggattagtaaatttagactttgttcactacttcaactgcccacaggactgagtaaaacaaaaatcacagaccctgctgaaactgcaggaatgatttaactcctgcacacgatttaattgggcaactggaaaaggaaatacaaccttttgttctgacgttattaaagatgtgcttgctcagcatcattattgtattaagttttctgctgaagaagattaagaagagaataagaatagaataagagtaaaaaaaaagagaaatacaatacaataaaaacataaaagaaaagaatagaaaaaagagtaagaaaaggaaaagagggatgtaagtaatgcagattcaggtgtaagcacaaactaagttccatctagagactactgaaatactgcactcactttgataacccagaaaacacaggacaagatctgaacgagacctggatctgggttgtgcttcctcgatcactaaccctagtaaccatacttattagctaaaacctctgcctctagcttttcatttggaacatacatttaatatacagccctacataagttcagccaatatgcagctcaacaatatattaactaggcaagttgtatttcagaatctgtgtgagaagcggcatgcacgcagcctcccagcattcgctggtgctggggcttgtgcgtgacaacatcagggagctcttccaaatgctggtcgctcggtacccatatggaggctttcttcctctagattgccaagctttcttaccagaggaagatttaggctgtgtccacttagggccaaaataatgaatcagttcagttgttatgtgtgcaccatttatactggggtttgacagaattttaaactttttactcgattgccttgatatcatggaattattgctatttatcagtctatatttacacaaaaggcctgacatggctacacacaggccctgtggtctgataccacgtaaggcacccacagcatccctcgccagctgagatcgaatttattcacacacatgcgtctcccctccaaatggaacttattctgactttagatctcctattaggactaatgccattaactaattgtccaataatttcagcaaaattcaaagtataaaacggaagtattacctggccccactacaggagttgtgggaacctcactggcaatcagatttttcctgtctgtcttctcttgctcttcacttcccaggaaagcaggcagatccactaacttcataattctagagcaaagtggggccttacacacaagcctacgcttgcccttggagtttattttgacttctgcataggtggctgccactgcagttgtcagaatctgaaattcaggagatgccccttgacaggcagggacaccatctgatggcagtgtgacaaggagcattgttaatacaggaagggctttctaattgagagtggatacccatgcagaaattttcggatgttcccaaggccactacaaagaaacatgaaataaaaagatatatcccatgaaactacaattttggaaaagtaaaaataattacagcaagtttgtatctgggatttgttcattttaaataaaatttaaaaacaaaaacaaagcaaaagagaacaaggaggggagagggacagtaaatgggtaaaaagaaggaaaagatggaggagaaagaccaagagctgtcaaggcccacagtcgccttaaaacagaatgtgcccatccccccacccccttctatgccccccacccccttctatgccagcgcccagtacctcactccctatctgcgctgcctcccagccaggggccttgacaagcccacactctccaggaagggtatgagcacagcctctactgcaggagaggatggagacaagctctgttcttcttgcttttatgtgagtctgatactcatatcactcatctcctttctgagcattgcaggctttaaggaccctctggctggctccttaacccagcttctgaaatcccccggagctgcctgacttcccactctggaccctaagtaaacatttacagaagcagtggatgccgcttatttcttactccacaactatctatccattcttttgccaaccaaattattatgtgccaatcacattgaggtaaagcaaaaatgaacgcactttaaaaacattaaaatgtgctcagattgcaaatgtatacagctattatacccagcaggaaaaaagccaattaatttacgtatttaagaaaattttcttacttgaggacaaaaattaaaaaggggaaggaaactcatgttgaatttcacttagaaaagtcaaagtgaaaataatcagaatgtcttcagctacccaaggatttactgttaactagaaaaaagcatcgtttccatgccacctcagctttccaaatctatcattctaatccatttttaaaaaagaataaaatctgaaaaataaagtacatctccaggcctctcatattgcaaatgacgtgtccaatcatacttctacaaggaaaaaattaatggcaaagggggccaagagttaactgctggaatggttaactagaaaaggcccagtcgaaattaatccccatgatttcatgtgaatttcaagccatagcttaatcctacatgtcagtacaacaggaactgcttagctctgctaatcagattctagaatttttcttttctttttttttttttttgtaagcatcttagtttcgcaaaggcagctggctgtgatggtattggtcactctgctgaagaatatacatgggacctaaaatagctctgggtccttttcaactgtggcagtttcatcaatggcatccgttacaagatcctggtagtaatattgatatatcaaagtaccaattaaaccatctgcacaagggtatccatccacctgtgtctgataccatgtaaggcattctttcacatctggcacaaagaaggaaaaaaggcacaattctacaagattggattttgaaagaacttctgtttgaagagtgaaaagaatagatgtgacatgaatggacagatgaattaggaggcatacagtgtaataacacaaagaaattattgtgggttcatatctaaactccatcagaaaatatattcatatattctgtaacatgaacacatttaatctatagtggttgttctcagagtaacagaaaaaaaatattcttattattaagttcactttcagaaaaatataattaaaaaccacataggacaaggagagacaaagaataaatttccttgaatcatctaaaaataaatgtatcaatatagcaacataccactgtgggctcttcatccttcctgcttcattaattacagtccagtgacacctccatgcccagtcctagctaaaaatcatactctcaacactaaatattaagtctcagattctgacaagtatgttcatgtcagtagttacaacaagcaaaatatgtgaaatcaggattatagctgtgggtgctagaagtggattctctgtcctattattctccattttcacacaactacacatccatccatcttccatctttccgattctgttctgtgccctcagaggttgacacccacaggccaaatcacttgggctcccttgtcctgcaacctccagttgggttttgacaaggggaggtaccaggaggtcaatgggtacagacggaggggagagagagagagagagagagagaaattgactggggcttccctccatccttcctggccctgcttgcttgaaatctctggttccggtggggactgcaaccctctaggatttaccatccaccagatgtcccttctgctagggctccaattctcattagctctgggaacagcatttattcctcttgtccctaaagacctaacaatagtaacagcttcgcaccatgaatagttcaggtgtcttgacatccttctttgttttttttaaaactgttttcttcagcctcctatctgagggtactgttttcttctggaatctgaactgacacaccctggaattacagggttatgtttccctgaagggaagggtgacaataggaagtactaatgaagatatttccccctcaggatgacatatgctctctaatttagtgactctcccacccccccaccaccccccaccccccaaccccatgaggtcagcatggaggcaccagaggacatatttacaattcttggccttcaccttgatgaaagcagcaatcttggggagagggagaatggtaaggaaaaactgccgaggtgcaagctgtttcttgaccctgtgcccatcctgagctgtataagattctcagagcacaggaaaagaaagccagagccagggctgagccaggtggaggaggggagggctggaagcctggacctctgggaggtgctgccccgccatgtgccctgagggccttgatgtgggagcagaagagatggcctggtgtgtccaagacagtgagggcctggttccagcccccgctcttccaggagctaaaaagagcctccacatcctactgcactgaaaagaggagttggccttgctgaagggaggatggcccacaggggctcacagggtcagggcaaagggttgctcttggggaaagctgcaaggaggtgtgaactggaggcagagctgctggaacacatctcagatgccaaccttaacagcgaagacgcatcaggcatctcagccccttcgggcagacagagacactgtgctggatggtgggacgctgcccatgacacggctcactgtgagctcccgacttagattcaatgccagaaacaggggcagagaggccaatggctgaatagaggagacttccaatctgaaacgcttgagtgtctctcccggtgggtaagattctggtttttacccttaggtggaaggtggaatgggcacactagaacactattcttttctccctctttgtgagcagcttcttcgataaaaacagtctatttttttcccaggtgcacccaagtgttcagtggcttcagtgaataaagtcactggaagatatggggctcatttctatttaattagatataacttttcattatcattattgtgaacttggctttaaattatgcaaatatatataaactatacattatcacttccctttatttaatcctttatatatatatgtatttattcctttaaataaatatatacatatatttattcctttatatatatgtgtgtctataggtctgtgttttcatggccatacagtgggctgcaggccactttgcaggaattcttcctacctaccacacttactgcttagcacacaggtgttcaaaagacatctgtaacaaataactaattacacataattgtaaagtaaagtaaagctagaccaaaatgacataaaatctgaatcaatgtttccatgcagaaaatcctagctttcactacagctttattcatttcatacttatataaaatactcatggtatttttccacatacttagtgctgagttacactcatgtttgctttccattctctgctgtctttttttaataatacagaaattttcatacaaaaatgtactgaacacgtgtagtagcattatagaatcagagcagtagctgcaaatgatttatgaaactatctactctggataatacaacagtgctatacatacacaattacttcataaaatatggaatacaaacatgaataggaatgcctatgacattcaatgtgttttgtcggcctttaaaaacttatttctgaacacagtggcttttcttcttctttaaaaaaaaaaacacattctatcagaatccatctaaactatttcagagatgtgaaaagctgtcatatttgcaaagaccaacagagaaaaaggtattacagttatccattccacctcttgatgccagttaaatatctttgggagctcatttaggtttctaaaagagaagatcatgcaaaatgcttattttaggtctccttaatggagactgaagaatgttatgcagctctctgcgttttttttttctttttatgtctaaattatttgacttctttaaacctttcacctggatacttttcaagttttccacatgcatctttaatagaggaggcctggaaccaaccaaacatagattagaacacctcacttctctaaagttaacctttatcgggcaagctcagtcactcaagaaagagtcaagagccaggatgtagacaaaagaccactgagctgccacatcttcacaggaccaactaacaggcaacagaattgcaccaaagcttgaggtctgtaacctgtactcagatccatcgtaacccacttattctttttgtagacaacctaccaacaaccattaacaaccttgtcttcaacctatacattaacaaaataaaatgcatgtcaggacacagatgacagtacctaaacaccaatagcaaactggagctgatggtggagctacatccacagacatgcactaaagaagaatagatttttttttaatggatgcaatcagaactccacagttttataacttctgaaaaaaagagataatatatttatctagtacttcttatacatgatttttatagaagaaatcgtttaattgtatacacatatatcaacataaaaaaaaggccacagaaatgcaaaaacttttttaaaccttccaatgaccaggaagatatgcactatgatttctcctttgtgcatcaagcgctttgggagctaaagaggcttgccaaagtaaagtagcgcgtccatggaagagagaagaccagattccaggccatttaacccccaaggctactgatctttgtagtatagtcaaagacgcagactcagcattcttaaacttctgattgcctttcactcacttgcctgctcttgcctcctaaatatatgtctgttcttaggaactgtatttggtctttgtagtagtcagtgagggatgccataaccaaacactactgacagggcggcctagacaacagacactgattttctcgtggctctgcagattgcaagtccaaaatcaaagtatctggacgtttggtttctcctgaggcctcctgcgttggtcttcagatatccattgtcttgctgtgtcctcacatagccttttctctgtgtttgtgctctcatggtatttctgccttttcttaaaagcatgccagacctattacattagggcccaatacttacagcctagtttaacatgaattgccttggtaaagaccctatctctaaatacagcctcactggggaggttaaacttcagcaaataaattggccggggcggggggggggtgcagaattcactttccctgaaaggcatatttattctcaatgcttcgattatatctccaatatgatgtacaccaaacctgtctcttcaggtctcaggtcttatttgtgctacagtcacaaatgtatttccaactacctacgcaatattctcattctgatatcctgttagactaaacttgtatcaaaccaaactcattggcatcctggtcaaagacattttcttttctcgtgtccttgcattaatcaatggtttgatttggtttgaactacttttcactattcctgtcttcctcatttctccagccgataagcaagtcttactgataactctgttcaaaatgtgtttgcatttagtcattttatcctccccctctaccacttgagtaaaggccttcataacctcacacctgaaagagcacgataatcatctaccaccttggacccaaggtagatgctcaaccttatttaatgccctcctattgtgtatgagaggaatccattaataggatggtatgtcactcttattgttaggttatgttataagacataggtagctttaagaaaggattaacctaagttagacttaacctaatcaagttaccccttaaaagagacgtagctcatcctggtgaaggagacttcaatcatgagagaaattcaacaagaaacagattgttcattgttagctttgaaaatgaagggagcactcactgtggcacggaatgcaggcaggtgacagtccccggggaagagccagtgaggaatggagtcctcaatcctacaaccataggaattgaattctgccacagctacctgagcttggagaatgaccccaagctcctaatgagatttcagtccttattgacaccttgatttcaatcttgtggcactccaaacacagaacacatctatctatgttatgccaaaacttctgagctacagaaatggtgagatcaccaacaggggtctctttaagactctagatatgtggtaagttgttacacagccatagaaagctaacattacttggttaccctctaattcacctcccactgccacatttatatttcttgttcaattagttcattattttggtgcccttttaccaacctcattgaacattatcataatgctaagggcctatgggtgagtattatatgccttaaacatacacacacacacacacacacacacacacacacacacagacacacacacttcccagagaaagcagttacgtgacttttggaaacataaccaaactgtcaaaagaacataaaactagttactcatatttggaaaggtaattcagtactatttgttctgctatggtgtaaaaaaaatccacaatattttaatggcaatagttattaaatagtgaaaatctagcagcatttacatcaactaatgttaagttccataagtactatgcccaaatattattttatcccttatcatgttaattcctgccattgaaacttacacccagttttcaaagaactttgatttttgcctcacctaagacagcaagtctattcccccaatttggcaatacaaaaacttttgtttcaggcaagccaatgttctcagtgctccactgtgcatctctgttcaatgcgattcctttcagaaccacttatgaagaagaattcctctccatcaatccaaacctttgagatgcatctatgcatctatgaacttcttgttcataaattcattaattaacaaacatgtactgaagtacctactgggtatactagaaatgatgagatgctttttcattggaaattggttaaaactaataaagattaggaagctgtaaaaaaaaattagacaaagatctctatgcaagaatatcaaattatactggtcaaaattcatctctactttacaaaagatgtctgtaaaccacaggaaggagacattgtttttaaaagtatacatgtatagttggctatcttttgcttaacagagaaggaaaataagaaaacatttgcttatctttaagaaaacaagctcaggaagagtaagctggaaacatggcgttgatggaacacaagtggtggatggaggtagtggagggccaggaggaggcaatgggaggataggaatgaggagggaggcagccttctctgcagggaattttttgtatagattttgctcctggaaatatgttaaaggtccaaatacattcagtcaacaaaggcaggacaatcctataactgaaaacatactgaaacaaataaacctaattatatctcaaatggatatcattacctctgtgaagggagaaaaaaaaagaaatagaagtaatccaagtgattataattcatttggaataggccttttcctcacctctgaattgcaggggttgttggtatttaagtgattgaaggtcgtctcttatgttgccgcaatcccctattattttggcaggactcatgactcgtctaaatagtcagttttcatcttttatttatgctgtttttttctcctatgtacacactatagaaatggaaacttcactgtagtaaacttttccctctttgttaatgaccactgctggcctaaaaatgttacctttattttaacactgctgcctatggctattagaaaaagttgtttcacacataaacatacttcttggaaccaaaaactttccatataactaaaatgtaatgcttgactcatccagttctatctatctatctatctatctatctatctatctatctatctatctatctatctatttatccatctgtccatttatctatctatccatctacctgtctatctatctatacttcccccacacttatatatgatcctcttttaacgacttggggaacttttcaacattttgttactccactggcttttcacacaaatggggaaaagacagacttaagggtaccagataaacaaaaattactaaatagctaagagcaactgtctcaagggtcctggggacctggaggccctgctgccaatgctgggacccagcacctccactccagctgctgctgccagatgtgagtgccagggtagtcagatgtgttgtttaactcaagtgaaaatggaaatccaggtttttagatgtaatcaaacagtttccaaatattggcattcaattcaagatatttatttctaaactatctgagggccactcccaacccatctataggtcacattcagctgctgaggacattgtgagacctcagatatggaacaacaaagccaactagagatacctaagcaccaagttatgtattacaaacaagatttgcacacaagggagaaataaaactgggagcagaagtggaaagtgctgcagaaggaagacttgaactgaatttagaaggaaaacactacatcttagagtatagaaaataaaagggaaaaaaaagtttgccaatatgtcatggctaattatgccctcagtgtctttgtaaacggaagtgccaggccactattcactgaaacttagcttggttttaccaaacctcgaaaagttaatattatgatacatccagaaagatgaagataaacatgacatgtttataatgtgatttccccattctacctctaattttttaaaaaaattatcattgctttttttttaaagttgtgagtatgtttcatataatgtttctgatcttttctcaatgtccagttgtttttacttcttgctgggtcagagtataattcttgaacgagcttcgctcttatttccaaatgcttttagaccatgggtccaaaaagccatattagctagaattttgcataaactgaagataagaaaactatgagtgcatgacattcttataagaaaaatgttttggtttttagtttcctaattaagttttgttaaatcaatgttgtcagctctgacttctagtgtctctgtgtcactagcatttgattgctgaataagtattattttggtgtattttaaagtattattatctgtcacaatatatatgattttggaactatttgtaagtatactgaaaattctatatctaaaaccatatatacatttatcatatagatacacctatctatagtatctatatctgttttagatacatattttacatatatacatgttaatgtcatgttaatgacatgttgatatcatctcttttcttttacatgttttaatctttttcttgctcaattcccttgactatttcacaatggaaataaaaaagaagttcttaggaccaaatcttctataaccttattacacaattgggttatttctattattttttaaatatatggaaaataatcttcataagttccctttctcccaaatagtatattgtaaatattcttatacaattaaagatgggtcagaaaaagaattctacaagaagtaaccctaaatgaaccctagtctacataacaaaagatgtacaatggtcagagatggcctgactgagggtgtcgggtaatttggtaatgctggttcacaagaaatgatggttctaaggggctgcagggctggagagagtaccagacacccctctctgtggaggccactttctagtaaatgatcagctggtgttaacccctatggggcaatttccaatatgagtaattacttcttgtgcatctaaatcttccctgaatgtgcagctgggaatactttcattacatgttattctttccacaccataaattaatccctacacgtgctgtagatcccctgtgaatctcaaaaaggagttgcgaagattaatcatttaatttgtgtgaattgtgtgaaaattgttttcccctggctctttgagaagctcagtatatgctcagctgcacacaacggaagtatttgaacaaattaatttactgagcaactactatgtgtccggtactacgccaggcagtgggagaatgaagaaaattattagacaatctctgacttcaagggatttattagctagtaacaaaactgaaatgacatggttaggccacaacctcaaatgcctatggccaacgaggcagagctaagagcaactgtttcaaaggcccaggcacgctgccaatgctgaggcccagcacatccactccagctgatgctaccgatggacacgatcaccagtgtgtccaggtgtgttgtttaactcaagtgaaaatggaaatcctgctttttatgtgtaattaaccagttctccaatgttggcattaaattcaagatttgtatttttaaaactatctatctgtgggccaatccccacccacctataggtcacattcagctcctgaggacattgtgagaccatggatctgaaacagcaacaacaaaaccagctagcgggatggtgtggtggcttgtgcctgtaatcccctcaatttgggaagccaaggcaagtggatcacttgaggtcaagagttcgagaccagcctggccaacatggtgaaatcccatctccactaaaaatacaaaaattagccagtcatgctggtgggcgcctataatcccagctactcaggaagctgaggcaggagaatcgctttaacccaggaggtggaggttgcagtgaactgagaccatgccactgcgctccagcctgggcggcaaagagacaccgtctcaataaaaaaaaaaaaaaaaaacaccaactagatataactaagcagcaaattaagcaccaaattatgtattatgtacataataaattatgtattacaaacaagatgtgcatatatgggaaaaatgaaactggaagtggaaaatgccacagaaggaagacctgaactgaatttggaaggaaaatactatacctttgactatagaaaatgtaaggggaaaaaaacagtttgatgacatgtcatgattaatgatgctctattgcatgctaatacaatggagattatcctaaatgatggagacatgaccttcacagaaaaatctggaaggcactgcaaacattgaataattttcatataaactcagatgtgaacaacatccatgctcccaaacatttctccgctagtaataagaagatgattatgaaaatgaaaaccttgttcctttcagctattacgatataaaaagtggttattgttaatacattgtgagatcaagagtgttatacagacaagaatgatgaccctaacatttgctttcaagatgttttgaaatatttgtcaagctggtcattgtgtggagatgacatttaaggattaaaggctctttgcaaactcccctctcctggccatgcctggcctatgcaggatcctttctaataagaaaggatgcaaatgcatgggtggtgacaggcacgtggccttcttcaccgtcactgctaccaggaaccgagggatcactacacatgtctcagttgtttgtagcccctcagggtcaggaaacacctttcaaatccacgttttatttcctgatcgatgaaatgcagccactgtggcatattcatgcatctctgctaagaaagaaataatattcatgcatctctgctaagaaagaaaagtcaaaaatagaaggggaaaaaaaactttttgtgggaagagagaaactggaacaaaatgggttggaataaaagattgatgaagaggtattcaatgcttgcagggaaaaaactgggaaaacaattgatgtcaggaagctttagataagacactcaagaatttcattttaatatttattgcttgtagtgaaattgatcggtatctccggcatgatgaggtcatgaaagaagagattgatgcaggcaaattcattatttctgcttctgttctttctgttttgatattagtctattttctcccaataaactatcctattgcatacctcccaacttttgccatttgtggtaatgtaattttcctgtcatcttttatgaaatactagagtacccatctgttgtacgggtagggataaaatagcttccttcagaagaaaacactgactgtaaacagccaagccccatgaaagacaagtgaatcttctagtggtcctttatcagattatattttctggtgccagggcagcccatcttgcttgaccttttttacttatgtacatgagaaaaaccgtgggtcctaatcagtcatatgataatattctgggtttttttttcctagcatagttattcaactaagatattttaatgcaaatactctgatttcaatttattgaaatcaaggaaataaacataaaaaaatggaaacaaacaatgtaatttagtcaggtatcttgaaagatcaagcactacattatgtgtctcagagactggcttcagaagtcagccgctgtcctcagagacatgactgaccttaaaacgcaggtgacaatgataccccttttcctcagagattgtagcaaatcccaactcaaaatctcacaaaaacaaatcacaacaacagagtctcactctgtcacccagcctggagtgcagtggcatgatctcagctggctcactgcaacctacgactcccaggttcaagcgattctcctgcctcagcctcccgagtagctgggatcacaggtgcctgccaccatggccaactaatttttgtatttttagtagagatggggttttaccatgttggtcaggctgttctcgaactcctgacctcaagtgatctgcatgcctcagcctcccaaactgctgggattacaggcgtgagccagaaaatcacaactctatccagaagatgctcctgaatctgacatccagggggataggatcagctgccttcttggatgtggtgaagggatctttatctcagctgtcttgccgaataagcacatggagctgatttcgattgtgcactgcagatcagcaaaaatctttctacttacactgtgcgtaagctgtatggaaaaagttgtactgttgaaattatttttaatattatcacattgtaattgttagattagattttttttaacttttaagctcaaaggtacatgtgcaggatgtgcatgttagttacataagtaaacttgtgtcatggagttttgctgtacagattacttcatcacccaggtattaagccaagtatctattagttatttttcttgataatctccttcctctcatcctctgccttccagaaggccccagtgtgtgttgttccctatatgtattcatgtgttctcatgacttagctcccacttatatgtaagaacatgctgtgtttggttttcccttcctgaattagtttgctaaggataatggcttccagctccatccatgtccctgcaaaggacatgatctcattcttttttatggctgcatagtattcaatggtgtatatgtaccacattttctttatctagtctgtatgagaatatagacgggaagacaaagagagagtaatgaaagataagagctaaagtcccaccaaaccatcttaatttttgccaccaacttaggatacttccctcatgtcacatgtcaaccaaaactgcagctgtctgatccaccgtctcatgtccaggccaggtggcctctcaacatctgtaataccataatagcttcttccttggatgccctgcctctaccaggccagttccccaccatagccagagggccgaagtcctagcaggtgccatggtgacggaagcagaggatgccagaagcagaggatgccagatgcagggtcaggagctgaggaaagcaggcggcctgcagcaagaaaatgggtccctggagcctgcaggagcaacagccctgccgacaccttgttttctgcctggggcattctgacctccagaagtctaaaggaagaaatttctgttgtttaagttcccacgttcatggtaattgtggggtggggggagcggggagggatagcattaggagatatacctaatgtaaatgatgagttaatgggtgcagcacaccaacatggcacatgtatacatatgtaacaaacctgcacattgtgcatatgtaccctagaacttaaattataataaaaatatatatatataaaaaaaagcagcaatgggagactttacagtactggatacatgaaggttttatgtacaatttttaaaaactagtgaattcaaaacaactgacatacctttagggtcaatgaaatttgaaacaaccacagcaaatactttgttagtgtccatattattacataattattaataacattaagtataccatcttttcagtatttaagtgaaaatttacaatcattcagtaaggaaagttttctgatgaccatagcgttctttttacttggtaactgaaatagtgaaaacagaaaatcataaaggctatctttttccaacaaagccctgactggaaagaaataacaaggtcatagtctctgctaacaagggcaactaactttcctgtaacagttgaagttttgttatagtggtttgaaagattgctgatttataactttgagatttaaaacacttgctataagaatagatttgttaaaatatttgttgtagcaaagaaaaatagctgtgaaagatgcttcctgggagatggtttgtacctggcaactcataatcattagctcacaatgacttcactgatctgggtctaatcaaagcatgaggaatctgaaaatcagaaacatagctaagttattctcccctgtaaaatctattatacaggtgaaaataaaagttactctaacgacacataatctcaacttgtttaagtaataataatttttttcctttttttttttttttttttgagacagagtctcgctctgtcgcccaggcaggagtgcagtggcacaatcttggctcactgcaacctccacctcctgggttcaagcgattctcctgcctcagcctcccaaatagctgggactacaggtgcgtaccaccatgcccagctaattttttgtatttttagtagagacagggtttcaccgtgttggccaggctataaataattattatgtcatattcttaagactgctcagtgcttagggtgagaaagccttcccaagggagggtctgttctctcctgcctggtcatagggcatagtacatctctctccatttattttctattctttgagacaattattcctcatgttccaatattctttttcttttcactgtctttctgtcttgaataaatctccaacatcccccacaactatcccttttaagtttcagatacccagacaacaaagcacataaccaagacgcttgatcacacacacgtgcatgcatacacgtacacacttatacaccatgcatatatgtgtgtgtttgcacacaaaaatcttgcttcgcaaacagaaggcggcatgtaaataactgcttggaactcattggcagataaagaaacagaggagatgtcaattatttaagataacaaatgggtcttttctcttagtattgctcccctgccagagcaggttcaatcttaagaattttacctttatcccacccctctgccactgtttcattttatggccttaggactgtcatttggcttttccttgaccagttctttccataagacttgctggcctttgtttcctttctgatttttactgttctcttgtccttgctgccctcactgtaactggcttctgttcatttctccaacctgtcaagagcatttagaatcccattcctacccagctaggttctgttgccccatctgactttacgacatcctcatgcaaggtgaccatgtactctactccatcaccccagtcactgacgaagagccctgggcacagggctgacccaggcgatacaacacctgtgtctgccaagttaatggcattccattattaattactcgttaggagaaatgtgtgggatgacaggggataacacacacctctaacattcccagacatcgaagcaagcatctcatgggcttctgtggaagttcatttacataagtggttcttgatcctgatcttgtagaggtcataaagcctttgtggatcggataaaagctatggattatcttttcgaaaagctgtgcacacacacatgccacagcattttgcataaaatttcagaagattcaaggatttcccttgaagtacatctctagaactcctggagtttagaacattcaggttaagagtatctagtgaaggtaattttaaatattgtagcatctacattatctttaaaagaaatgtacactagatgccagaagaaaatataatttgaaggattttctttaatctagatgatatcacatatataccttaaaaataatcttgattgacctatgctctcaggccaaagaaagaattattcatgcaatcaaatgaaaatgatttttttctgctgtaaaaagtaaaattattttttaaattgtggtaaagtacacatttcatacaatttgccatcttacccatctctaagtgtacagttcagtagtgctaaggaccacagttgtgcagccaatctccagagccatttcatcttaaaaaactgaaactctatactcattaaagcattacacaataactctcaatctcccccttaacccagtccctagcaaccaacattttaccttctagtctctatgaatttggctactctaggtagttcacagagtatttttctttttgtaactggcttatttcacttagcatcatgtctcaaggtctttgttgctgcatgtgtcaggatttcatgcgttttcaagggccgaataatattctattgcatgttgcatgtatatactgtatcaatttttttttatttttttgaaatgtagttttgctcttgttccccaggctggaatccaatggtgcgatcttggctcactgcaacctccacctcccgggttcaagcaattctcctgtctcagcctcccaagtagctgggattacaggcgcgtaccatcatgcccggctaatttttgtatttttagtagagatgggtttcatcatgttggctagactggtctcaaatccctgacctcaggtaatccacccacaccagcctcccaaaatgctgggattacaggcgtgagccaccatgcccagccgctgcatcagatttttgtttatccattcacacatcaatgattacctggattgtttccaccttttggccattataaataatgctgctgtgaacgtgggtatgtaaaatcaaatttttagcaaagaaatcttactgctgtgtaaatactattgtttgttttaaatttttgaaacttttaaaaatcatttcattgttaggcacaactgacaaaaagagaagtacacaaaacaactcaatgagtcatcaggtagcaaacagtcatatcgccaccacccaagtcaagacacaaagaaggtttccatgtagcgcttgctctctgaggtgtgtctactacacaacacagagttcccatgcagaattaatctggtctccccaagaatgctgccagacagagattagtaatcccatgttctgggttgagtaaagggaagcttagagaatgtcttacaaggtcacatagctagtaagtgatagaaataggattctaaacatcagcctttttcaccccacctccacatgggttggactacatagaggccagctggtgcagtaaaacacatcaattatattaaaattatccagaggtataaatgtgactcatacttggttaatgaccacattgtttatccttttgatattcttcattgtgacttctgaccactgttctaattttgccctttagagtaatttaaacagatgccttaacatttccacatgcaagatcctaagtagctaaagaccgtgggcacatccccaggaagactcattcccaggaattctccctaggttctctcagggaacggcatctccaggcaacttactcccctgactgtcctcttgtggtcacattagtgtgttaacacccctagtaagtaaaggtatgtccagaactgacactgaattttagatgttcactatcaacccaacgaacagttcattcactcattcaacaaatatttctttagagctttgcactattccagactatacctcctctgacaatgctttgattaatgcagggaaagtcacaggcacatttttctactcttgccacactgttgtcttatactgaacatgggatcaagtaaaatctgtatgcgtttcacaggaactactgccaaggaaggtccccagcatcctatatttatataattggtttttcgaaatgatctttgtgctgtcttcacagtagatcaccagggtttcatgtggtaatatttcaaaattagtattttggtggttgatcaacagaatccaataatattttttaaatgttttttcagactttaaaagttaaatttttatatctgtttagaaagaatcctttccttccttatatgcctctccttccttaaaaacaaacaaatgaagtgtgtataattgttctctgttgttatggtttgcatcttatagccatgaactctaacgaccgacttcctatgtgctaaaagtggtaattgatctaactgcattacaatttttcaatataagcaactagttattgaagtggcttaatttggcaaggaaacacctaatgagtcaatggctttattcggttaattcagtgaaaagtgctaatgattcagaaagtttaaggagttattgtaaggccgcctgtaggaaagtactaataaccaagctatgaccaactgcctcaaaagcagggttgccagggtaggcaacttaggatacaaagcactcagtgaaatttgcatttcaaatttgttgttcatctgcaattcaaatttaactggttgtcttgtgttttatctagcaactctattttgcagccttcaacatagcaatgattaattaacaggagatgttaataccagatttacttctccatgggcattcactacccacaaaaaaggtagccaacgtattttgatgtttgacttctgcaaaattagaagacataagtcttttttggaaatggcttaaaaatagaaggggcaggataaaactgcagatgccaactgtcattttccactccatccattcatttcataaaattatacagccagaaaaagatcatttagtccaaatctatttacttagaaatgtcacaagaccaagaaagtatcttacttttcaataattcctcagaatctgacttcgcatctactcaacctatttcattttggatgctgtaaggtcttcagagctagaaaggatgctgcagtaaatctggccatcaggcagctaacaaagagggcacaccagacagcagacaatgggctaatgctggagatggccctggaagggcatgggtcaggttctatgatgtcctggtgatagaagtattccaaggctggacagttctgcaaaagggataggagctggggaaatcaagaggagcagtggccaggaaaaatgtgcgtgacttaggcatacaagatgtataggaccatgaaaaatgggaaagcaaaactccataagaatttttggtaggctgctagttttttaagttacattccacagccggatgtgatagagtcccagtcatgatacctcatgtcactggccaacagggttgattgagccacaaccaggcttatgaagttggctttgcccctactcactgcttcagctgaatatctccctaaactgaacattctggtaaaaatgacatcttcctagaaataagaccaatttaagcataggtgagattcacagtctataatagagaaaaccataatttatgactttttataagctaagtttatcattgctaacactgttctttctttcatgcacacattccaccgacaaacagccaaaaattttaaataaaccaaaaggattcaatacatattcacagttctagacttattggctctagaaattggggccttttccttttgttttatgctaattaggcttgaagtcataatttcccttaaacacatgagcactattaagcgccaattctggggtatttaaagagttacaaagagagtgcaaaaggggaaaaaaaacatgaatacgacctcattcctttctttaaaaggatctcagtatagttaatgaaataagacatatttatatgaaaagttggcatatattgcctgtgcttttatgtaaaagctgcattagtataaaaaacagtaaagattatagaaattcaaagaatccatatcacttttgataggggtgctcaaaatttcattgcagtaaaaaaaagagggaattgaacctggacttaaacagttaagattcaagtaaaactgattatttgagcatctactcaacggggagagtaggcttattcacatatattctctaaatttatgtcatttcattcaaacattaaagcatatcatttaccaataaagcctcaaccatttacttcttccatatttcatatataggtaatgatatggtttggctgtgtccccatccaaatctcaccttgaattgtaataatcctctcacatcaagggcagggccagctggacataattgaatcatgggggcactttccccgatactgttcccatggtagtgaataagtctcaagagatacgactgttttataaatgtgagttcccctgcacaagctctcctgcctgtctccatgtaagacctggccttgctcctccttgccttctgccataattgtgaggcctctccaggcatgtggaggtgtgagtcaattaaacctctttgctttataaattacccagtcttgggtaagtctttattagcagcatgaaaacacactaatacaggtaatgaggtatgctagtagaaattaagtttgtactgtgtttgttttccctatgtcttgggaacagatgtatcagaaactcacacactcactcgattggggagaaacgtggggattctctctacaaagagcacaatcactgaaagtagtctgcctgaaggatagtgtcctatttcaactttgacatgtgatggctcctgagggtagagcattgaaaagaaggcaaaggatggtcgagatacatcccattcacctatttccctgtctcaagtaaatgtatatcctgggaaggacagacagacatgtaatagggagaagtgaggtggctggctacattcagttcagtaattgaatatagatacaggtattggttctgaagtttttttaacatggtaaaatatatatataatctacctttttagtcatttgtagttgcacagttcagctacattaagcatattcacattgttgtccaaccaacaccaccatccaactccagaaatttttaattttcccaaactaaaactccatacccattaaacactcacttcctgattcctacccctctccaggccctggtaactgctattctattttctgtctctaggaatttgactacttgagtatctcataaaagtggaatcatacgatatttctgtgtgactgcttatttcacttcgaatattttccgagttcttccatgtcatagcatgtatcaaaattttattcctttttaacggtgaataataatatcagaatatgaaaaatgcctacagcagcaaaaagtaagccaaatagatgtgaagccaacaaagggcctccatgttatatacatacataccacattttatttatccacttattcattgatggacatttagctactatgaattatactgctatgaacagtgatgtacagatatctgttcaagtccctgccttcaggttttgggggtatatacctagaaatgaaattgctgggtgatcatctatatttcagttgtgtggaaccaccatactgatttccacagcggttgcaccagcaaagtacaagaatttctatttctctacatccctgttgaactttttacttccttttttgttgttttgataatagttatcctaatggatgtggtacttcactgtggttttgaccagcatttccctaataattagtgatgttgagtgtcttttactgagcttattggcgtgattatgaagatttgaaagttacattttataaacatagcatcaatccaggcaggccaaagatataacatttgtgaaagcaaaaacgaattgaaaaaacacaaacaggtgacttttcaatgccattgatcagcatgctacatttagtacttaaatactgaaaaagaaacttaaaaatccaaatatagaataaacggttaagtgtattacgaagcacttgtcacaaaagaacactaagttataaaagtaggaagactggtaggtaatacaccaaaatgtttaaggtggttatttttaagtgtgtttcataagtaagctttgttttattctttacacagtcttcatccttggcactcaagaaatatttcctgattaagtcacaaattgatttttttataatagtgtgtaattacgaaataagaaacaaacatatttgttttaaaaggaaaaataaagtaaactagtaaattggttctgctgtacattagaattgtctagggagcttttaaaataatataaatgtgtggtacttctcttcatcaaagatcagaatctttgggggtggaggagcccaagcatctgtaatattaatacacaaagaaagttgagaactactgttgtggaaaataagaatgaattaggccctttggaagtgttctcttcatcgtccgttgctgcagttgattaaagatgaaccactcaaccagcctaaattgttgacccacaaaaccatgtgcaaactataatagctgttttaatgctctaagttctgatgtggttacttacacaacaacaaattattaactcacttaaaattttccccaataagggcttattgtgtgttaggcacaatacaagtgcgtaacattcattatctcattaaattgtcctaacaaaccaataaggaaaatacattatttcaaatgaaaataggcttgggatgcttacacagtttgctctttagcatccaattccaatcactaatatactaacatttgcctaatataaattagaggaaattaagagagacaaattgcaagatattgcattgtaaatacataatacatacacaaatacacaaaaattcattgtaaataattcatcagcatgcttatttttcaactaatgtaaacactcaacattaggtagtcagttaggtatgcctttggcataactgaataatatatataatatacattgtactcattaggtaacttctcatcattcatcctacttccacccacttaccctgccaagtccattgtctatgactgcacactccatgtccatgtgtacacattctttagctcttacttataagtgaaaaaatgagctatttgtctttctctatctgacttgtttcacttaagataatggcctcccgttccattcatgttgctgcaaagtacatgattccatgttttctatggttaaatataattttattgtgtatatctgccagtttctttatccaatcattcattgatggacacttaggttgattccatatctttgctattatgaacagtgctgcaataaacacaaagtgcaggtatcttcttgatgtaatgatttttcctttgggtagatacccagtagtggaattttaaaactgtaatagaaatacaaaaagccaaaaaaaaaaaaaaaaaaaaaaccaagcattttaagatcaaacaagcaaaaaaaaccaaaaaaaaaaaaaaccccacaaaatttcaagatacttcaccaaaaaaaaaaatatatgaaaagcaaataggtaaatgaaaacatgtgcaacatcattaaccattaagaatgtgcaaattaaaaccattaagacaccactacacacctattagaattgttaaaaataaaaagactatttcaagaattggccaggatattgtgctgctaattgggaatttaaaattatataaccactacaaaaacagttttgcattttcatgaaaggctaatcatatacctcatatggtctagccattccactcttaggtattacccaaaagaaatgaaagtttattatgaaatattgaaaaaatgaaaatgcatttctaaacaagccttgggtaaaagaagaaatgaaaatggaaattaataaaattcaaaagtgaatgaaaatgaagacataacataacaaaatttaggggatgcagctaaagcaatatgcaaagaaaattttttgggactaaacagaaaaaagtttccaattgtcttcacattccaccttcacaaacaaaaaatgaagagcaaatgaaaagcaaagcaagaagaaaaaagaaaacaataacgatcaaggtgaaaaatcactggttgagaaaacagaacaataggaaaaagaccatgaaaccacaactttgttctttttgttgatcaataaaaattatactgtcttgtcaggctgatcaggaaataaagagaaaggatacaaattaccaatgtcagaaacaagagaagtgacaacactacacattgtagagataccacaaggataagagaatattctgagcaattttctacctataaatttggcaacttagatgaaattttacaattcctgtaaaggctaaacacaaggacctactaaatttcaagccagagagaaaagaaaacttgaatagacttatgtctattgaagaaactgatactgcattaaaaaacctcaaacgaagaaaacttttaggcccagatgtcttcactaatgaagtctatcaaacatttaagaaagaaaaagaagcaattctacacaaatgcttgagaaaagtgaagacaaggcaatacttccaatttattttttttcagccattattactttgatacaaaaacaagacaaagatattgtgagaaaagaaaaccgaaaatgaatattccttaagaacacagaaatgttaacaaatagaattcaacaatatgtcaaataacgatacattgtgactgaatggggtttcacccaagaatgcaagtttgatttaacctttgaaaatcaaacataatttaccatggtaagagagtgaaaaagagaaatataatactctcataaggtttaaaataaaagcatctgacaaaaatctgaagtctgtcttatacagtcccacagcaaattaggaaaaatagagaactttctcaacctgataaagatcatctatgaaaatctacagttaacattacatttaatgatgaaagattgtctactttccctctgagattgaggccttaatgttaagtcttacaacttccactcaacattatactggagctgatagccagtgcaataagtcaagaaaaataaaatgcataagattagaaaaaaattagaaaattcctattctcaaatgacttgattgcctccatagaaatttctatagaatctaaaaaatgtcattaaaactaataagtaaacttaacaattatctcggttataaagtcaatatacaaaatatctaaaattggaattaagaaacaccatttacaatagatcaacatataaaatacgcaaaaataaatttacaaacagtttgtgtgaattgtacactgaaaagtataaaacattgctgagtgatattaaagaagaaagacctaaataaatggagcagtatttgctctggaattggaagacgtaacattattaaaatgtcattattccccaaagtaatctacagattgtcaatcaaaatcttagaagatggtgatagaaactgacaagctaattctaagattcatgtgacaatgcagagaacctgaaacaggcaaaaacattttgaaaatgtagtacaaaattaaaagactaacaccatctgacttcgggtctcattgtaaagctacagaaatcaagacaatgtggaattgacatcaagataaataaatatatcaatggaacaaaatgagggtaaattcaaaaatatgttgaccattgagcttttgaccaagtatcaaaggcaatttaattgataaaggacggtcttttaaacaaatggttctagaacaattgactatccattataaaaatatgaactatggtctatatcttgcatctcttgcaccatatataaaaatgaacttgattcacaatagcaaagacttggaaccaacccaaatgtccaacaatgatagactggattaagaaaatgtgacacatatataccatggaatactatgcagccataaaaaatgatgagttcatgtcctttgtagggacatggatgaaattggaaatcatcattctcagtaaactatcacaagaatgaaaaaccaaacaccgcatattctcactcataggtgggaattgaacaatgagatcacatggacacaggcaggggaatatcacactctggggactgttgtggggtggggggaggggggagggatagcactgggagatatacctaatgctagatgacgagttagtgggtgcagcacaccagcatggcacatgtatacatatacatatgtaactaacctgcacaatgtgcacatgtaccctaaaacttaaagtataataaaaaaaaaatgaacttgaaatggatctcaccaataaatgtaaaatctaaaactgaaaatttgaaaaaccacttatagaaaaaaacataagagaaaatctttataatctttgcttagacaagaatttcttagataataatacaaaaatctataaaaatctataaaagacttcatttattttgactgtcaaaataaaaaaaattaaagacttcaaatttaaagatttttttaaaaagccaaatattgagagaatatcttgcaaatcacatatttgatatatgatatattcttgtatctaggatatatataaaaattttcaaactcagtaagaaagcaaacaatcatattgaaaatactaagaaaaagatttaaacaaacacttcatcaaagaaaatacttgagtggcaaataagcatgaaaagatgtgcaacatttttagtcattagggaaacgcaaaataaaaccacaatgagatactactacaaacctatcagaatgtctaaaattaaaaaggctaatcataccaaatactggtgaaggttgggaataactgaaactcccatgcaccgcttctgggaacataaaatggtaatcagtttggaaaagattttggtgatttttacaattgagacataagctgatcatatgactaagctattctactcctagaaatgaaagcatatgtctattcaataattagtacacaatattcagagtaactttatttataacagtgcaatagccaaaaatgtgataaaaacaaatgtcaatcaacaggtaaatgggcaaatactgtggtaagtctacacacctgtatacaggtgtgcaactttctagtgtgtagatttaccacagtgtttacccacttacctgatcatttgtttttatcacattaaatataccagcaacatgaaaaaattttaaaataattatgtttaataaaacaggccagagtaaggagtgcattctatattattccatgtaagtacattatagacaatgcaaactaatctagagtggcaggaagcagattagcagcttcttgaggctgggaaagagtggggaaggtgccgcaaagcagcacagagaacttcttggggaatttctgtgtttactgtcgttactgtggtgatggtactgaggtatacaaagacactaaaattcacaaacatttatatgccagatacatgcagtttattgtatgttgattatgcctcaataaatccacatgaaaagaaacccaaattaacccaaaattatttgtaggggtaaagtaaatgcattagaatacaggtagacaaggagatactggaaatcttgaacagtatcagtaatgctttgctaagcactggcacagggggtccacaggtgcgcagggggtccacaggtgctcagttcataattctgcttcacaacttgcacacacactataaactctagtatatataaaatagtaaaaatattgatccttatatacaattaaaatggcctctatttcacaatgacaaatatgtgtgtatatgtgtacgtatctatgtgtaagtgtatatgtgtacatgtatatgtactggaatgtgtatcggcatgaaggggaagaataaaaataaaaataaaatgacaaaaatgtctcacatgaaccaatggcaatattgtgtcctaaactagtgagtatgactaattcaacttttgcatctgatgtaaaacaaaacaaaacaaaacaaaattactactgttgctttaatccactgggtgatttcccagtaatttaatttaaaaaaactggcattaagaactaagcagaacgaggatattttaatttggaaaaaaaaatccataaatacacaagtaataacattattttaaaattaaatgactgatttcagaaggaaatgttttcaacaactttattagtgctagagccctcatgccacagctcctggaagacttcaggctctcaatttaagctctttgaatgtaaagagagccagacaaacagcttttcttctgtaacactccatttggctggttaacacaagttatcgattctgggatttagggttgccaaatgctttcttaagagctctgtgctattgactatcctcgtttcctctgcacttcttttcttagtcttgggtaaaatttaaaactctttgtaccatttttcaactcatctcgacggaaacagcctcaatttactataaaaatgtcaatggctcactagtgacctaacctcaaaggattgggaacgctgcctcagacatctcttttctatgttcccagggtctacagaggctctaccacaacaagatggggaagcccagtctgtaatccagcaggacagtggaatgctactggtgagacctacaaactaagtctgcagcacagtcctgcagcttccccgaaagctcagcccaacaagcttcctgaatttcacattcattttacacaacatacatgttagtagatatttttaacgtacatatgtctatttaggggaaattattagcatcattattgccaacttacaagttattattttgcaagttttatgccctttagaagtgactttgtaacagtttaaaatattattttctttaggtaaagagtcatatttgaaaaagagtaagtcaaacaaattgtatacattttataaatttgttgaaaaccttattcttagagactgtaaagcaatggagatctttgcaaacatccgtggtcatgtctaatggtgacggcacacataatagccaatcagagctcagtaaaacataagccagcaaatcagaggccgctcatagaaggagtccaaattcctttactgcaggatgaataacttgtaaaatcctaacattcacattctaatcctctgaatgaatgctgagtagggaggagacgaagcttagaagcaaaaggaagcttgcatcctttgatgtcctctattgttgaagttacaacaaattaagacaaaaataatagttatgttagaagacaaattaaatacacgaatcataaagtagaaagaatttttgaagaaatgatattcagcgttcccagggattataagtcaggcaaaattaagtcatgcagcattttaatgtaaatattttgcatgatacatttacccacaggcttatcctaaagcagtatgtttgcacttttatcatttgccttaggatgaaaaaaaatcaatgaatttaagagttttaaacctctttaatatttgcacaatattagatgtgctataatctcatataaaactacctcctagagagcttttgagaattgcttttgcctggggtctctggtactaatacttcaagagattagaaacatcttacttaagaagagttttctttttgcccattaaaatcaaacaagctttgttaaacactgaggcagaagagattcataaatcaatgatactcccctgaactgcccaaggtttgcatcatagattaaaaaccaatctcagaattgaaaaagctacagtgccacatatctgtcacaacactaatttactgaacttaggaagaaaataacactagcatagatttaaatagttttctatgcaatatgcaatgaatcaatgtactgacttgcttggggtttatgaaaacaacaactgacaatgaatatcatcctaagtaaagagaggagttatggtttaaaatcatgtgactacacaattcctacatttttttaaagaataatttacatcaaaatttttctctaactctaccctattatcacagattcttttccttgcattcttttcaatactatttatctgctatgaataatatttccatgtttaaagcattctattattttatgacctaacaaactccaggatttaaacaatgctcatctaacaggaaataccgcccttccaatctaaccttcatatgctttcgttttcttccttttcttctctctgaacatggaaaatgagtgccatttctatgctgaatattgatcaggagagaaaaatatatgaggtgtgagttatattgtgactacggtgattttccatccactcagtattacttatcgtgtcaatcacttaatcctgcagcataagttcttttttgcttatgatggaaagttttgttgtgttttattttttatttttgttttttgaaaaaagacatgagcaatctgattttctttggacttcacaaaatccaagaaagaagatttactgaaaattcatttcttaaaaaatgtgaggtccttgacaatggtcttctctacagtttcaatgttaggttttgaaaatgtgaggtccttgacgacggttttctctacagtttcaatgttaggttttgaaaatgttaggtccttgacaatggttttctctacagtttcaatgttaggttttgaaaatgttaggtccttgacaatggtcttctctacagttttcaatgttaggttttgaaaatgttaggtccttgacaatggttttctctacagtttcaatgttaggttttggtcatctctgagcgtgcataacatgaatggaaagtttttttcggagatcagaccgttatgatttttggaagtgtttcctgtcaaggagaagctcatggtctccaaggtcttatctttctactgggtggatgggccaagggaacacgaagaagcataatggagctctgtctgagagaatcaccagagtcttccccagcgtttctcaatggtctacaaacaggtctgcgggcttggatcacagacggagatccaagatgggcatgggcatttacgtgggcagggcaagcgacgctggccacactgcaaggccctcaacgttcccacgtgaaaaaagaaattgttcctcaaacagcaccactaggtcgggtgcggtggctgacgcgtggaatcccagcattttgagaggccaaggcaggcgggtcacaaagtcaagagatcaagaccatcctggccaacatggtgataccccgtctctactaaaaatacaaaaagttaatgggcatggtggtgcacacctgtagtcctagctactcaggaggctgaggcaggagaatcacttgaacccaggagacaggagacagaggctgcagcgagccgagatcgcaccactgcactgcagcctggcaacagagtgagattccgtctcaaaaaaacgaacaaacaaaaaacagcaaaacaagcacacgtgagaagccctgcttgttctgtgaacacagtcatttctgcctttccttcacagtaattcaaaagcatttactgaacaacgaatgtgtattagaacttacaaagatgggtgaataagaaacagctccttccttcaaaggtctccctatctacgggagaaaagagaccggtaaataaagggccgtgcagacgtatcttataagtgctgagctagcagcaggacaaacgaataaaggaagaaatggcagctctgatattaaagccctcagctcctcctggaaagaggaaccaagccttggtgaagcttcagagaagaaggaacaattaaaacaggctccagggatgaggagaatggactggatggaggaggagcgagcggctgccaaggtaggtgtgcctccaagcacagaaggcagccaatggtcatgcccggttcctgggccagagagcaggggggtggtaccaggtggtgctagggcccctgctacatggctggagtttctcttcttctctagttcattccatgttctaaacacaacaaatcacattgcctccaggtgttaggaccaagaatattaaggtcctgaaccaaaatgccaatatttggtaaaatggcattccctcatttatatatataagtgcgtatctgtatgtgttcgggtacttctataaaatctgccagtttttaacttcctaaatataatggctaactcttttattgtagacaaaataactaaataattgcacagacataatccaacatcatgggtttgattttcttaagggtagaacagctccagccatataaatgcagtgtgtgagtgaaaatgaggacggaagagcgggtgcagcacgggggacccagcagtccttgagccaaggtctggaccctcaaaagcagtggacgtggaaggtggtagctccgatagccagtgggcatatacgcacagagagcctcactctccagctccaaagccttccatatcgatggctccttttagcactacagggtcctaaggagagatgtcaaaaatgtttaacaaccgttgcagcagtaccgggttggaagggactccgtaagcaagttcctacctcctgagcatcaggtctggccttggtgatggtttttctctgtcaaggagattttcagcatttgcagtacattaattttatgcatgaaatttatcttcatgtactgttcctttgtttatttttgagaggaatataaaggggaactaagaacaaacttttgctcgaagccctactctagaaagaattctagagtaacaggatctctaaatttcaaaggaagccaaaaaataaaaaaataaaaaaactcaataattttgtacattttatatatgttttggtagaataaaataaatcctgtaaaaccacagaaaggtaatttaagtacttggaaatctatgtcaatatagccaagataatggaggtaaactaacctggatcagagaaaacaaaagttggaaaacactgagggatcatcttgtcggcctatcagaaacggtatccaatctacaacatcacagcaagtcaacatccgatttcttcttaaggctttccaacagcaagaactttgccatcttacaaggcagtccatcctatcaatgaatagctctacgtcttagaaagttcccctcaggaaagaaatctggtcctctatacctttcatctatcaatccaagttctgtcctctggtgtcctaaagagcaagtcaggtcttttgaaaaagatgtctcttctcatatttccagtgcttatcatgtgcctctataattatgctcttttccatggtttataagcacattgctgatgtgatgtggggtctctgcattttttcttggtgctgtcttgggaagcggcatagtatggtggtatcttctgaaactgcagactccaggcccaaatgggctgtggaaaggggaccttctttatacatgtacataagttctgagcaataaaaaattttattctatctggtatttgtgcagtagctttttataaaagaaagcaaacagcttcacctttgtttctgttatatatcctcctgttggttcagcgcataattccaactataaaggctgaaactgaattctagatattgagtctgtcactcagggcatccgttgttcctgcaagctcagaaccaagtctgctatgcattccttctgtgttttgtacaagcagatggaaaatgtctgaaacaaaaagaaactaaacaggtagtgctttcacatgccactagagatttccttctacttcaactgtgccattgtatttaagtgaagttctggaagttacaaatccccctgttactctgctgtcctatgaaaggctatgaagaaggtgcatgtgtgaaagtgccagctgcttcactgacacactcaccttcacagcctaagcaagggtgttgatcccacttgacacatcaggaactcgtgttgtggaggcattcaacagcccacctaaagccactgagtgggtgggaggcaggtgagtgactgcaatacagaccccaggggtccttcacttacaaacacatcaagagaagacacagtgttgatgcccagatatatcgtttcaggttttccatcactctattacgattttagaaataattttaggcagggcacactggctcacacctgtaatcccagcactttgggaggccaaggcaggccgatcacttgaggtctggaattcaaggccagcctggccaacgtggtgaaaccccatctctattaaaaaaaaaaaaaaaatgccaggagaattctatcacaagaagcacaaggatgatctgtgccccgccataattcaatcgctcccaaccaggcccctcctccagcaatgggaattacaatttaacaggagatttgggtggagacacagagccaaaccatatcaaccatcaatcctaaacagtgggtttaactttcctttcaggtctcagaaaagtacacaggacaataaaatatgcccgcttcatcatttcatttatgtatccatcccttcattctttcatgctgtaaacaacataaactgtagctcattcctttcttctgctctatgaaaacatttttacagcttcccatctttcttcctacttatccttggttacttgtcatttcttcagcatttgtacttcccctttcaaaatgtgagcttggtggacaccacctaaattggttttgttagatatcaccccatttttctttctgagtatcatcacatgtcagtaaatagttggaatttattcttccagaaccttaaatcaaattccttcagaggatctagaccctgccttttctagaaatgtggaggccagttttcctaaaagccatagtacgtgtctgattgacctggcattttctttcttgctgactgagacctccgtagcggtggggttattgtctctgacactgcaactcagtatggaatatgtgttccccttgtagcttcctccaccatttttgagaatgcatgttaaccaataaagtcaaaactttaatgacttttagtgggatgtattcagatatttgttcattcaataagtattgatcaatttcttgcaaaatgccagtcttgtgacctatgtagttaaaatgtcacccctactcttccttcccaagaactctgccatctgctctttaaaggttacaaatgctggctcagctcaaccagaattaatccaggcatgtggtttctttggctaacatgttgcattacaaaacgaagtcatttctccaaaatttcacatacaagatttcacatacaattccaaattattaattcctcttgaaaaactggaagacaactctgagactatatatccatagggccaaaaccagtgagagacaagcagcagcttcccctgcagaaaggttttatttctccatgtgaatgaagataagttctccaggagcagtgtcaacacagcacacaacctggcctgcgcccctctctctcctgagccctgtaggcatccaggtttatacctcctgccctaagtaaagcctcaatcctcctctcctttaggacgcacataaattatttctgccattcctgctcccttggattggtaaattatcgtatcagtataaacccatgccatcactagcccatatggcccttcatgaaaaattggaaaaaggcaccctaattctactttatatccatctgttggaaaattgctgtgaattactgattttgtcatatgaagttacatggcttctttatcccagaaatttatcataataaataaccaatagcaaatcttggaatcgcactgtgtgaatggtgtccctccacatgagacactggcaggcagggcccagacagcaccaacatccacgacagcccccaacccacacctgcttgtcacctactacagttccatccaatagcaccaccaccaacacttccactgccccacacacagcttcatgaaggccattatgccaaggggaggttttttccttccaactattatttctatgaaattttttccttctaaaatttgctctccaaatattttaccctgcacagggctctacatgctgctatttgaaagaccagtagcagaatcttcactaaccttccaaacagatattttgagataatattaaggggactttatttccatagtttaaagaaatattttgccctgttactatactttttcctattttgaattttaactagagaaagagacccatatattcttgatgtgaaaagggacaagttactctttctctgctactctctttttataaaaaataaagcaaataaaatgccacattaaaatctttttttttttttttttgaaacagggtctcactgtccctcaggctagagtgcacatgcaggcacacctcttgtcattgtgcttcaagttgttgtgctttgaagatactgcattttttaacaaattgaaggtttatggcgaccgtgcatcaagcaagtccacaggagacattttgccaacagccatgtgctcacttcatgtctctgcatcacattttggtaattcatataatatttcaaacttttccactatcattatatctgttattgtgatgtatgatccacgatcactgacataaatatcgtctagttttggggcaccaccaaccatgcctatataaaacagcaaacttataaatgttacatgtgttccgactgatacgccaactgcctgttagacactgtctctgtctttctcctcaggtgtgcctcccgatagcctgagacgcaactatactgtattagaccaattaataatgctacgacggcatctaaatgttcaagcgaaaggcagagttgcatgtctctcactttaaatcaaagctagaaatgataaagctcagtgaggaaggcacgttgaaagccaagacaggctttgcaccaggttggctgtaccaacaagttagtcaagttgtgaatgctaagaaaacttcatgaaggcaatgaaaagtgctactccagtgaacacacaaacgaaacgaaagcaaacagccatattgctgatatggagaaagtctgagttatctggatacaagatcgaaacagccacaacattccctaaagccaaagcctaatctaaagcaaggccccaactcccttcaattctacgaaggctgagagaggtcaggaagctgtaaaagacaaggttgaagctagcagaggttggttcatgaggattaaggaaagaaactgtctccatcatgtaaaaatgcgaggtgaagcaacaaatgctgctgtagaagctgcagcaagttatccagagcatctagctaagattggatacaccaaacaacagatattcagtgtagagaaaacagccttttattgcaagatgccatctgggactttcatagctagagaggaaaagtcaatgcatggcttcaaaacttccaaggacaggctgattatcttgttaggggcaaatgcagctggtttaaagccaatgctcatttccattaaaatcctagggcccatcatgctgaaatttctgtggccatgctctataaatggaaaaacagcctatatgccagcacatctgtttacagtgtgttttaccgaatattttaagtgcactgttgagaactccagctcagaatattactgcttattgacaatacaactggtcacccgaaagatacacaaggagattaattttgtttttatgcctactgactcaacatccattctgcatcccatggattaaggagcaattttaacttgcaagtcttattatttaagaagtatatttcataaggctatagctgtcccagatattgagtcttcttatggagcttggcaaagatctttgaaaaccttctggaaaggattcctcatcctaggtgctctaacaacattcatgattcatgggaagaggtcaaaatatcaatatgaacaggaattagaagatttggattccatctttcaatgacttactcctcagtggaggaagtcactgcagatgtggtaaaaataacaagagaacaagaactagaagtggagcctgaagatgtgaccaaattgctgcaatctcattacttgaatggatgaagagttgtttcttatggatgattttgtttttgtttttgagacaagagtcttgctctgtcctccaggctggagtgcagtggcctgatcttagctcactgtaacctccgcctcctgggttcaagcgattttcctgcctcagcctcccgagtacctgtgattataggtacacggcaccacgtttggctactttttttctttttcttttttttttttaattgttgtatttttagtagagatggggtttcgctaggttaggcagggtggtcttgaactcctgacctcaggtgatctgcctgcctcggcctcccaaagtgctgggactacaggcatgggccactgcacctgacctgtaggttggttttgagacataatgctatcgcataattaatagactacattacagtgtaaacataacttttaaatgcagcgggaaaccaaaacactcatgggttgcactttcttgctatatttgttttaccgtggtcttctggaatctaacctgtagtatctctgagggtgtgcctgtaacaataccagagttcattttttctaaatataccttttgttaaatcaccaccattttcttaaaaagcaatatgtttatgccaacaacatactcagagtgagattaaattctttaaaagaagttgactttttgaatgtaataaacttaatatataataattacatcaaactgctcttatttctcctattttatcgctcaccagtgattttgataatgccttcttctcctcacccttctacacagttcaaggccaggcctgccattccttcagaggtagagggctacacaactggtaagtccatgccgagtgaagcgagggtggccaactcttccagcaaagagaggggccctgggacttgagactttaagtgctgaaacaggaaacgtcctgggtaaactggggaggattggtctcacttaagggcaactagattcaagtaattacagtgattctgccacacaccttggctttctctgagcagtgcggcccatctcacactggaatgcgtgatgctaaagaacctctacagggtaagcaagggcagcaaggacaatggaatagttgggctccatctgtgaaataccagagcagcaaacaggagtatgagaggtttccataacactttctgaagactgtttgtcatttttccacttatctaatcaggtgttttcataaaactcaacagaatatgtatacaagtataaaatgtatacaatgtatacaagtataaaatgttcatattactctatcttcacctcttcttctttttcactagaaagatgtcacactctcaatgccaatttcagtctatgttacagctacaacgatacctcctctctctggaagcctcaggggaatgtctgggtaatggagagcaccgtatccacactttacaattttaaaacttaaagccacacatctgcggcacatgacagtgccaactgccaagtactgaactgacagagattcacaccataatgctaattctctgcacaaggaaggaataaaagtatgtgtcaaaaatctgaaaatgattgatgcctgccatctcatcaagactgtctgtcacacgatttcgattgatgatttgagattgcatgtgagcgggacgcaggtgctgcaggttgcctaactagctcaacacttattctcaacaacacaaagacaaattaatctccacatcagaatactttccataaagttcattagactttactacatctacaaaaggcttgaggtggttggcctaatctcagggatactaaattcctaaccatagaggacagctcaacaaatcagccactttcaaaggtactggtgagtccaagagacccaaaaatgtgagaagcagtgctctggccattgtgaaggcactgaattgttttcatcactgggggagaacatatctactctcagataaggatatccctggattttctggctgtccagttgagactgctaaggactcggtcagaggtgtaattagaagaacaacttgtgatttcagtgattatttctaaagcacacagtactgtttaaacatgactcttatgtatcttgtgactacaaatattgaattagtaaactctcatctctaaaaaggaaccccaaatattgacttgaaaataaccacttttagccacaagattatagatgcaacctgttgaaccatttagtatgaatctgcctaattaagcaagaggatttcaaataaccaaatatttctattataaaacacaacccaaaataacagttaagaaaagttatctcacctcccccatcctcacataaccaaggtatttgaaattgttttaatatttgcataaatatttaaaaagtttcacctttaacagaataggtaactagacgatgcctcatcttttctcagagttcaacacatttggacccattctttagatgaatgcacttgtttataaaaatgtgtgatgaatgtcactacattagcacgtaatagataatccaagttattttcagacttaatcagttgtaagtaaagtgtgagggatttgagaacacagagagagggctggtggctctgcagctcctggtcaacatggaaaatatgcagcatttcccgtggagcctctcagtctcgctggcagctgcaggatcagcaggtctcgatccatcatcattcctccttggccccatacgggctgtgaggacacctgggtctaataacagaagctaatcactcggcagtcatttatgaaagagacataggaatggaaagaaaaccaggaaaaatgaaacagatgaatacaaaagtacgctgaagagactgatgttaaatggaatgggattataggatattttaagaaaatgtgagagtattacaagtaacaaactacttctaatagcaaaatattgccataaaaatacattattaatgttacataatacacaatatttcattataacatattataaatgcatctttaaatatctttaaagttttaagaggataaatctaaaaattaactttccgataagtttggaacatgcatagaatgtagagatttaactttgataaataactctgtactaggacagtggcccgggagacagaaggagaagaagcatttgctcctgacttcaaggttcttaccatctccaggagagacaaatgtacaattataaccacagcaggagatgataaggctaataggtaaatctaaaagaagtagtctctgaaaaagagtgttctctccctctccctctccctctccctacggtctccctctctttccacggtctccctctcatgcggagccgaagctggactgtactgctgccatctcggctcactgcaacctccctgcctgattctcctgcctcagcctgccgagtgcctgctactgcaggcacgcgccgccatgcctgactggttttggtggagacggggttttgctgtgttggccgggccggtctccagcccctaaccgcgagtgatccgccagcctcggcctcccgaggtgccgggattgcagacggagtctccttcactcagtgctcaatggtgcccaggctggagtgcagtggcgtgatctcggctcactacaacctacacctcccagccgcctgccttggcctcccaaagtgccgagattgcagcctctgcccggccgccaccctgtctgggaagtgaggagtgtctctgcctggccgcccattgtctgggatgtgaggagcccctctgcccggctgcccagtctggaaagtgaggagcgtctccgcccggccgccatcccatctaggaagtgaggagcgcctcttcccggccaccatcacatctaggaagtgaggagcgtctctgcccggccgcccatcgtctgagatgtggggagcgcctctgccccgccgccccatctgggatgtgaggagcgcctctgcccggccgcgaccccgtctgggaggtgaggagcgtctctgcccggccaccctgtctgagaagtgaggagaccctctgcccggcaaccaccccgtctgagaagtgaggagcccctccgcccggcagccgccccgtctgagaagtgaggagcccctccgaccggcagccgccccgtctgagaagtgaggagcccctccgcccggcagccgccccgtctgagaagtgaggagcctctccgcccggcagccaccccatctgggaagtgaggagcgtctccgcccggcagccaccccgtccgggagggaggtggtgggggtcagccccccgcccggccagccgccccgtccgggagggaggtgggggggtcagccccccgcccggccagccgcgccgtctgggagggaggtgggggggtcagcccccgcccggccagccgccccgtccgggagggaggtgggggggtcagccccccgcccggccagccgccccgtccgggaggtgaggggcgcctctgcccggcggcccctactgggaagtgaggagcccctctgcccggccagccgccccgtccgggagggaggtgggggggtcagccccccgcccggccagccgccccgtccgggaggtgaggggcgcctctgcccggccgcccctactgggaagtgaggagcccctctgcctggccaccaccccgtctgggaggtgtacccaacagctcattgagaatgggccatgatgacaatggtggctttgtggaatagaaaggggggaagggtgggaaaagattgagaaatcggatggttgccgtgtctgtgtagaaagaagtagacatgggagacttttcattttgttctgcactaagaaaaattcttctgccttgggatcctgttgatctgtgaccttacccccaaccctgtgctctctgaaacatgtgctgtgtccactcagggttgaatggattaagggcggtgcaagatgtgctttgttaaacagatgcttgaaggcagcatgctcgttaagagtcatcaccaatccctaatctcaagtaatcagggacacaaacactgcggaaggccgcagggtcctctgcctaggaaaaccagagacctttgttcacttgtttatctgctgaccttccctccactattgtcccatgaccctgccaaatccccctctgtgagaaacacccaagaattatcaataaaaaaataaattaaaaaaaaaaaaagtagtctctgatttttgcaattttatttcgtgagaaccaagaaaatcagaaaagctctctaattctatgcattttgtcccaattactcagtttctctatttcaagtaaattggatataacacttgaataggattctgccttgataagtatttatccaaccttattctaaagtttaattcattgttctgaaaattggatgaaaaaagtgaacttcttaaaggtttgtgaataaaaaatatatagtcaaaccataatgaaattcttcctgaataccaatgtctagacatttccctgtagaaaactggcagatatctaatagagtattgcttctgaaaattaactgtgtagttctgtggtacaaaatcacttgtaaaaaatctcctggtgtcaaaacagcatggaactggtaccaaaacagatatatagaccaatggaacagaacagaggactcagaaataacaccacgcatctacaaacatctgatccttgacaaacctgacaaaaacaagaaatggggaaaggattccctatttaataaacggtgttgggaaaactggctagccatatgcagaaaactgaaactggaccctttccttacatcttatacaaaaattaactcaagacctaaacgttaagacctaaaatcataaaaaccccagaagaaaacctaggcaatacctttcaggacataagcatcggcaaagacgtcatgactaaaacaccaaaagaaatggcaacaaaagccaaacttgacaaatgggatctaattaaactaaagagctttgctcagcaaaagaaactatcctcagagtcaacaggcaacctaaagaatgggagaaaatttttgcaatctatctatctgacaagggctaatattcagaatctacagggaacttaaacaaatttacaagggaaaaaaaaacatcaaaaagtgggcaaaggatatgaacagacacttctcaagacatttatgcggccaagaaacatatgaaaaaaagctcatcatcactggtcattagagaaatgcaaatcaaaaccacagtgagataccatctcatgccagttagaatggggatcattaaaaagtcaggaaacaacagatgctgcagaggatgtggagaaatagaaacacttttacactattggtgggagtgtaaattagttcaaccattgtggaagacagtttggtgattcctcaaggatccagaatcagaaataccatttgacccagcaatcccattactgggtatatacccaaaggattataaatcattctactataaagacacatgcacatgtatgtttattgtggcactgttcacaatagcaaagacttggaacaaacccaaatggccatcaatgatagactggattaagaaaatgtggcacatatacactgtggaatactatgcagctataaaaaaggatgagttcatgtcctttgcagggacatggatgaaggtggaaaccatcattctcagcaaactaacacaggcacagaaaaccaaacactgcatgttcccactcataagtgggagttgaaaaatgagaacacatggatacagggaggggaccaacacacactggggcctgtcagggggtggggggatgggagtggatagcattaggagaaatacctaatgtagatgatggattgatgggtgcaggaaaccaccatggcatgtgtatacctatgtaacaaacctgcctgttctgtacatgtataccacaacctaatgtattaaaaaaaaaaaaactcctggtgtcacttcggccattcaaagtcaaatgttcttctaaatctaggtattcattaaattaacattgtagagggtttgctttttaatgaaatagttttttttgaaacctcactaattggtatagtgactcttgcatggctcttccatcggtatacatatttaagtttgaattattgctaaatcctctttgtgaataactaacttggccttgttctttagttctgtgtcaacctatttggtagaaagtggcaaaagtagaggcaagaatatttcaaatcatgcaagtgatgctgaactcagtttctgtcatatatttaagcacatctgattatggccaacgtttcccttcaactttcactctacatgattgcaatatagtttttccacgagtaagtgagaagtgcagataatactttcaaaacaaaacaaaacaacgttggtgtttaataagaccctgaataagctattgatctgtgaattagcaccaggcacgatgtgaagtagtttacatatattatctcatatcaccttcttaataacttaatgaggtgctattatgataaatattatagggtgaaaaggactaatcattaagaagtcaggtcacttgccaaagtttacatagtaagtaagtggtggacctgggattttgactcattgattaattgacacgacaaataattaagtgtctactatgcaccatgcagtgtgctagggagggaagaatcatttacttactcctcagtgactctaaggcagatttaaggcacggcttctctaagctcttgtgttgtcatttgccgcatgacacagacatagaaactagagtgattttcctccttgtcaagcccaatcatggtgatgattttaaaaaatattattaatgattacctttggcttctaatccctaacgtgatatacttatctactgattacagaaatctttgcttagttttattttccaagcaaacacaaaatatgatggtaggaaaaaagagtccaggttgctcctttcataaaatcttattcctaggtttctctcttgtggcactttaaaaaaaagtatccatgaaagccaaggattgatgtaaataaccattaggaagagcttaatgttgacaagtagaagtcgagtttgttttagaaaaacaataggaaaacctgttatatactgtctgcaatgctaaataaatatttctcatcagaagaaatatctgcttattacatttttgtcttcctgattagtatgctttattcctgacatcaacttgaaaaaagatgcaataaatgagaagtttaaataacacaggtataagactgttaaccttgggatcaagggattatttgttaatatttttaaaatgataatacctttatattaaggctaggttctagacgcacctcacattctccacccctttctggctttgcagaagccatgactgggtctgtggaataaagccttagccatcccgtgtggttgttgtttgctactacagcagtagccatagctcttaccctcccctaggaacagcaagttgcattgctatcctggtttcccagaaacagtaataagaaaagagtaggaagtataatggtagactacatggtggcactagtggtggatcaggtgaagtatattggatatctgagactagatggggtttttttaagtgtacttacataggatcaaacaacatttaactttctgaatatgcatttagtaagtataaggcacaagttgtttctgtacattcattttcatggaaggggtgtgtgtgtgtatgtgtatgtgtgcaagcatgctcacaagtgtagaagacagggattatagaagtaaaataataatgcaagatatgcaaaatttaaacagttaaaattttaggaaacctacatgatttctaatgttgcaagataagaaagcttctgctaaaaccaacatatacaaaaacgttacttatgaaatacttttgtagagatttcacccatgagcaatagaaaaaaaggaaagttatttaatatattagaaaaccctaagaaacgtggtctgtggtcactccctctctggcacctttaccacagtgatgacagagctatgcggaaaagaatttctgtgccagttcagccatctgctgttggctcacaaatggagttaacagtctaaaaggaaagtttgttttgaggtgccattcccatgtgcatacaatccacaaactgcagtgtataaacgtggctcagtctaataccaagttaagacttggtttttttgaagagcatattgcacagcattttctggaaatgctcccaatattagatacatgtcacattcgcatagaaacatatggtcttcaatgtgcaatctcaaatcgtctacagagactctgcaatcagagattccctgttttaccttccttttataagtcaattttcacttagcaaactatcacactgtggtgatttggaggcattattttaattcctaatgtaaatttacttttaacagatgtgattctatgaatcatatagcagcatatgatattagttattagctgaaatgatgccaaggggtgttacgtgctggaaactagagcaactgagccaaaccaaggtcacccccatcactgccctcacagctgggtcagggaggtctggcctggcccttgtccattctgaaggttgagagaaaaatggcgtctttatgatgccccctgcccaccgagatactcagatatatttcgccctgtccttgaagcagccccactactactaacagtggctctgaaaatgtggacttgacagatagtacctgtcactggctttctatccaggctccattcctttctgggctgcaggtttgaaaatggatgtgccccagggaacctgaatacagtgagttcacacacaagcaggaaagaagtgagtttcttttggtttgggttgaagcagttgctcaaacgtgataggcagaagaggtaaggatttcactgtgctttaacaaaatgcttccatggtaatcagtcctgtatactgtataatcactatacagaaacaaagtgtgcaccaaaaggtaaagaattttcctaggacaagaccgcagctccacaaacaaccaaggaagctgttcagaaacctctttctgtgctctcttactcccctgagttcatccccaggccccagggcctcccattccagatgtgaagaggtgaagaccacgcctggaataactccgaatacaacacaattgctcctcacatatcagctgttcttttccctgttcactactgagaaaacatagataaatcacggcactttctgtctagcattgaaaatggtcattttaagaatcagggcagatgttggctacacacagaaagctgcccaagggtaggcttgaagcaaaataaattaagaaacccatcatgtactcttgagtgcagggaaacaaactgataatagcaacaagtatgcatccttttcaagtaaagataatgagtcaacctgctgattgcatattgtggtgactgaatacattgtgcaatgattaacaaaagaactgattgttcgtaattcaaggaatatctttccatttactgaggctttacttaacctctagcaatagttttgtcaagttattcacaaaggccgtataaatcttttgttagattattccaaggttcagcatatttttgatgcacgcaattttaaatggtagcttagaaaaatcacatcttctgcctgttgttagcatacagaaatgcaattgatttcagtatgctgaatttttattcagcaaagttatacattctcttatgaatttatatgacttatcgttatattcttttgagctttgtagtcacattagctatgaataatgataggttcttactttccaaccttgaaacttgctatgttttgaatgtgtccctcaaatttcatatgttggaaacttaatccccaaattcgtatgttgatggtatttggaggtggggcctttgggaggtaattaagattagataaggccatcagagtggggccctcataatgagactggtggctttataagaagagaaaggagatcttagctggcatgctcttgccctctgccatgttatgacacaggagaaaggtcctgaccagataccattgccacgttctaggacattccagccttcagaactatgagccaaatgaactcttttctttgtaaattacccaggctgtggtattctgttgtaacaacataaaacaaagacaataacttttgttcttttactagccatattcctttcagtggactggtcataatgaatataatcgtgttttttcccaatcttaaaaataacctttgagcatttttgccgtattttccacagtttttaaatagatctttttctattagattaatgaaaatttggctgggttcagtggctcacacctgtaatctcagcactttgggaggcaaaggtggatgaattgcttgtgcccaggagttcgagaccagcctgggcaacatagtgaaaaatctgtctctacaaaaaaaaaaaaaaaaagctagccaggtgtgatggtgcatgcctgtagtcccagctccctgggaggctatggtgggaagatcacaggagcccaggaggccgaggctgcagtgtgctgcaattgtgccactgtactctagcctgggtgacagagtgagaccttgcccccatacccccacccccaaaaacaagaaaaaaaaagtcctctatttctagtttgatacgtttttaaccatgactgcatgagaaattttttaaaatactttttcagcatctactgagatcatgtaattgttttaatctgtcaatatggtaaattacattattgattatttatgtttacataacatgactatttcatgttactccagacaggtatatctggaataaatcctagagggttgtgagatatatatctatggatatatacatatatctatatatgtgtctatatctatttctaaatttgctttcctagtatttgtagtcatatcatcctttaacaacattttaatttcagatttatatttgttaagtgtacttttttattcctaatattatttgtgtctttagtatttttttcttgatcagtcttgtgagatgtgtatctattttctttgctttttaaagagcaaactattatatttattatatttattttatttttttctttgttgatgtctggaattatttttattattttatttatccattttctttaggttctttctgttgtcttttttctgacatcttatgttggatgcttagttcactaattttcagcctctgttcctttctgatgaaaaaaaaataaagctcaccaattttccttgaagagccattatagccacacatgtaaaaggatcaatttttagtatatagaattttttttttattttgtatttttctacattaataataccatctaatttcctttatgatttcttctttgatccattagttacttaagaggttttcttaattttcaatatgggttgacctagttaagttttctaacttcatttcattgtattcaaagaatactgggtataagaaattaatctttggctttgatgattcttgctttatgacttaaatatgtgtgtttgaataaagagaatgtattatttgtgatgaatatcacatttataaatttgtgtcagatatagtacttatgtatatatatatttttatatagcatttgttaattttattgcttaaattttatctatggctccctcttatttcactgagacaaatagatttagaaatctcccattacattgctgaaatgatctatttcttcttttaaaaagagcttcaagctcattcatatttttttggtaattattttacttgaaacaatggttttgaagatactggctatcaagcattgaaaactaacaatccctaagagacagaaacaaataaggtgagtcttaacattactccaacttactgccttgagagcgtttccaggctggggcctaaggctaaagtgaggagataaagctgagagttgagggagacgatggcctccaaatttcacaggacaaaatattggtgagaggtgctcagagacagagtgtcagagatctgcaaagacttgttcaagtttatgcatgtgagaaaactaaaaagaacctacccaaaaggattagagataacagtgtcagggacccacgagggtaaggaacagtgcctcttatacccaccagtgaaactgaaaaccttgctggttcacagagcattgagtagaatacacagagtggccggcctctggtgggcaacagtaagtcctagactgacccttattccagttctgcctaacaaccaacaacgtgacctggaaggataaaactatttccaagtaacttaactcggtcccagaacaacgaccaaaaatatctgtagaagagaaaaaaacatatctaataatccacaaagcataagtcacaatatctgatatccagatattgtggtcaacagaaactgacgaggaatgcaataaatacctatattagaaaagaagatctcaaatcaatgacattttctataatataaaactaaataaagaagaacaaattaaatccaaagaaagtaaatcagagtcaaaatcaattatataaaacagggatggacaaattttttctgtaaagtgtcagacaataaatattgtcatctttgtaagtctcctatggttttgttgcatattcttattatttctttttacaaccctttaaaaaagtaaaaatcattcttagatgcaaggccttacaaaaacagagctaaatttggtctacagactgtaatttacccaatactgaagtaaaaagcaaaaaagaaaaagagagagagaaagagagacagaaattctaaaaatcaacagcaaattagttgagatagtacaatagataaacatgtaggcagagagagaagacataaattataacatcagcaaaggcaaaggttacatcactacagattgtgcagatattaaaaatataaagacagattatggacaattttataccagtaaatttgactacttggatgaaatggacaaattctttgaaagacatagtcagtcaataaaaaagagataataacctgaatagaatttgttgaagagactgattttgtaaaaacctttcagtgaattctagcaaatatttagggtaaaaattacatgaatctacacaaactttagcagaaaattaaaaaggaatgactggcctggcacggtggctcacgcctgtaatcctagcactttgtgaggctgaggtgggtggatcacttgaggtcaggagttcaagaccagcctggccaatatggtgaaaccatctctactaaaaatacaaaaattagccaggcgtgttggcatgcgcctgaaatcccagctacatgagggggcagaggcaggagaatcgctggaacccaggaagcagaggttgcagtgagctgagatcgcgccactgcactccaacctgggcaagagagtgaaattctgtctcaaacaaacaaataaacaaacaaaaaatgaatgactactttccaactcaatgaagccaccactgccataataccaaaaccagataaaatattacattcctcagaaacagataaaaaattaacatttttcacaaatgaaattcaacactgtattttaaaaagtacattatgatcaagtagagtacattccaataatgagaggtgatgcaaaacgggaagagaagtaaacttccttgccctgataaagagaatctatggaggacctacagctaactttatagttgacggtaaaagactgaaggctttccccttaaaaggaggaacacagtgaggatgtctgctcttatcagttctattcaacattgtactggaggttttagtcaatgcaataattccaaattaagaactccagataaacaaaagacatcgaggctgggaaagaagaagaaaaactgtattccttcaaagatggcatagtttctatgtgaaaatcctatgggaactcctaccagaagtactaagtgagtttagccaagttggaagagaataagctcaatatacaaaattaattgtatttctacatactagcaacaaactgttggaaattaaaacgttaacactaccatttaccacatcatttaaaaaaatataaaacaggaaaacatctgaccaaacaacagaaagaaacagaagagacattgaaaacccaaaacaaaacaccactgagaggaaataaagtagcctcaagtaaatgaagtatgttatgttacaggttagaagactcagtgttgtcaaaatatcaatactctccaaattcatctatagattcattgcaatcctaatcaaaatcacaacaggctttatttatttattttagaaactgacaaagtgattctaaattttatagagtaacacaaatgacctggaatatctaaaacaaagttagagaacactactaaatttttagaactaatcaagctaccgtaaaaaagagtacgttattggtacagatacagacaaatagatcaatagaacagaagactccagaaacagacacaaacatgttgacaactgatcttgataaaggagcagaggctattcagtgcagaatgaatagtcttttcaaaataccatactgtagcaattagagattgatatgcaaaaaatgaactttgatttctgctttacatcatatacaaaattaacacacaattgatcatagtcttaaatttaaaacctaaaactatataacttctagaagaaaacaaaataattcctttatgaccttgggttaagaaaacactttttagctaagatccccaaagcatgaccaaaaaaaagagcaaagttacaaattaaatgtgttaaatttaagactttctgcttgtgaaatatactattaaaatatagaaaagacaagtcacgaacttggataaagcatttgcaagttatatatctgataaagaggacttatgtctgtaatgtagcacatgcagaactcaatggtaagaaaacaactcaccatcctgggcaacagagcgagaccctgactctataaaaaataaaaaaataataaaaatccaagcaaggtggcatgtgcctgtagtcccatctcttcaggaggctgagatgggaggatcacttgagcctaaggaggttgagtctgcagtgatccatgatcctgccactgtactccggcctgggccacagagcgagtctacgtttccaaaaataaaaataaaaaataaaacaacccaataaaaagtggaaaatgaagaaaacaacccaataaaaaaatgggcaaaagatttgaatggacactgcagcaaagaagacatatagatggcaaataagtacctgagaagatgcccagcattactttctattaggaaaatgcaaattaagaccacaatgagatactactacacacctgtcaaattgaataccttttaattaaaaggtagaccaaaccaagtgttgtcaagaatataaaacaactagaattcatctatgtttctggtctaaatggaaaatggtacaactactttggagaagagattgccattttctttgggaccaggacatttcgcagggaagtatttgcacaagaggcaaaaaaaagcacatgactacacaaagaactgtatacaaatgtccagctttacatgtactcgtcaaaacctatttaaacccaaatgtcagaacagataaacaaactgtagtatatatttatgcaatgaaataatattcagcaataaaaaggaaggcacttgcaaaatacactgtaacatagatgaatctcaaaatgattgtaatggatgaaagaatccagtcaaaatgtatataccctgaggtttttgtgtgtgtttgtgtgtgtgtgtgtatgggtgtgtgtttattaaaatatatgtaacttttctgctagagtttttttcctgtggtataaaaacaaggtagttttcctaccacctttgagtagataagtgtacttaacattaaatgccaaaggtagacaccagcaagcttttgagccaccccctccggacaccagagtgctacttattctaacataccctaccgggtcagatacaaatgaaagacagactgagcaggggacacagagctcagtaatattgacagcggggttcaaaaggatttgagacatggacttcacaaacagcagcaccgtaggtctccctgaagcactcccagtgaattcctatggttggcaatatctggaagatctctgcacccaggtcatcccaccagggggccctgagaaccagaactactttttatcactgtgcttcacgtagtctatgaagcagaaaaggcagattacggcaggttgtcacaaagaacaaggtgagtcaaaccgcaggactgcctttacttaagcatacaacagaaaaggctgtgtgtcaaactttctgaaccatttatcttttatagactgctgaagactgttgagttcagcgtctcttaatccaaagcgctgttttagaaaagataatctacgtggcaaaaaatctggtcaggtcagtgtgactgcgcatcctggggccatcttgattatgaaaaactctaatatgggaggagagagactttcagtaacaatcactcaggggaaagcaatggcatcaccctgaagggcatggattaacagataaatagtgaagcaggttaaaatctaacagtcacattcctgtaaaagatatcttcatctcacgtctaattattttcttttccattgctcttctctaattagtacttgcttagtaatggaagcatcgagaaaggacagagagagtattataattctagcaatagaaagctagacacctcattttctagatttgattacacatcttaaaagtatccatttttccccaaatttacatggcacctataatggcataatttaaactttaagtagataagatgaatagatggggactgaatgcagcgtgcttactttaaaacaaaaatgtgggttccttatttcctaatgagtaaacagaaatagaactttcctataattttcaatgctgtattttattttgattatctttactagtatgttgaatgagaagtttttcacacaccaatgtccactgcaaatgtttttagaagttctcactaagtggtggtagcaggccaatgccaccatgctctcaacctcatcgtgtggcaggttgatttagtcagcttcccatattttccaagttctgcttttatttccatccccttaagcaatgaaagtcacaccattagagttggctctaagctacctagggtaagagtggacggttagcagaaaatacataagcaataaccaaatctaatttttatctttctctcgaataggcagcacaaaaattactggaactgctaaaaaaaaaaaatgaaattgagtgctaagcatttcagcagctattctttcacatatattaaatgctatttagctattatatattatgtacataaaataaatgttaaatgctaaaatgttaaattttaaaaactaagtatacgtatatgaataaatttttaaaaaaattcatattcacatatgtatacttaattttttgaagaatattaaaggtaagacaatatagagacatgaataatacacaatctgcaaaaattaactattggattaatcaactatgtagtttaccttgtacatagttcctggaatttttggaaagtggcatgatataatagaaagagtccagacattagaattaggtagactgatattgaaaccccacagcctacttgattttgagcatgtattacttaagttgtagtgtcctcatctgtgaaattccatataaatctaatgtggggattgaccaattttatgtgtctgtagtgtcagtatttgctagcacatattggctagcaaagaatgtacagtttttaatatgcaaatctgctagaagtagggacaaactgcacacttacaacttaagcatgcaattctccatagcttttatgatgattgcagttatattattattttatcgttataagttccacaagtttctttgactatccgaatataaccaaactagtttcctttatctcttcatatgaaatgggtgtatttgtctagaatttaattctgcagcatatggaaatttgcctctgcaatgttatgtattcctgtgacattctctggaccattctcaaccgaagaggaaggtatacacaccattccttgatttttaaaaacttaacaataaaagaaaactaagagagtggttgttatcatacctcggtatttaaaatagcaaggcaaaagcataaatcctctgaccatttactcacaattgctcatgaggcagatagtggcaacttttaagaagacaagatgagaataaaattgcgtcacaaagcagtctcttgattaccaatattaaaatcatttgtacttatcaggaacaatggggagatcagaccttctaactctaaatgagtaatataacagattatagtctctattttggccagaatcacaaaatgtactttttaaagtatactttaaaaatatggatcatatgaagtatgcataaaaataagatggcatttccacctctaattagcagctggaaaagctagagtaagtgtatggcaaatctctactatggccaattatatttccaatgaagcaataaagcatacatttattacataatttaacagatatatatattttcagttccttcctcccttcgttatactgaggaatcttcctctggacagtgctatcctcagatgttttactctttgtattatttgtctttactgtgtctatcaaccatcagcaaaccattaattgaataagttgacgtattagcttttatatttttgaactaagcaaataaattactagtttatttatgcagttatccttatttggagactcttaaaatatcatatgaaaggtttttttttaaatgcaaacacaatttacttttcctcagtcaattaaaaaaataatattgttactctcacttaaaagaatatacatcaacaacagaaatactcattaaatggaactatgtcaggctctgtgggagattagaaatacaaagcctataagacagtctacaggtttgaatttctctttaaaaatatttattatatttttctgttttcatagaattagagaataatatatagtttcatgttatattgataatagagaaattggactttatttacaatttaattataggtgtttgaaattatgttctaggctagagatctaaaacataattatgttttagatctagaacataattatgttctaggctagagatctaaaacatagatctcacattatctatttaattaagagactttttaaaaggcaagatatgagaactggaacttaaattttaacaccatctgtaatctatctatctatctatctatatatatataacaatttagtttttcattttgtgtagatatatatacacacacacatatatgatttctgggaggagtcaggaaatacctctaaacaatacatactgtctctctaaagtccttcaccaattacttcccatattaagtactgaaacaaaaaccatttacctaactgcagctgtagtagcaagaagaaaagcccatttcttcagcatgaataaaaggcaaaagtaagcaggaaagtgggttggagatgaaaaaagaaattactcaggacaaactgggtatttccttttgaaccaaattaaaaaaaaaaaacatggtcaattttgatggattctaacattcatctcagggaccctgagtgacataaaggaaaccaagtcaggaacaatgtctctgtcttcggaagtctcctgtgaagcagaatttgtttacaaggtaaaggattaattaggtttaccttaactgatctatttgacaaaaactcaaatgtaaattattaagagcaaagatcaactcatcaaaagaaatgaagattctgcatacaagtgcccagcagatccatctataggttgatacagggagtacttatacaggagtcttgttggtcctccagtatacagggctatctcagacattctgtgtgagggcactgtgggcactttacacctgccacattcagagacaaggccaaaaccaccaacgtgacctttattatctcccttaaatgtagatttctgtaattaaatatcttctacccttggtcactactacttagcaggattacgctattcaataaattgactacgtaatgtagaaagcagaaaatgttcttgcagctttaatcttctctaactgaaagatgctaatctttctactctgtggtcctaaattgtgccccttgctgctttcatagccgtccccccacccccatcccatttcttccagggccatcatttcctctttcaggacaagaaatgactacagtgttccatgaatataataccatggtttacaccacgataagagactgtgtttcactatgattgctgtaaggtggccacatgggccccagactaccatagtagactacaatatttaagaaataatctaatatataatacatttttttttgcttggtcaaaacaaagtttaaattaaatattaaaatcacataaagttattttgaggatatcaacaaactgattctaaagcttatatagagaagaagaagacccagaaaagcctacacaacactgaaggagaacaaatatcattggtaccacccgactttaatgcttactataatgtcacagtaataaagtgtgattattagtaaaaaaaaaaaaaaaaaaaaaaagataagatagacaataaacaaatcaatggagatcccagaaatagatccacacaaatacagtcaactgatctttgacaaagaggcaaaggcaatagaatggagaaataatcatcttttcaaaaaatgatgctggaacaaatagccatccacatgcaaaaaatagaataaatcattacagtttacatccttaacaaaaatcaactaaaaatgcgccataaacttcaatataaaatgcaaaactataaaacatggagaagataacaaataagatcatctagatgaccttgggtttgctggtgattttttacatgtaacaccaaaggcacaatccatgaaagaaataattgataggcagggcttcattaaaattaaagacttctgctctgcaaaagacactctccagagaatgaaaagccgagtcacaatcagagagaaaatattcacaaaatatatatctgataaaggagtagtatccaagatatacaaagaagtcttgcaactcagaaacacataagtaagggacccatttttaaatggtcaaaagagttaagcagacatcctaccaaaggaaaaataaagaaataaataaatacagctggcaagtaagcatattaaaagatgctcaccatcatatgtcattatggaattcagaaataaaacaaaattagatagtactgcccacctagttgatggctaaaattcagaacactgaaaacagccaatgtcagtgagaatgtggagcaaaaagaactctcattccttcctggtgggaatgcaaaacgttatgaccagtttggaagatagtttggcagtttcttacaaaactaagcagatttaccatgcaatccagcaatcacactttattcatatctggacaatacctggaaacaagatgtccattaatgcatcagcaggtgaatgaacaaactctggtttatccttacaatagaatattatgcagcaataaaaagaattattgagtcaccaatagatatgaaggaaatttaaatacatattgctaagtgaaagtctgtctgtaaaggctatatactttctggctctaactaaaagatatttggaaaaagcaaaactatatatagaagcagtgaaagatcagtgattgccacaggttcaggggaaggagggagagatgagtacgtggagtacagggtatgtttagggtagtggtgctcttctgcatgacgttataacggtggatacatgccattagatatttgtcaaaacctacagaatgtacaacacaaagaatgaagcttaatggaagctatggactgtagttaataataacgtatcaatattgcttcaccaatttaacaaatgtaacacacaaatgcaagatgtgttaataacagaggaaagtgtatgtgtgtgttgggggagaaatagggaaaatctttgtgcaacttttctgtatgtacaatttgtctgtaatcctaaaattacagacaaaagttagtttatgaattttaataaacagtttggaatatttttcgaaatctttatttttcacttgccatactgaaagttacctggcatggttcttttcagccttgtaagcaatcaaaatatttccacaatctaattcaatcaagcttggtattttactgtttgaaaatcttagcattatttacagatttaaggtatttctattccttctttttaaaataataattaaattgtttaatgaaagcatttctgactgtaaacgtttaaatgctacaaatttacatttctctgttcataaaagaacttatttttggtttcttatctttaagacaatgccacattcatgataaaaatatacttcaccaattttgaaatagttctagtagataactattaaagatcattaaaaactcttgagtggatgcattcagttctctaaatctagagtgcagcatatcataaagtgtctcctatccctatcttatcattttagatttttttctccaaagtagtgctcactatcagaaatcaccttgtttaggccaggcagagcagctcacgcctgtaatcccagcactttgggaggccaaggcgggtggatcacttgaagtcaggagttggagataagcctggccaacatggtgaaacctcctatctactaaaaataaaaaaattagctgggtgtggtggcggctgcctgcaatcccagatactgaggagactgagtcaggagaatcatttgaacctgggaggtggaggttgcagtgagccgagattgtgctactgcacaccatcctgggtgacacagtgacacactgtggcaaaaaaaaaaaaaaaaaaaaatatatatatatatatatgaaatcactttcttcacatatctgtttacttgtttcctaaatcatctctcccaattccccagcccatcagccccataggaacagatgtacttggaagtgccacagcagaggaaaaccaccaggtaaataaatatttgggaggtgactgattgaataaattaacttatctagatttggtttgtcaaggacattcggaaaattaggtagaatttagctccatgaatgttgagaaagttgagttttgagagccctaacatggccaattcattttacagaggtggaaaatggggctgacagatgttaactcaccttgtccaaagtcttagtaatggaatcaggaaaaaattcaatcacttgacttttaaccaataatcttttttactacaagagttaatttgctaatgaaatctcctcagtattttctcaaaacagaacaaaaccatgagttaagtattcctttttctttgctataactaaatataccttttaaaattaaaaaaaaaaaaacataaacatggttataagtgatcttatttcctgcatttgaggcagctaaaccagtatttcccaaaatgtcttaatacccacttcttgatctgctgcaaggaaaaatattgttcagtggtcaaatacgttcaagaatcatgattattatatagagaatagacgtttgcctcttaatggaattggaaaattcctacagtaaagatacatgtttagttaagggttggctaaactacttcactgtggcatcctctcttcaaagaacccatcaatattctacagaacaaatatgccatacaacacatttttatccgaaaatcttttataattggcttatattattgttttattcttcaaaatgttttctaaactgtctcagttctcgtcccatgtcatacaatattttataatttttcaaattctcacttttatgttctcacttactaaaatacggcaaaatataatttatatatacatatgtgtgtgtgtgtgggtgggtgtgggtgtgggtgcgggtgtgggtgtgtggtacctggaacacaataagtggaaaaatttgtttcctctgtcttatcgcacccctttaaaaataacacaaacagaaagtgttctttctaatagtgcaacttacggtccatttattttttaatatttgttatttaatccatggcactcacttttttgaactgcagtaaggtgttcttcaacaattcctaatttttctgtgaatcgtttacttggacaatgccacattcacatatacatcccctaacatttgcatttattcagtttccttttaaaataagtgctaaacaaattaatggattttgaaggagaaaggctttcctttcaaaagaatggtaacctttatgtagttgtttttagatatttcctataaaacctgtctactctcgatacagtcagacatcttttcttcttttttaaatattaaaaataagcacataaaataagtcatttgttctttaaaaaacaaacaaaaaaaccaaaaaacaaaaaacctacaaacacaaaatcatgtaaaccagaaatctttcacagaggtcaagaagtcaaaagtaaacaccgacaatgaaacaccgacaatggtaagatccttgtgaggctctcgctccacctttctcattacttctatgtttccgtggcacaccacgggccagtgcttactaagacctctgcttagcgatggagttagtgggtctgcacctctgattgtgctgggcatgagacatactgattaaaaatggtaaaaggataaaggaactggcctttgagagacaacatggatgaatgatgagtttttgaattaaatttttgacagctttgatctttactgaaaatttaaatgaaaaacaaaacaaagcaaaacagagttccaggattttagaagtgccttttatcttaagtgaaatgttctcatcagaaactttggcatcccatccagtgcctttgatgctggctgtgaaacaagacaatccatcttcttagctgggaagacaggcccttcaccacccaggaaaccataacttgtaaacatcagtcaagttcagatggctacatttttacttcagaagttcgctttgcatttggagtggctcattaggggaaaagagagagagagagaaagggttatggaccaaagtgtgtttctcaaaaaattcatatgttgaacccctaacccccaatgtgatcgtatttggaggtagggcctttcgaaggtgattagggttagatgaggtcacgaggatgaggtcacaagccaggattggaaagcttgataagatgaaaaaaaaagagtgagctttctactctgtgtgagaacacagcaagaaggcatctctctgcaggccaggaagagaggcctcaccagcaatcaccttgatcttgaacgttccagcctccagaactcagagaactaaacatgtgcgtttaagtgcccagtctatgagactttcttttatagtagctggagcagactaataccgacagaccaagagagagaaaatggagagaaattttctggcttgtcttttaattattctttatttataaaaaaagccacattgatttttgcagcagtgatgcaagtgtgctgtgcataggtttgatgttctgctcaaattaagtctaagtttttccactaaaggaattatagtgttaatatgccaagagtcctatctgctcacgtacttccagtctctgtaaatacgtgcagcctgatatcaaagcaaaccttgaggccattaactataacattcttggagaaacagctgaagacctactaagaaaaaagtaccaaataaccaaagctggcaattacaattccaccccgaaaagaaggaaggcatgcatatgaattatgaaaaatagggactgtgcagctctcagattttcaacaatgaattgctcacattctacaccgtgtgtgttaaatgtttaaaagtaaaagatcccaaacattttgccaaatatgcagtgttccaaagggaagtatcaaaaggatactcatttataaaattatggttcagtagataaattataaggcctcaaagaacatgctgttacttctacttgccaatttataaattgactcaagtcttcatttaatttatgaaaaatcaaatcatctcaagaatgttttcgttatttttctctaccatgtaaaatatatgttttgtatgtttgataagttgtatcctgtcaattttagaatttagctatttggaacatataaaccacatttctacaactcaaaatagtataatgcttagttacctatctttaaaaaagtaatagtaatgcactgagatatttgggggtgggaggtggcggacacaagtttaactttcaaaaataagggccgtgtaaaataactgaaaaataatcctatttgaattaaaattgaataatattaaaaataaatttctactgaaaattacacctgtttctctattttatttttcttccttttaggatagcagaaaattctgttagataaatcagactaacatgggagacattgtaaatattaagaaacaatagtaggaagaggcggactcacattcatcttgctctttctgctattcccttccaaaaccaactgtgaacaagcactcagggtggccagggtacgtgaggaagcctcctctagcccagaaaaaaactttatttcacaaaaagttatccttcacaataaaaaacactattctataaaaattgtttcccctggccaggcgcagtggctcacgcctgtaatctcaacgctttgggaggctgaggcgggtggatcacgaggtcaggagatcgagaccatcctgactaacacggtgaaatcctgtctctaataaaaatacaaaaaattagccaggcgtcgtggtgggcgcctgtagtcacagctactcgggaggctgaggcaggagaatggcatgaacccaggaggcaaagcttgcagtgagccaagatcacaccactgcactccagcctgggtgacagagcgagactccttctcaaacaaaaaaaaaaaaaaaaaaaaaaaaaattgtctcccctgacttgagttatgggaaagagggttagcttcacttggccctccatgcccctgcccaggcacgtgtctgtattagtgttctgcagaggcaattcaaagtacattgtccaaagcccctctttgaaaatcttttgatgctgctgtaattcaatttggtttctatgttgaatctgaagttctgtgttactactaaccccctttctgtaggaaaaaaatgtatttttctatacaaacccatatgccatcgaggtacctgtatttaatatacctccatttagtagctaataaatatgtctatttgaaaactatttattcttccatacttaatcatagtgaactataaatccaaacttgacagcacaagaaaagtgacatttttcttctttcatttctatgctactttttccaaattatttcttgttctttttaaaaatgaagcaaagacatcatcattgttactattatgccttcagttaacaaaaaccttttaaaaagattatttgaaatgcatatgtaatatgcatgactacgttaacaggattatatgctattagatattgtgatataaaattacaactcactgggagatacagtcctctttgggcctctctcccttctatacatcttgctggacttgccaagatcaaaaggtcctgcccgcttttaacagactattactcagggttgcttatgcaactggtaacctaaagagataaggcaaggtcttcccctagacaaaaggcttgcatgcggcttgctataacagtagtcccagctcagtattcaccggctgtgatgcaaatccacccatgagtaagttccctctgagccaattgcttcattccctgcacacaagctgctgcactgctgagcactgtgtaataaagccctttgcctttggccccaagactcacgtcttccaccagcagcctgatacagtagcaggctcactgatttgtaagaggggtaaaatcaaaccccagacttgataataccatctacacagacattcactggtatgattcaagaatataaataactggtattcaatgtatccaaaaacaatcatgatgaatatttcaccaatgcattgctctttaaaataatacccaaataattatctgtactgtttccataccttgacctttcaactggacttttccttaatttgagcttttttgagttgtcatcagtgtcgtggagacttgcgccttccaattacacagtggtgttcaaacagaagaaattccaaacttttcttccttttgactataactaccctgggagtaaaatgtcccccaaataaaaacataaaataaataaaataaaagaaagaaagaaagtatctacttggcaagtgggaggtcagaagaaaaggggcttcaaacatcaaagaaggttctcaaaatactctttcaaatgaagaaagccccacgctcggtgccttatcttgcaagctcacatggccagacagcaacctttaaaggattatcttaacatgcggcgagctgggccctctcatgtgttctgaaatttaaaccagaaaatggctgcacaactgacatggttgtggggtgtgaaggggaatcaggaagagggaggagaggcttacatttccagaatgagccagagttcagataaagatatttgtgtaaaaaacaaagcaaccaggaatatgatcctgggctgtcaatttgtagaatacaatctaatacttatacgccataggtagtcacagaagttataagaaactacaagccctaaggcattttttagaatagaaatctctcttctccctctctctctctctctcttttttttttttttttgccaatatgtagtgtgggattttctttggctaaaaactgttccaatttccctgttttctaaatatactttactaagcatttttttttacaatcaggagtattgtaacctttgtatattttatcaataataaaataaatccataatttaaaaaaatcacacaaaagtgtataaagtaaaaagtcaaagtcccacatccccacctctgaatttcacctttatctgtgtgtatatgtatattttgatattgtattttgtaagtgtattgttctgtaatgtgctttttcatttaatagcatgattcacattcttccatgtcagtaaatacagagctttctatttttttcatgtctagacagtactttacaagatgattatattcagtaatgtatttaaccattcccctactgatgaatgttgaaatattttcccctaattttttactgtttcaaaatcaaaaatatgtacatcaacttcaagctttttactatagcccgtggactcttacgtgatttactacctgtctttgtcttcctctggaacttcttataccaaatctttgtgcccctggcctttcttccatgcctgggctaagccaaccttgtctctgcatctctgtggaatgtcctgtcccaaggtattggcgtggtggttcctgctgtctcatcactcgctccaaggttacttccttggtgaggtctttctagagctcctgttctacacaatctaatttatccttagtcaatatcttttataccttctcggtttattttctgtacagcacccatcaccctctggaataatcttgttcatgtatttcttactgtttactgttttcatgtaagatttttctctggtatgctctaatgtgtcctttattagaacaatgtctgccacatcataggctctcaataaacgtccactgagaagatgcataatggaagtatacttcaacttggattgtagcacatttacacaaatatttccattagagagatgcctcgaagtaaaattactgcccaaagatttgtacacacaaaatattgatgggtacttgccatgggtactgcaaaaaagctttaatggcaatttatattgtcaccaatattatggcaacggcccttttcccacaaatgcagttttataatgccaatttgacaggttataataatttttttgtaaattaaaaatcaccttgttctaaagaatctttttacatttatcacatttgtgttttatctccaaattaatcattgttgaaaatcttttttattcttttatcttttgggattacagaatgtcattctagttttcttccattattatacaagattgaaaggattttggttggctttcttagatcttatatccaaatgggatttattattatatgtggcataataagaactattattcttttaaaatgtattaattgtcttttgcttattaaaaaatagtcatggtggacatttctttaaattttcaaaaataaacacagaaaagaaaataaaaatcaccccaatagaaacttgcctgatttctttccactgcattccctgtaaaggtgtgttaatagaaatgtttctttgatcatacctataaagtggtgtttataaaaatgtttattcccggccaggcacgatgggtcatgcctgtaatcccagcactttgggaggccgaggtgggtggatcacctgaggtcgggagttcgagaccagcctgaccaacatggagaaaccccgcctctataaaaaatacaaaattagctgggtgtggtggtacataatcccagctacttgggaggctgagacaggagaatagcttgaacccgggaggtggaggttgcggtgactagagattgcaccattccatgccagcctgggcaacaagagtgaaactccatctcaaaataaaataaattttaaaaaattaaaatgtttattcccttatacaacattccctcatactcttttgtatacagtttgatatggtttggctgtgtccctacccaaatctcatctcgaattgtagttcccataatccccatgtgttacgggagggacccggtgggaggtagttgaatcctgaggccagttacccccatgcctgctgttctcatgatgtgaatgagttctcaggggagctgatggttttatcagggactttttccccttttgctcggcagttctccttgctgccatcatgtgatgaaggacatgtttgcttccccttccaccatgattgtaagttcactgaggcctctccagccatgcagaactgtgagtcaattaaacctctttcctttattaattacacagttttgggcagtcctttagagcagtgtgaggacaggctaatacactgttttttcgcttatgctatgaacattttcttttgaaaatgtgatttttaataatggtacagtatcttaatgtgtatgtgtattgtaatttgtatgagtgtattttaatggttcctattgttctacaagtaattcctttttctgttattaaaaattaacccaccaatgaaaacccatgctcataaaatctccaggaccatctctgatttcattcacaggatagattcctaaatgtggactcaataagaaaaggagtataaattatttcacagctcttttcaggccttttacaggcaggttgtgtgtactatttaaagtactattaatcccaccacatacaagatgtattaggtacttcttaagagtgcactgaatataagaaatctgttacaaaatgttagcagagcagaaagagaaaaaaagaaagaaaaaagggatagaatgagattagatcacctggtaaactgtaggaaacagctactgcccccaggactcaggaaactcaagaaagtactttatcagaacttctgagtgctgagtgcatgccaggacccctgaggatgggccgactgagtgggtagaaaccaccaaggcactgcctcccagtcacggaggagtggcatggagaagggatcacagacacttccagaagcaggagagagggaagggtagaaaagagaaaatgacagcgcctttcccctgacctgcctttggatccactgagcagatgtcacaggaactcgctggcaagggcatctgggaaatacagtttcctcccgagccaagcattgcggagcagcacaaagggcgtggctggggaagggttgggagaacagggaatcactctcacacccaagagtgcatggagcatatctgggtgtctacacaggtaagagagtgaggggtcaaaaccgggcttcttatgactctaaaatgtatttttagagcagttaccaggagagctgacattgttgaatctacctgagaagccagaagccagactctttgtattactacagaatgtgattccatgctgttgccaaatgccaggaatttctacatcgactgccatcaggacatggaagtctcattgtttcttaaaacgcaactattcttgaagacatggaaggtcatccttcttacatccttacatccttctttctgtggccctcctaggcttgtcacgagtcagcacgaatcccaaaggtaccagcagcacagaagctcacactctgtcatcagagctgggttggcagtgacagaaatgcttatgcaaacacaggctgacttctcactgaatgtatagaacatctaggaaagaaaggcaaaggatttaggccaaagcaatacctcaatgcagacaactaactagtggcagctagctagtcacctgctctcaactcttcaacgtccttcaaatattttctctaattgatatagcataatttgtgatgccaacaaccaagtgttttttcacaattacagagagccaaacctgtgtctctgctgctcccttaggctacttataatattggcctagttctcttagctgtcagcacaattaccttgtgattaaaaagataacatcaataggaatttcttttttatcagctaagccatggttacatgttgcatggacactagcactcattaccccatccatattttggtgagatttttgcccatttccttcgttttcacagaaaatgaaataaagcataagcttgttggttgcaaaggtgacatatagtaagtcaaataaacccataatgaagttcccttatacttcaggttagcttcaaaatcccactcaaatatgtatccaaaaagaaataaaacaggaaactttctggaataagttcttttgttgctatttttatattgaattggcaaatgtcatttcactgtctgaggtcaagggaacacaagggaacaggcagttctcgaaacagaaaagttggaggtgctgtgccgtctctagctaagaaaactctagttctatgaaatatcattccacctgagaaaattttcacatgattaaaagataacagtgccataaatctacccttgaacatcaggtgtgactcttactatactacccaatgtcttttaaaaaatatttagatcattagccaatttgtgtgggtgatacaattgtacacattccacaaaaatatcagccatttgtctagttcagcatctggtaatgtcaattaagggttttatttactcacaaagagaaaaaagtaaagatattagtttcaaattaagtccaacagtctattgagtacgtagtttaaatgtatttcagctcttcatcctccccagggcagagatcactggcagaaattagcatccacggataggaaccaacaacagggtagctgatgatgtttaggtgaactcccctctttataataacagaaataaccccttttcccctacaaagcccgtctacattttgcatagcactaaggatggcagacctaggagctgagttagccaaccctgaaggtatcctgcctcaagacttgtggctatttggaaaaataagcatcctcgtcatggggtcagtggaatcggggcagtttgctggagtgaaagcccccaattaggtcaccctgtacttgtcatcaagaatgagtacacatggcctctctatcatcaagtggccacctacgctttttgagtggtaattcttgaaatatggttttctctatgaagaaagcttttctctccatagaaaaagcttaacagcaaatttcactgtagtcgaaatgtttcacctttctttcctttttgatgtgatcgtcagctcttgactgcatctcgttttctcatgcctgctttctttctgctgtcagtcacaatcctttgtgacaaggtgggatcacctggcagatgatttggatgttgcctctcatggagatatatctcattgaccctttcgaattcagagatttttttttaatatagaaaaaaaggcatagcattttaacatcactaactaaggcaaaagataaggacactggactgaaaaaccaaggatgttgtataaatattcgtccttgtgtcactattttattggcttgaggtatccaggaaacaacttcatttccccaaattacattttattaccaaacaaaagatgaaaaaagtactacttatcccattaaactagcataatggttactttaattggaggggtgggagagaaagaaaggtgaatctacttagatttcttggagaaatgaacttacaaaaatggaagctggtggcaaagccaaagtgaaattcacgtttacttattccatgcaatatttctctgtccaacctatgtaaagcactacaaatgaatacagtcatagcaactaattgagttatcagcatctccagagtagatgttactagtatgtcctggcatatgaatggtagtattatgtgggatattagtagttcactaagagtcctataggacttcttgtgtctggaaaaagagtttagtgagtgatactgaaaaaccaacagcttggctcacgggcatcattgaacaaatggtactgagcatggaacgcagctactcagaacttatgagccaaatgggtgttttccgtacatggcttcttgtccagaatgctactgctattagcccaatggccatcactggttatcaaacatcctgacccaagtcaaagccagacgaagacagaaggccatcgtgggaaggtgaagcgattcatgcttagggcaagataattatttggtatcctttcaatccatttgttcaacatttgctcccaggagaggcgggatgcttcctggggacagattagagaagaagggacactgctaagtgctcatgtattatttcaagcagttcactctgggccccgacccaaatcctcaggcaacaaagcagcaccctgcaggtaataggaactgtcttctttagaaagcagtgtggtgaccaggtgttgctaatcatcagagtctcttggtgactcacagccgccctcatgcagctttgcgagttctgactgccaacacacacaggactcttcctaagtattatttcagctgaattctgggatgtgaacatcagactttcaaacccggctttctcactttctactggggtgaccctaaatacaagttatttcatttctctggactcagtttcctcatttataaacatgagaataacattatctactccactggttgctgtgaggaccaaataaaataacacaattaaggtgttatctggtatataataaccattcgataaaacttagcgattattatttatggcatccattccacaatggtactcaatggtactgtgtacactgcctaagaatcctaacctttatttttgctccactcatcacttctatttccagttctgtgatgccaacaaattgggtaattgtacagcagcatgttattatgtttcttcacctccccttcttactatgggtcccttctccgccttcctcaaacatggcagccctgtgggatgttgaggctcttgaggctcctcagtttgaaatgaatgagcttgctgaagtggaaacattagaagggcatgattggcagattattttgctccagcaccttcttgacagaagtgcacaaagctcttcaagaagatggagctgctgccagatgccctctgtccagcctcctggaagcccaggagaaagctggagtggacgccatccttctggcctcctcctgaaggacatactggtttccttaatttcttttctactttttgtccttcagtctgttgtccctgcacagctatagagaaaacaaggattacagattccatgtcgttttgcagccagggaacatctttggctagagatttgacggaagtcagtgccaagtggctgtgtccctgtaagcagtccattatttctaatggtctatttgcatgcaaacctccaggccagaggcagaagtaaacatcccagaaacttgtccctggagactctgggacactctcatttacacgctgtgctccattcacggcgctgagtttactcacacgtgctacacatgcgatcctcacgacagccctgtaagatggtattagcatctccattttatcagaagaaaaataacttccgagagggttaagcaatgggtaaacacggacataaatatggcaacaagagacactggggactactagagaggggagtgagggaggagggagggttgaaaaactaactattcggtgctatgctcactacttgcgttgcagaatgatttgaaccccaaagctcagcatcacgcaatatacccatccagcaaacctacacaggtaccacctgaatgtaaaataaaagttgaaattataaaaaattgtaaattacaaataaatgaataaataaaattttttaaaatacagttaagaaggggactttgcagtctggtgtacctgacactaaagcccgtgtatctttaccatatcatgtttaaaaaatcattttcaagagaggcaagaaatttcagtggagaaaaagactgagtatgtagaatggaagattctctagatgtgttgattttgtttatcacggtgtcaactaccggaggagtaggcaattttatgtggatgtagaccatgcacctttatcaggagtactttttcaggtcaattcccttccctagcactaaaaataattaatagatctctttgagagactaagacagtgaggagaaagtacatttacctaccacaactaatgagacctgaataactggaacagaatatttggaaaaaaataatggtttaaatggttaacgatgtgtaactagtaatataatagctacttcaacggagctttcatgtaaaacagaatttcattgcaagtttaagttttcttttgagaaaaatttggctatgtaaaggtgagtttggcaattttaagtttacaacttattggtcaataagtagtagtaagcctcttttgtgtttgttgagttaataaactatggttcttggacaatttctttgttggatgttaatctataactcttatttgacctgttatttgacatttctaacctcttccttaaacattaaccagaaccctgagtactttcttttccaacacgggtaagggattgattttttttcttaatttcataacttatgaagctaaaatgtgcaatattttgactgagtgaattaggaattcttgttgggatttgggaaaaagaaagttatgagaaactgatgactgcctatgtaatacttcctttataggaaattcttaatacccttatataggaaattttaatacccttcttacatatcttttgttcctggtgacatagaagaacaagtttaacaacatcttaagaaagaaaattattaaatatttacagtcacaaacctttgttcaaaaaagcacttaaaaattatatttaatagagtttaattgagtaaagtgaatcacatagccctcaaactagaataggtttagagagactagtgtttttgtgtggtcaaagaagacttatggaaaaaaaaggaaaatgatgtacagaaaatggaagtcaggtacacaaacagttgtattggttacaccttggtgtctatttgaactgctttgaagaatttgtcacctttcagaggccaaaacttggtgatcttcgtgattggaacaagaggaggttatagcctgattacacagtttactctgtacagggaaaactttaggccagacttaaaatacgcaaggaggcagcttaggctaaatttgctttaacaattctctctttatggtcaacctccaaaaatcatgaggggttaaccaaaactctaggcactgatgacattttgtcactattataaacatattcacacagttttaaattttattgggaagtagttggatagtgggttttgtaaagtgaaaagaaggactttaggttacttttctgtaaggattagagtagaaggaacctctgtgtgttgaaattttttgattttaggagataaaacctggtctgctatagtttttttttttttttaagttttagtttgtttatgtgatatttagtatgagtgactttagtttggtttggtctggtcggttggagcctagtacatgagtttagtcaaaagcaatagcctcttataattttatgttttatttatttatttgtttgtttgtttatttatttatttattcatttattggataggtgagagggtgacccaaactttactgttggcttcgtggtacttttagctattattattttcagttttcggtctcagtgtgtcttatatgttacagtgacttgttgatcactttttggagtttttgttgtttgggttgaagagggaccagttgacagtttatagatgtctgtatgtaaacatttgagaaaatatagtattttggggaggctactattatgactattaggaagataatattaagagtttgaaatatggtttctggtcagagtctctatgaatcaattaaaattgaagagttttaaacgtgagttagataaatagtatttgttttagccaagtagtctgttaatctctcacaattgaatctttataatttttatgtataacaaaaagtgttcataacaaaacagattctttttgtgtagtcaatggataatctagtgtgattttattattaggaacaattttagtaacagaatttagtcttttgtgtaacaatagtctttgtagtagaatttcttatggagtctattatgagggatgcatttataatgactgtcccatttattttaaactatggaaaaagagacctaataagtcatgtatcctgagaagagtgaaggacaaaatctttaggccaaacgttataaatagaatgaaacagctttagactaaacttcatgtaacaccttcaagtgtgagccacagtgatgagtaaccagggtctcaagctggtattttttcaagcaaaaaatacttcaaaaaagccactggagtaggggtggggagcgggtaagaagatccatatctgcttatcaactcctgtttttttttttttccatttctttttgtatttggtgtctacaaaagagccttaacatggtttaataaacatgtgtcatagactgcatggagttgcttatgttgtttcaggatacttaaaggaaatgctcactggaacgttctagattttggatttggaatgttcacccagttaagtatactgtaaatattcaaaactccagaaaaatagtctgaaatacagaacacttatggtcctatgaattttggatagggatactagacatgtacttacaaaatggttttgaaaattccttagtacaagaaagactctgccaatctgatacaaatatggctttgtacacacacacacacacacacacaaacacacaccccactctctctctctagatatatatacatatatatacatattaacatataacacatatacacaagtaaatatacttttcactgaattttgggtggacatggacccacggttcttgtctgggacatcagctactaggtctgagtcccctgtctgtgccctgtgcatctgggaatgtgtacacactcttcaaaactccagttaatcaccatcctccctgggaagcttccatgctagaggattgaggaatccaactcttgagaaacaagaacatcctcttcagctcttcattctaatacttagcagatatcatagtgttttcttagttgggagactagattctgtctccctcatttgccccaacttcatgcccactggagctccagacacccactggaggaggcagtgacaacaggatttgcctccaaagaacacagaccgcacccttgtgtgaataagggaattttgttactcctgattactttacccatcctagaatacgctgaatttagccataaaagaagttgaaaaagatactcagaagaagaaaaaagaacactagagtggcaaattgtattatattaccagttttacacatatccacatggatccttatgtttgtggggtccacagcctgaccactgtaatccctcacattcatgtttccccgccgtgtagaaaagctatacagggtattcctgctgtacacgcagccactgtgcaaagatgaccctactctccttggcactgaggagccgaagtcatcccctgagagagaggcagcctacaaatgaatacctggggccaggggcctccagagaggggagttactacaccaggcaatgcttctctcccagacagcttgaatattaaatgtgtaaacatactagacagcaaagtagtgccgaaaccaagaaatggacacacggagagagagggggaaagggaaggggagagggagggagtgggagagggagacggagagtgagagggaaagggagggggagggggaggggaggaggagagagagaggcagaaggagaagaacagggagagggagagggagggaggggggagggggaggggaaagggggaggaagagggggagagggagagggaaagagagaggtaggaagagaccacgaggagagaggaggaggaagacaaagtaaaggcaggaggagaagcccagtctgggaggtagagacagcaacaacttgagtcatgcgctggacacagtgcccacttagcaggaaccgctgcagctacagatgggtcccaaatcatgaacgaggacgttctggttgcacttccatcctaagaggatggtggagggtgatgctttttgtttcttactcatttccctgtgcatccatacagttagccaataccctctaaagtaataaaagtgtatttctgctccgagtaacttggttgaactaatattcaaatccaaatctgcagactggtaggctgactaggctatgtgaatgtgtaaggaacacagaatgtgcatacaaattccatacagacagagaggactgggctggcattaaggaagaccagtcacttcagaggactggccaagaggccagtgacaccacgctcggtgacaccacagctcttctcatggtttcaaccccagaggcagatattcttggctgccttcttgagtgccctgacgggggccactccttttgtctctttctttgatttctctgggtgcagactaaaattctccttgaatctagttcaaactgtccaaaagaggggatctattcagttcgattcatcacactggatggagttcttagaccaacacacgccacaggcccatggccagcctacagatcggctccctgatgtcatgccatggccatggaaagactgaaccatcacagaaggggctgccagcactgggacaggcatgtaagtcatatgagaccatctaccttggtcaaccaggcagtgctaatcgggagagtaagaggacagcacggagattagcaacccaaagcaataccccagcaggtattagagttgaccattggagcttggcatgttttggttattaatactccaaactattcatgcttaaggcaatgtggaatttcaagtgaaagccagatggttcttgggcaagaggaggaaagaaaaacaaagcatcatgtgcttgggagaacgcctagtaaaacaagaggatcccagtctctcccagcagagtgtgggcatcgttcactccctttggtacaatccattccctttctcgtcgggattcacacagcatggtcaaaggcaatactttaacatcacgaaatcaagctaggtttacaaatgtaaggtaagagataaagaaagaccatctatctggagttcttttctcccctttctttctatgtgtagaataaaaggacagagaagagacagaaatttaaagggaaacaaggcaagtgctgaaataaacctgccatctattttaagtgaaacaatttatttgggtttcaagaatacttttttctgtctctcgttcttcctaaatcccagattatcagtctaatcgaagatcataaaggagatgacaaaacaattatcagagagaaaactggattccacttagcagcggctaccaaaagtacagtttaatgtgttttcaatgaggtgggcccctgggggcctgaacacccacaggccaacggatgtttctatgtaagaagagcaacgtcatcagcaaaagcaatttcccacttttattaatccagtttattttaaggcatgattattcaagctttcgtctgctatagttagtcttgtattttcaggataataagactggtgaggctagttatcaagtgcctatgcacagaattcaaatggcctttgttctacctggcagtctcaagaactgttaaatgagcttaaactttattacaagaagaaacagaacatgctgagtgaaaggtctgcttagttgcttaccataaaaccacaactacttaggaaacttatgctctgcatattctaaacctgaaggagcctctaatggggcatttggggtcagttttaagatgattcctcaaaaatgcccccaaataagacctggaaggggattccacacttggctgtctctgcagagccacaggcaacaacacagaggtgccatgatttatttaatggaagcttggtagtgactcaatatcaagaactcaccttgagaagccacatttcaagtatctgaaaacaactggcaggcctttattcaaatactttaaatagatcaaagctgtttattctctaaactcctctccccttcttacacattttaaccaagtcaatgttttccttctatttctctcagaggtctaaacatctctaaactatatttggcctaaagttttgcttgaccacatgattttaagaactgttgaatttgagtgccattgccagggaagctgggaagatggctggataccagcatttacaaaggtctcatcactccatgagtgataaattcccatttctcacatggttcctatgggctgggagtaggagtcctcaattcattgtccttctgaaaggcccagatctatgaattgggagattacttgtattcagcagttacattttctactttttgtgggctttgaggagattagaaggggtaagagaaagatatttgacatacttctttctctacccctcaagactaaataaatactaactcaactatcttactacttcaagtttctaaataaatctcccattcagggtcaggctaatccccttaactctcctctccagtatcattctgatcccatccgacacctcccaaactgagcctcaatgcctttcccgcatggacccgcctctggctggtgaagccaaaggtcctgagagcatgcatgtggacagagctaggcaggtttccttggcgtctcctggggacgtcacatattatcctccattatgattgtcacagtacatggtatgagcagacaatagattttaaggcactttaaaaaaatgcttgtgtaaatgaaatggagcatttggattcaatttagtagccttatacaatatctgctttttatttcagagaagacttctgaggtagctgatgaacatgccggcagagaggttgaattccgaggtgaaccagtcattccaatccaagggagacagcgtttggaagctttaatgtaaacagaaaccctgcgggactcacttgtgcatacagctgtcaaaacaattcaatatccagagataaacagggtataagacacccactagtatattatactggaatgcaacatctttttaaaattatgttgccatattctgtactttatcgagtaccttccattttaatatttcatctaatagactgtaatttggcactttgggtagtaaatagtgaattaaatgctgatgtggcttattagggcaagtaaatttgaaatcaagtatagtgatagcattataatgtgacatgtcatcagtttacagaagagatttctcaaaggaacacagagttctgaatacatgggtgttggtatcatcatagagaacagcaagtattcattattcatttaggaaaggaaatgtgtacctggataatagtttaaagctatatatatatatatacacacatatatatatgtgtgtatatatatatatgtatatatacacacatatatatgtgtgtatatatatgtatatatacacacatatatatgtgtgtatatatatatatatgtatatatacatatatatatgtatcattaacatcaaggctgcatgaaccaatttgctttgcacaaagacacaggagaggtggtatcaagtagtggaaggagttgtggctttggagttaaagatactcattcagattctatcatttgctagatataagccttgagaaatatacttctgtgggcttcaatgctctctactgtttaaaaaaaaaccttgaaaaattccaccttgcagcattgttttcaaattgtcaatttcaactggcgctcagtgaatgggaggtgttggaaatgaagacattcagcacataaataaggaagtaaggtgtttaagagtctgtatcactggacctatgggcagtctttctgggccactgtcaagcctccctttttgagaagctacaacagccacatgggagagtccagcgaccagagtggccgccgtggtccagataaggaaaaccgccatggattcagccagacttagagcaggatccgcaggcgaaccgttcttcctcttccagctatttctggataagcccactgtgtcccttcctctgcagagcacacctgcatctttgattccccaccttgaagtccttgtcctttcctagcctgagtcattccactcagctcaaaagacagtgtctgggcatcgtctccattggaagacagttcctgatgtttcctaaagttctctttactcccccgtcacatcctcatagcatgcagcaataaatagaaattaccctgtttttcaattatatttctataactattgttgccctcctccctttcagtaatgtaaaaaattttcacagtatcttctgtatcctaattttccccactcaattcgatttttgagatgaactggcagctgcctattaccttttactttttcctctctaagtgatacttttagtaagcaatttacagctacctccaaggtgaatttgtgtgtaacttaattacattcacttataccctcattataattacagtagcttaaaatccccatctgtggaacaaaagatgtttccatttatcatgtttctattgtgtataagctgtccttaatattaaacaccacaatactctcaaaagatgagactatctctggtaaatgctatacctgtcccccccactatctctttataaatgcctcagttaaaaatgatatgtttttaccattacgcacttttttctgatttttttttattagtccaaagaaataaagtgctaacaaatagctgggtggatgaagtgagtgaggccattaatattctatactgatagttaatatacattctcttttccacattacgtccttagacttcaggcataactccaagtaaaaattcaacagaataaggaaaactgcattcattagtagaattgtttttctttttcccttataacacagcacaattgcagatcaggagacacacaagcagacctcccagactcgtgggtcacacttagggggttattggtcaaaaatttctggatatctgctttctgagaaagtagcaagattttgctggcatttactttttgataattaaaactagatttttattttatcctataatcggtagtattctcccccactcagagtcataaataaggttaaatagtacaagacgtatttagtcacctaatgatgctgatgatccatctcagccaaaacaaatccttaaaaccaggcaaataatattaatctcacaaaagaagcaactgttaactagaaatggaaatccaattaaatacatttcctgaataattaaataataatgaaaacttgaggaacatgtacaggcatacctcagagatactaagggttcagtttctgaccactgtgtaaagtgaatatagcaatacagggaggcatacaagttttgtggtttcctagtgaatagaaatgttacatttatacaatgctgtagtctattaagcgtataatagcattatgtatataaaaacagcatacaaactttaatttaaaaatacgttattgctaaaaaatgctaacaattacccgagccttcaacaactgtaatctttttgctcatggaaggtcttgctttgatattgatgactgctgactgactaggatggtggttgctagaagttgggatgactgtggcaatttcttataaaaagacaacagtgaagtttgctgcactgattggctctttctttcatgaaagatttctccatagcatatgatgctgatagcattttacccagagtagaatgtattttcaaatttggagttaatcctctcaaaccctctcaaagccactgctttatcagctaagttatgcagtatctaaatccttggatgtcatttcaacaacgttcacagcatcttcaccaggagcacattccatctcaataaactgctttctttgttcatccgtaagaagcaactcctcacctgttcatgttttattatgagattgcagcaatttggtcacatcttcaggctccaatttaattctagatctcttgctattttcaccacatctgcgatgacttcctgtgctgaagtcttgaagacctcaaagtcatccatgaggactggaatccacttcttccaaactcatgttaatgttaatattttgacctcttcccatgaatcacaaattttcttaatgacatctagaatggtgaattatttccaattaacttttcccagttccattagaggcatccctacctatggcagttatagcctaatgaaatgtatttcttgaataataagacttgaaaattagaattactccttgattcatgggctacagaatgaccgttatgttagcaagcatgaaaacaacattcacctccttgaacatctccatcagagctcttgggtaaccagctgcatcatgaatgagtggtaatgttctgaagagtcatttttttctgagcattagggcacagtaaggctcaacagtggacttaaaatattcactcgagtatgccctaaacacaggtaccatcatccaggctgtgttgttgcatttacaaagcaaggtcagagtagattcagcataatccttaagggccctaggactatcagaatggtaaatgagcattagcttcaacttaaagtcaccaggtacatttgcccttcacaaaagggcaggctgttcttggaagctttgaagccatgcattgattttttctctttagctatgaaagtcctggatagcatcttccaatagaaggctgtttcatctacactgaagatctgttgtttactgttgtcaccttcatcgatgatcataaccagaacttctgggtgacttgctgcagcttctacatcagcacttgctgcttcaccttacatgtctatgcagtggagatggcttctctccttcaacttcatcaaccaacctctactaccttcaaatgtttcttgtgcatcttcctcacctctctcagccttcatgatattaaaaagagttagacccttgtctgaatcaggtcttggctcaatggaatgttgtaactggcttgaacttctattcagaccactaaaatgttctccacatcagcaatgagactgtctcacattcatattatttatgtgttcactggagtagcacttccctcaagaatttttcctttgcattcacaaattggctatttggcacaagaggcctagttttcaacctgtctcagttttggacatggcttcctcattgagctaaattattcctagcttttgatttaaagtgagagatttgcaactcctcctttcacttgaatgctcagaggccactgtaggattattagctggcctgatttcaatattattttgtctccgagaatagggaagcccaaggagaggaagagaggtgggggaactgctggtcagtggagcagtcagaagacacacattaagtttgccaccttgtaagggagcagttcatcgcactccaaaacaataagatcaaagatcaccgctcacagatcaccaaagcagataaagtgataaactttaaaatattgcaagaattaccaaatgatagagatagagtgagcacatgttgttggaaagatggtgctgctaatagacttgcttgatacagggttgccacaaagcttcaatttgtaaaaaaaaaaaaaaacaaaaaaaaaaaacactcattatctgcaaagcatgctaaagggaagcatggtaaaatgagctgtgcctgtgataccagcaaatatttattacacgctgcatttctttaaattgtcttatatggcgggtattactttttcctatttcacaggtcagaaagctgcaatgcagagaggagaaatgatttgtttaaggaagtagagtaagtaggcatcagaggcagcattacattagcttcgaagtctttattttcactaaaataccctgccttcccctcccttttgttgctctgtgtcccactttagtatgaaggggcctatgtttatatcacagtaaagtcatgacttaagtagttttagacatagtatttcccccctcatgaaatttaactcctgcagcctattctatttctttaacaaagacatacagaatcatattaattatctttttaaaaaacctgaaaataccatcaagatacttatggaactcacatgaaagtgaaatagggagtatgtccccattccctcaaggaattgagtaataaactaagttttaaccaccaatggtagcaggtttgcatgccacttcacccagataacataaacacaccagttatctgcaacccctgtacgcccaacatggtataaagcaaaaagagaaccatttaacagcttttatattagctagtcattccagtaataaaacaggaagacaatcatacataaatgtcaccacacaaaaactttctctattacttattaataaccaacctgataatatcattaacggcttgtagagctaattgcggtggctttttactgctccctttgatatgtgcactatcctgaggaggataacatctgttagatctaactcatcccaaacatcaaatgtgacaccgtggtgtttaaataacttgactgcgcgctatttcagcaggtcctttcccgctctcctttctcatcttcacaaggctgaccacaggcagaggccttcctgtgctcattactgagtttcatgcagacacgatggagtgggagggaaagtttattaccttcattctgcttgaatccatccctgactttttggtccttcacagatttctttgggaaaataaaaatgatatattgttttctgaacaaaaggaaattaatttcaatcttttaaaaaccaacttgaatgttattcagttcggttttttccctaaaaaaaaaagtttcagattccaaagtttttcaaaaagtaacttcaaatttcatctatgtcaaaataagtaaaataggtcctcttgtcctattgagaatgacaagctcagtataatcttggaaaaatcaatttctataaatgactaacccgccaattgtattttgattttttttaaaaaaagaggtgcctatgcagatgcaggatacatataaatatagagtcaaccatctcctagtgactcaatcattaaatatttagctgacttaaattacactgcatgcatggggactacagttaatgacgatgtattgtggaaaatgctgagagactggatggtgtgttctcccagcaaaatgctaactaagtgaggtaatacatttgataatttgctaaatttaaccgtgccacagtgtctgtctacttcaaaacagcacgtggtatataataaaaacatataattttatgtcaagtttaaaagtatatttatactaaaaattaaactcatttttaaccctatagtttatgtgaaactatatgttatgtaactgaaatattttcacctaatgtgaaatcttgtctctgctcctgccacaaaacagaaacatgagaaagtccactcgtacttgtcagaggtgggttctcttcatcttgctgattcctctggtgggtctggtaaggctgagcttggtgttccctggactcccagaatggtttgggtccagcactgggctggccctcaggaggctgccctgcacatccccgtgcctgtgctgggttccgccccagcctgtctgtgaaatatgcgtgtacgtacgtgtgcacatatgtgcgtgtatgcatgtgtgtgcgcaggtataagggacagagacagacagatgaacacagatggagaaagaaaaattggtaggttgtattgagattccaatcaaaatctaaaatatgattttatagtttcaaactcaatctaaaccttttttgcagggtaatgttttatgactaagcagacgcagaagtcactctcaaataaatatagactacgtcaataaggtaacattgcattcaattatctccccaaggcagaatccctgtcttttctaaatgatgtaaataccttgttctctgtgtccacaatttaaaatggaagttaattaaaaagtcgacttgagcagggaccccaaatatagattcatttatttatttatttttaagttacacaaaagtattactatactagggtgcacactacaaaatatgctaatagaatttttgaagcaatgatgtgaataaaatgaatgaaacattttagaaggttcataaaggcaacaagaattgaaaatccagtaattacacactaagaaaaaataagcaaaaaaaaaaaaaaaaaaaaatttctccaaccaaatgtttactggaaggctgtgataatttttatactaaaggttattattctcaacaaaagcttatttttttccttagtaatagttcttaagctcaatttacaagcacaaattctctaatcttattgtgagaaggctgttacgaataatttttgttgttcatacagagaaattgagaaacaacgataataattgctcaaattattgaagttaagaagaaaataaaaattaatggtctagtgtttattcttataaaccctcctcacaacacacacacacacacacacacacagagagagagagagagagagagagagagagagagagagagagagagagagagaaattttccacttgtctgcaaatagtccctaaggttcttagccaaggtgtgtacctcaaagtctaaagtatgaagacttaaaagtggaatcaacagagcattttatcatgaaagccacacaagtgtggtatctgaaatggtgttctaaacatccttcgaatgctgccttttcttcaccttattgccaggaaaagcacagaagaatgcgtcaggtggaaatctgcatgggaggacaagcaatgaaacaaggtggcctctggctgagtagatgcactcactcattcctccaaccagcgctgtctgtgctaactccatggcggaattcctctgagtgctggggaacacaacagtgaacgtgacagacaaggtccttgtaaaacacacggtctcgtggggaaggcagagccaacaacacaaaaatattctctgcaaagcagagaactgaggtaaactcgtgtggttgtcagtgactggggtgttattttaggagaaggctgaattcatgcaattcttgagttaattatgttcttcgggctggccctggggactgcagtggcaatggaccaggtttcattgcaggaggagggtgttggcagcgactctgggcagtgtggggctaggccgaggaaggcgcctgaggagacagacacccttcctctctgacctctagggcccaggtccagcttcccaagacacccagcacaaggaaagctccaatcgtcatctttcatttctatcaagagtgacacttacggatctctaacaacgtttctatccaattttgggtctctaactatgtttctatcctgatgaaaaaagccagagggtttaataagaaaatgaaaattaaatgcactacttcctcacttagcacacagcaaggttgaggggcagcttttctgagcctgaccctaggaatttcctaactcaggtcaaaaggtgactgactcccaagccaaaggtctctaaggacaggtgtgttaataacaccactgccatgggtggagctttcagaggtctccaaggacagatgtcttaacaacactgctgccatgggtggagcctctctgtgccacgtactgtgctcggggagggacatgaaccacctcaccctggacccctctctcttctccagtatctgcattacatgtgcccagggggcccttctctactctgctgggatgccagcatctggcccagcatctggcacagaacagactcagcccaaatgtagaatataaagtcgggtatgggggtctgatgccctggcaaaggaactgaaagacttacccactgtccagtccaaagtccctaaaagaaagtcacagaggccaagaccccagacactttttgtccccaacacccaaagcttcattttaaaatcctttcagttcctccagaaaaaaaaaaaaaaaaacaaaaaaacctgaccctcaattcttagacattttatgtaaatgaggagaaagtaaggtgctagcccttcccgatcacttcttgttttgaatggatgtgtgagtcctgccaaagtgcaggctagtttgtgttctccaaatgcctcctagctcagtgagggtggtgtgcgcagggctgggatgggccacacaacatataggagcccaaatagcaagaaggcagttggagcacagcttaatcctgttgaaagaagccaccaagaagagctggggcaccggtgggtgcaggtgatgagcaaagctaccttcttccctaggtaatgattgcccatggggaaataatcagtaattcttcatctaggaaaatactagttgctgttcagagcctctgactggaagtgaggcatttccaagtatcaaacaatgattaaaagaaataaaaaacctttgcatcttggcatgctcatttaagaaagaaaacaaaatagacgtacacacagcccatttgcattccctctacccagtctaaaaggtgtccgatgattcattttaatcatttaccaatttcttggtaaccagtgtgtattgcagcagatacttggcaaaagcatgttaatttgctactaatatctgtataaaccagacattaatattctcaatttacaaataagcaaccagaacttcagcgaagataagtaacttagccaagattatccttctaataagtggtaaagctggaattcaaacacaggcctagtggagtccaaagctttccccactcctcagtaaaaagctaaacaaacttcctaattttctgagcttcctacatactctttgcactagggtaacaaccccatggctggctttattgcagagtttctctgcactggcatttggcctttgcctgtctaattttggctagttgcataagattctcacttagtgcaggctcaaggtgagacagtatttttgttttttcttaggtttatctctggagattgccaatgcttgcaagaatagcaatgctatcattaacctaataatgttggattaacttcaagagctgggtaatagcgccaatgttcatttcccgtaaatgttggaaactcctttaacctcatgagatcctacataacgtgggaaagagtccagttctgactccaaaatcttaataattcactctttcgttaactgctttttaaaaattaaatgtataacaccaaatagtgaaaaataataataatcagtttgtacctaaatttctttaaagaaatttttagttttttaaagaaatctttccaatgattctgactttttggaggggaatgccacatggtgattatactgctaaggtatatatatatatatatatatacacacacacacacacacacacacacacacaccttatatatatatatatatttggatttttttgagacagagtctcgttctgtcacccagtctggagtgcactggcacaatctcagctcactgcaaccttcgcctcccgggttcaagtgattctcctgcctcagcctcctgagtagctaggactatagatgcccccaccacgcctggctaatatttgtatttttttagtacagtcggggttttgccatgttggccaggctgatctcgaactcctgacctcaactgatccacccacctcggccttccaaagtgctgggattacaggcatgaaccacaatgcccagccctgctaaggtatattaacggtcagtttagtattatttgactatttgttaacataataggagtaaaacttaacactttttagggtagagatggtacaaaaaattaaagtgtaataaatataaatctataaaaacagaagttaaataagaagaaatcttctggggaagaagaaataatagagtatagattattcttaacgtaagtcaaatatttgataaggaccacaggcaccttcttttaattcagatgctgaattttctttagtcctagaaagaagtgttgttagaattccaaggatatttggatgaaacttcgctgtaaactcacgtggaaactattttagctggccacagatgtgaaactaaaaatgttgaaatacttatttcaagtgcatctcgaaaatctgcaatgacttcctcctggaagataattttcttactacgcatgcttgacatggatttcgaacatctgcaatgacttcatccaggaagataattttcttactgcgcatgcttgacgtggatttcgaaaatctgcaatgacttcctcctggaagataatcttcttactgcgcatgcttgacgtggatttcgaaaatctgcaatgacttcctcctggaagataattttcttactgcgcatgcttgacgtggatttcgaacatctgcaatgacttcctcctggaagataattttcttactgcgcatgcttgacgtggatttcgaaaatctgcaatgacttcctcctggaagataattttcttactgcgcatgcttgacgtggatttcgaaaatctgcaatgacttccttctggaagataattttcttactgcgcatgcttgacgtggatttcgaacatctgcaatgacttcatcctggaagataattttcttactgcacatgcttgacgtggatttcgaacatctgcaatgacttcatcttggaagataattttcttactgctcatgcttgacagctgggtctccacactgcatcacttccaggctcctttcacacagccctcctggcattctgcctggaaatatgtcatatagcaagtttcacacttttttaacatacttgcaaaaaatcttaggttagtgctaacctaagattagtgcattgtttctaaaaggccaacgcattacatttttcctgagaataaatattgacaactccaggatttaaatagtgcacttggctaagattatggattttaggtagtctgtatatctttatgatattgtcctatgtattttaacattcttcacttttcttagtactgccatttcatgatttttttttccttttggatgctattgattagtacataaattccttggttgtacaccctgttttcattgctaatccagtagaagaaaagcaatatgcccaaaatcttttacaaaaaaaaaagctttcttgcatctgctgcttgcattctttgtgtgatacagtattttctctcattattgttggtcttcaaaggcaacaacagcataaggtctgctcaggccagagggcctcctgatatagtcctcatggagaccacacagagcctttccaagaggtcaaaggaggccagaagtttttggttctttttctcctaacttttatgttcatcccaggtaagcctccatctccaatctctgtctactagaatctatacacaagctggtgcaccagcttgcctgctctcacttgccttcctttgatgataccataatgtctctgattctacaacttaatttttctttcactcaagtctagtccagtagatacacattcctgttatggcaaaagatcatgtactgctatttatggaactgtaatttattctgtacttataggtgaattaggcaaaccaataatgccagcaaagcatatagattgaggccaacatttgcagtcattagacaaagtggactcagccactatttctaagtctttagtttggcctaatacctaatgttacattgatgccatactgtaagctccttgaagtaattttctacatttttaaaactcagcctatcattgctaaaataataaaaattctaatgcaagttgctctttatttctattacctgtaaggacacttgtatttgagaatacacacttgaaatgagttaaatataccaacatggatgtttggcttcaaagaccaggagcatgtcggatccgggctcactgctaagctttctctgactaggcatataaatcaacatcttcagtgcttttagggccaccatgcagcaattccatgatgcttggctcaagctctgcgcatctcacattagtcctcctttcacccaagctggctccagtaattgggtgactgttctggcagaatcatgtgctaccatttaaagtgaactagacaaccagttgatactgggtgaggataggagattcttttttttttttttttttttttgagacagagtctcgctctgttgcccaggctggagtgcaatggtgcactctcagctcactgcaacctccacctccagggttcaaacgattctcctttctcagtcccctgagtggctgggattacaagtgcctgccaccacgcccagctaatttttgtatttttagtagagacggggtttcaccatgctggctaggagttggtctcaaactcctgacctcgtgatccacctgtcttggcctcccaaagtgctgggattacaggcctgagccaccatacccggccgaggctaggagattcatagaggacagagaagacattctaggcttcatattgaaattgtaaatgtgaacccataaacaagtcaatagagatcaacttttgcatgcacgatcttatttactcttacataataccaccaactaccacttaactggaatgtcataatgtagaatctagacaatctttattaaattattaaattagctagaatcactcaacatggtattgtggtaagagtaaataataaattttatctagcaaatttatttttggatatacattacttcaaatagttgtgtgaccacaggagcatcataactctcaccggttttttcttctgggagacagctaataaacaactttactacaatttagaaaataatcctttagatttagttaaaattaaaaacatttcatatactggtagctcaaataaaattttggttgctcactaaaccatattatttctcagacatgattatatggtcattttgattacaaaagaaatacaaagcaaagtttatttggaaaccttttcaaatgtttctacattgttagcaaagcattatatattttcaaaagtatccaaaattttttttgttacactgtagtaacttataatctagcttgtatttcctattttcccataatattaacaaacatttacgtatttgagaaagaattccttgaagcataatgagaatatacttgttcaaaaatctcgctttcatgttttcattttaggactataaacattaggtagttcagaagaggaggtgcaatgcaaaaggtcctctgcaatgctagggagctctgggcaaagtgagagcgttctgctttcccttagagaggtcctggcctaaaatgaacacgtacttccacgagcttcgggtgtgatacagaaatatgtatgactctatgtaatccttatcatggcgttcctaccaactcaaacatttttaaggttaactgagtactcgatgtaattgtaatacatccacctagtcactactacaagatagtctgtgtggctgcaggctatgaaggatagctttttattttttccttatcaaggtaatatttggaacacttcaaaaaagccatcacagtgccattatagatgaaaggcttcccggtagaaatttcatttcctatacctgtaacaggctttcctgcagaaatgatagcatatgtgatacatccaaaaggcttatctcatgaagtcccagtgaaatgtattaattttgcttttggaaaataaaaacatcactaatttactgagaactctgcaatgcagtgtaaattctgtacccaagaagtagagctcatcacttaagtgaatagaaaagtagcctatagatgttactgtggttatgataaaacacttttaaatcctgtatatgtttaaagtttaaagaaaagcatttgcatctcgttttcctagtgtaattaattggaccttgaatgttgtatgtttccctgtgatatttgaatgaaagccaggggttgtcttattatttgccttaatatctatttgcagtaaaaagctaacaaagaagtgtccaaatttgcaggtagtgaacccccatttaaaagatatactatctcaatcaactcacctatgtaactttattaatataaaaagagatatcctggctgagggcagccagaagttactctgggataactagccttcaagacgtacctcttggtagtcatactctagcataataccttcccacaatgaattatggctgccctgtgtgatcaatacaatataacagcagtaacaatatgtgctagattatataaaggaatgcagctgccacttgaacatttggattgctcatccaggggaagccagctgtcctgccatgggaacacagacactgtcctgcagaaaggtccaaacagagaagaactgaaggcccttggccaacagccagcatcaatttgccacatgcacttcagtttgccacagtgccaaccacattggaagtgaatcttctatcatcagttaagtcttcagatgaatgtagctcactgacatctaactgccattgcatgagatacccaaatcaagaatcgcccagcagtctctccacaattccagacctacgcaaaccatgaaagataatgcatgactattgtcctaggccatacgttttgaagtaactcattatgcagccatagacactgatacaaacgccaaagttacaagaaattctcctttgtttgcaaaaaaaaaaagaaagttcttactccagatgcccactgtcacctggggttgttgtgtggtttagcagtttgaatttcaaggtgcatatgctttaaaataaagggctggctctcaggcctagtctgtctagctgagcatacatataggactattattatctgagttattaacatttcttcaaacacagcattatccagtttaaattctgtcttcctcagtagacactaagttgtagaactcaggcactgtgctgtacccaatgcaccaggcaccttttctggtatacagtaaaagctcagtaaatgttggagacaggaatatgtcattcatatgtgaataattaaatgtagacaaagcgaatcgaatcatttcttgaagcctaatgagttctgggcaaggccttaagctgagttaagagttactattgcagagcttttgttttcacttccaggcagtccttggaatgctgctgggccattttgtttgtatatgtactaaaccagctgggattgtaggagttttagaatgttttgaaagaataaatttctctgaaatgagaagtggattgtcattttaggattcggagtagttgaggatgtgttcctcgtgtttgaacaggagtgcagtcagcattagtgttgtccagccctccttgctgccccaccacatagaatatcgagccagctagtccctttgtttttaggtgggacgtgtcactagttctggctaacaaggtggaacgatgggtatcacttcccagccagagcataagacgccaactcttccctgcctttgtgactgtggcaacttgtcatggtggagcctcgtgacaaggaccttgtctgtcgcgttcactgttgtcactcagtcagcctggagcccgaggtcccacatcgagcagacccactctggacccgtcgcttgtgttagaaaacattttttgttgttgtgtaaagccactggaactattggcacatttgttacagaaacataattttctgtgctgataaaggccagtgtaagatcgatataaattaatcaccctcccatatgcacatgcacacacacacacatttatacaaaagaagcaatcatatttactgtgtttttacctgcccagaattcttctccttttttggtaagaacaacttcactgacttctgagaaaccacaagtctgatgcatttaggttcaaggtgggctaacttatcccctaaacacacaggcatgaacacacacacacaatatacacacaggcatagggtttgactagggtgggcctatccacctgtttagttcccatggccatagtggtgttggagatagtatgcaaccgaggacagcgcaataagggtcactcctatgacttttgctggaactattaagaaagaggccttctcttcccactaggcttgctaactgatagaatgtaagcctgaagcttatggtgcctttctgtcaccaagaggacacagctgacttaatgaagtaaattccagaaaatttgcttaattattgttaaatgattctgtgaactctcttcatttagcaactgttcaggaaggtaagaaaaagaagcaaactcgggaatatcaacagatttgagatgtctgaattaacttcgagcacctggattaagtcatgtctaggccaacattaatgccaggaactcaaatatttaatccaacaatctctctttttttcttacgccagtctggctggatttctgcttcttgtaattgaaagagtcctagctaatacatcttctatatgcacacggctgtactagatatttggaggtagatggaaatgcagaagccgaagacaagcaaatataacatggtccttgcttcagaaatttaaaatttgtttacagggacaactataataaatgaaaagctaaacgctccaatccatgagctcttccagcagcgttaaggaggtctagaaaagctacttatttcctgcactgtcaccgctgacattgagtgttagggaactccttacccatttttattgaggcagaagagcacactcggcagtagaaatgtaagattttggccggtcacagtggctcatgcctgtaatcctagcactttgggaggccaaggtgggtggatcacttgaggtcaggagttcaagaacagcctggccaatgtagtgaaaccccatctctagtaaaaatacaaaaattatctgggcatggtgactcccacctgtaagccaagctacttgggaggctgaggcctgagaaccacttgagcctagtacctggacgttgcagtgagctgggatctcaccactgcactccaccctgggtgacagagcaggattctgactcaaaaaaaaaaaaaaaaaagaaagattttctcaaatttgtggaaaagaaactaaacaaaaattcactatgaatcaatttactataaaagttctatttaacacttgcaacataaagcaaatactttaaaattaaaaatcccagagtgctatgtaatacaaacatgaaaaacatataaaaggcttctagtatcatttcctaactaacatctggcttactgaataaagctttataacatcaacttcatttttccacagttattatcataggtagttataatgtttttcttaaaaaaatgaatatcaacacaaatttgctgttataaagagtaagacaacttcagccagatctttctctttttgttttttttttttgagacagagttttgctcttatcacccaggctggagtgcaatggcacaatctcggctcactgaaacctctgcctcctgggtgcaagcgattctcctgcctcagcctcccaagtagctgggattacaggcacccagcaccacacccagctaatttttgtatttttagtaaagactgggtttcaccagttggccaggctggttttgaattcctgacctcaggtgatccacccgcctcagcctcccaaagtgctgggattacaggcgtgaggcactccacctgggccagccagatcttttaacttcatcaggatcttcactttattttcagggaaacaaatatgcaaatctccttttctctacagtaatctgtgtgtatattacatgatgtggcaaatgatacattcctgcttgccacaactaattttcactaatttctccagatattctatttaagagggctattttctaatgggcaatctttaatattgatccagtaatttaccatacagactcaagaaaaagaaactgaagatgtaaatttttacttcagcaaaataccttcttcacatgacttaaaacataaacatgattatcaggaagtattatgaaaaatgggactatgaaaaatgggacaataaaaattctcctagggaaacttccatcaacaagaggggacggaaaaacagcattttctctcaccaaggaacaatcccctccccattttttttcatcttgttggtgaaactctaaaatgaatgtgaaagccacataagcaacagcaattgggtaggaactgtggaaggaagccagagatattgtcatggagagacatcttcctgaaagtgaggggaacactgaggggtcaaaatcagaatggggtaaaccaatgggtggatagctccactagaccaaatttggtttagagtaacagaggaggcaggtgaaaattaataatcacacagcaaggccacggttggaagaagcagtctgtatccatgaggcagagagtaagaaagtgagcaatactagaatagcaggtggactactgctctacgccccaccacatacaggacacccctccacaatacatgtccatgaaacccaagtattcaatgttgaataacacatacacacacacacatgcatgtatgcatgcatgcacacaatctatacaaacatactacaagaaaaagtctatttatagactaagaaatctcatcagaaaaatgttgttactcaacagaactctctggcaacctattctagtaagaaatgaaaaccaaacaatgaatcaaccaagcagttgtgtccatgaaacaagacaacagagcagaaatacaagagctggagacataacagagaaacttaaggaacaactgaaaaaaaaataaaaataagatgtgaagtgacacaaaggtacaaactcactgcaaaaagcactacaaggaaaaagatagaaaaaagaacaatgagctaaacggcctgtatgatttggaaaaaaaagaaatcaaagaagaggctgggcacagtggctcacgcttgtaattgcggcactttgggaggccaaagtgggcggatcaccttaggtgaggagtttgagaccagcctggtccaccatggtgaaaccccatctgtactgaaaatacaaaaattagctgggcatggtggcaggtgcctgtaatcccagctacttgggaggctgaggcaggagaattgcttgaacctgggaggtggaagttgcagtgacctgagattgtgccactgcactccagcctgggtgacagagcaagactctgtctcaagaaaaaaacaaacaaacaacaacaaaaaaaaaaaacaaagaagatttgaatctacatatggaaataacactttgtaataaaaggaaaatgacctgtagacaacaccagattataacttattaaaatgatcagtttgtggtttgtggagcaaaagaatcttctggacagccaagcagaaagatcaattcacttatgtggagaaataaatcagacttgcctctgactttcccacagcaacatgtaaatatcaaaaaaaaaaaaaaaaaaaaaagctaaaatgacaccagtaaaaaacacaaggaaagagtgttccaagaaaagtaatacagcatgttgaatattgttctcaaaattttttggaaaaaaccgaactatcattagcttaataatagaactaagactgaaatcattgtggattttagggtaatggaaaacagtttagtgcactttgtcctgactgtaaaacaacagcatttctttaaaatgggaggtgaaccagaaaaggtagatgggtgggaagcagaggaagtacatttcttaaaacagaggatacatcttttctcaaatgcttatggaacagtcatttccttgaagagactgcatatcaggccccaataaaatatgaattaatttgaatgagggaactactatatacatcatactctgagtacaatgtaatatacacttagaaattaataaagcaaaaataacgtgttattaatttaaaataattattttaagcaattcttgaataaaataggaaatccaaatgagaatcacagaatatagtaaaaacattgatgataatggaaacgcaacacaaggcaacccacgctgtgcatctgaactgatgctcagagaaaaattcatagttgcaaaagcaagtgtttttaaaaacaaggaataaaaagtatgttttcatgccaaaatgtggcaaatggagacagaactacgattaaatatatataaacaacataaccataaaagtcagaaaaaaagaatattaagaaaaaaatagaaattgctgaatcagaaaatgggcaaaaagagcagaaacatcaaataaactaaaaagctagttcttcactgggaaaaaaaaaaacctatgcagatactccttgacttacaataggtttatatcaccataaattcattgtaagttgaaaataccataatctgaaaatgcatttaatacatttaactatggcatatcatagcttactgtagcctactttaaatgtgttcagaacacttacattagcctacagctgggcaaaatcatctaagaaaaagcctatttttataataaagtgttaaatatctcatgtaatttattgaatactgaaagtgaaaagcagaatggctgtgtgggtagttcaattacggttcctactgaatgcctatcacttttccactattgaaaactcaaaaaatcatgtcaaaccatcataagttgagcatcatctttaagcaataaacttcaaactaatataaggaaagagaaagaaaatatacaaaattaaaataaggagaatggtaaatatgagggaaagaactttgcacaattctttgtaaatttattaacttgaagtaaatgaacaactttataagaaaatagaatttatcaaaattgagtcaagacaggaaatctcatcagaccaatttccacagaagcaaacagttattttggactcgataactttttaaccagctttaagcaacttctagagattattctgagtatttcaaaccacagtgttgccgggtgaagtggctcatcccagtaatcccagcactttgagaggccaaggcaggaggatcacctaaggccaggaattcaagaccagcctggccgacatggcaaaacccagtctctaccaaaaaacaaaaattacccaggtgtggtggcacacacctgtaattccagctactcgagaggctaaggcactagaatcgcttgaacccagaaagcagaggttgcagtgagctgagattgcaccactgcactccagcctgggtgacagagtgagactctgtctcaaaaaaaaaaaaaaaaagtttcaaaccatagtgtcattccgataagcagtattattccagcgtttgccaaccatgctcaggcatggagagttaaggaaattaatagccatatgtacttttctccaaaaggaatctatcggaacacaaggccgttcccacactttccacttcccactcacagttgcccccctactccctcacggtaaaacaaatgcagaagtctcactcttgagggctcttagcttaattcattgtctcggggtataagactttaggctgacccccaaaaaaggaaaagttaaaatatgtgtgtccactcagcctcctttaactaaagcactatacaataaatcataaatagtaggggtttgtgtctttccttgtcatatatatatatatttcttttatttcctttttttttttttaagacaaggtctttctctgttgcacaagctggagtacagtggtgtgatcacagctcaccgaagcctgaagcctcaaactcttggcctcaagtgatcttcctgcctcagcctccttagtagctagaatgccatcatatctgagtgattgttttttagctttcttagagacaaggtcctgctgtattgcccgggctggtttcacactcctaggctcaagtctcgggctcccaaagtgctggggttacaggcatgagccactctgcctggccctgtcatgcatatatttctgttaagggtatagggatatctggccagtgttgggatggtctggactcagatacccatgaagatctcatctagtctcaaggctttaaacaccgtctggattctcactcccagatttatatcttttccgccttgctttgttctcaacataactggccaacttcttctcaacattggtttacagcatgtccatgaacgtgaaattctttcaactcacaaggcccaacaccatctggcgcctttcgtcacttgtagctcgcctccagctctcctcactcactctggcctccagcctctcctgccagcgaatgcttgcccccttggagctttgggcttgctgctcctttaatctcattcttccccatgcagccctgtgcctcactccctcacccgggctgcgtctttactcaaatgccttcttgtcaaagaggtcgaccactccgccttatttagaactgcactctctgcttcctatccccagcgagttttatttttatctacagcatatatcaccatctgaaataccactgtgcatatctgatggatttatcttgtctgtcgtcagccttttctctttaaaaggaggctccaagagggcaccggtgattcctttccattgtgtgaagctgtaacccccacacctaaaacacagcctgacacaggtgtcagaaatagttactgaatccctggaatcatcaccgtattcctggattcaggaatggggaaaaaagtgttccatctgaggacagaactggatcaagttccaaagcagcctcaaagtttggatgggattggagtggggagtgacacaagtcgttgtaattacatgggcggggaaatcatggagttttgtgggaggaaggccaatgtcagaagaacgtttcagggaaatgggtccaggtggctcacttatcatcattaaaaagctatgcaagtttttacttctctttctcctctatccataaagtcctggtggtgaaggcttacctgtttttttcatggcattaaaccgaaccattcacttcatgattttgcctggtatcccagtaggtcttccctatcctaatacataaaatagaggttggttggcaatttgctgcttcatctgtcagtttagaaataatcctttttggccgggtgcagtggctcatgcctgtaatcccagcactttgggaggctgaggcaggcggatcacgaggtcaggagttcgagaccagcctgaccaacctggtgaaacccccatctctactaaaaatacaaaaattagccgatgtggtggcatgtgcctgtaatcccagctactcaggaggctgaggcaggagaatcatttaaacacaggaggtggaggttgcagtgagccgagatcgcacgattgcactccagcctgggcgacagagtgagactctgtcagaaaaaaaaaaaaagaaagaaagaaagaaagaaaatccttttttcttttcctcattagcaaagagctcagtgcttcctccaaaaggatattgggtctagaaatttgccaaatacctgtgagcatgtcctttaggattccaaatagtacactcatattttgaaatttggcaaaggcttgaaaccaacacttatgggtttttggtttgtttgtttcactcttgttgcccaggctagagtgcagtggtacaatcttggctcactgcaacctccacctcccaggttcaagcgattctcctacctcagcctcccgagtagctcggactacaggcgtgcaccaccacacccagctaattttgtattttgagtagagacggggttttgccatgttgggcaggctggtctcgaactcctgacctcaggtgatctgcccgcctcggcctcccaaagtgctgggattacaggcgtgagctactgcgaccggccacttctgattttttaaaaagtgaacatagagccacacaccaagtaaggaaatacttttagcagcatagaatccaacgcttgccttccttcatagatctctatatacacaaaatagaaatgaaaccaagcactaggcctatattattaatgcaagaagtgtttgcttgggattggatgagcaaaaatgtcataaaaacaaaacaccatgaatgtttcacaatatgccccgctcagaggtcagcccctccatgtgtcctgcagagctcctgaagcctttaagagacaactcaaaaaaggagtgaggcagcctgttctgacacttggacgtcttccaacgcagactttcagtattatttttctaaacatcctaaatctctagtgagaacatggaatagactatttctgtaatggcagatcttacaaaagagaaacaacttcccgaaaacatgcctatgtccagtcacagagaccaagcatcaaaatcacctgcaggggtttctctaagtcgccctcacacatgcttggacatctgtatgaattcaatgcacagtaaatactcctttgagggtctcttatggacaagacttcgagagaagaataagatacattctgcctccaaggaactcatcatctagtccacggtgtgtggtgatgggaatgcagatgccaggtgctatgaagtgaaccgtgtcacccccaacatttacatgctaaagctctaaactcagatacctcagaatgttttgggggacacggcctttaaagaggtgatcaagttaaaatgaacccattagggtggacccgaatctaatctgaatggtgtccttataggaaggcaagattaggacaggagagatactggcgttgcaggagcccagaagaaacgctacgcgggggtgtagtgagaatgtgccatccgcaagccaaggagacaggcctcaggaaaaaccacctgctggcactgtgcactcagagtaaaccccgagtgatctcagagttctagactccagacctgggagaacatataaaccacgcagtctgtggtatggcggccctagcaaactaactcacctgaatgtaaatatacaactacaaagcaacaaataaaaagatggcaacaacaagcaagcaatggaatggaccctcctgctgggctgaacatcaagacagggatttagaaccagctttacacaaggagcatcatttttccctaggtatgatttttatccaattcactttgattaatgacagctaccatttagcaagggctttttatgtgccaggcaccaaactcaacacttttcatgcattcacttactcaaccttcactgcaaccatgtaagatcgttgccattgttattccaaatggacagatgtggacactaaaacagagaggtaaattttgacctttgctgaagtcagatggctgcaagagttggaactagagttcaagtccaaagagtccaactctagaatccttagaaccactgtgcatactgcatgaacagtactcttaccttctctagtcaagagttcaatgtgaactttattccagaaaaacacaccattcaacatcttcatcaaatattataaagaatgcagtacttagatatagactctctatgcagcatttcctagctacatttgacctctctgtttcaatgtatctgtgtagcaaatattctatgaaacacaatttcttaattattgacctcgttgtgtctttaccagcactgtgactataccatgtggtgtgagagtcactccagtgaataaacacagactgaggtcaagagtctaatcattaccaaggccctgggaaccctccttgaagagaagagataggagcgcactatccaccatgaaaagttgaggtaggtagcaaagtcagtgtctacaccacccgccagcttctcctcccctcttccacacgggtgcatggctgccaccacttcctgatgggaagcttttcagaatacagataacatcctcactctcctgcctccctccccaccccagtatttttatttagtagatctggtatggctctaggaagctattcttgaaagtttaataatgattccaactttctgccaggtttaagagccataataatgttgaccaaaattgtagattttccaggatactctaagctttgataattttgtgcggacagttactagatcatgtgatctaaacgagggttggaaatacccccatttatattcccaggcagactttcccttgcccacttccaaagcaacctagactttgggactactctattccctcactgctcttgccctcactcacttaaaatacttttatctaatacaaaggtgctagatgttgacctgattgaagtagagctgttaagaggtaactgaagcttcagctaaataatgccagggggtaacattgtccagggaaactgttcaccagcagacctctgttgctcctgatgtactccaagttattttcagtttagcctttcataacgttgtacaaagaggctttattcataaaacagtagctttggttggcctcccacatcgtgaaaacaaatgtaatatagtaattaagtgtgctgatatgttatcattgcaaatgtcaagttcattgtagcagatgtgtcaactgaagatcactacccattaaaatcaaacaaccagtaggccccaaactcaccatctgatttcatgcgtcaacttcaatgcttaagacagtcaatcacaactgtcttccatgtaattgtcttaaaattattacataacaaagaatcagatctcaattcttatcacctgctagtcataattaaaatgtgaatgaagggctaatgactgacacagttacagggtataaaatactttcacaattttacttccccaaatagatggcattattattaagaaaaattactcaaaatgtgaaataaggaaaaaaacgactgatgtgttaatgtcttgctagagcaaagctcactaaatctccttgaactctctagagaaatgtaacttggttaaacttactacattttctattcatttgggcccaggtattttacacattttaaagtttgggttcctaatttaaaaaaaaaaagtgataaaatcagatgactaatatttttatcaagttaaaaagttttattatccagtaggataataaattagccactatgatatctacatcttttcaattttatttcagcatttctttttcatctgactatataaaattcctactctcatatcttcttttgaaccagttttgtcatcctgctgattccctcattagtagtcacatggatcttatgaaaataaatataatatcccattagaaacatatctgctactagtcggggtacttacataaagttgcagcaattatcagaaaaaggtaatatgcaagtctcctctaaaatttcccaactatattcagaaaaaaaaaacaaaacaaaagcttaagtgactgcttaggtgaaaataagacttccagaagaatgtctgtcaaagttgtaccaagaacattttgaaaatacaggttaattcaaagaagcactcacaaaatgccctcaatatgattttgagaggaattattacaagtggtatgtattcttgaaagccaggtttagggtacatctctaaagcagaataggttgttttcaaattgctaggtcattcaaggcctttaaaccactatattctatccataatttgcaaacgtaccactaacttacactaaagagatagtgagaaataagttcttgtggaagcaatttacacatacagagttgactataaagtcctaggcactttggcaaacatgcttaggggtggaaagtttcttttttggtaaagatcccatagattactatttacattttagcatcatctaaacaatctggaagctcctgaagctcatgtctcatcttcaccatggacacaatcacatattcttactctaagcatctctcatttttattctagttgattctcattcttcattcttcgtaaatgattataatgaatcctctgcctcttccttcccctcttcttcacctcactttcccctcccctcccagctttccctctgccttctcctcccctccccgctccttgtcttccatccctgcctctcccactccccctgtctctctgacactgttgtctccaaccacacacaggctccctgggtttctttcacaaataaaggaacgatttgcatagatggggtaatgtgcatctgcttttgtggtgtaccttccattcttcctttcttctgggaatagtaactccctcccttttcttttcttttgtattttttttttatagacagtgtctcactctattgcccaggctggagtgcagtggcacaatcataactcatgacagcctcaaactcctgggcttctgcgatcctcctgcctcaacctcctgagtagttggaactacaggtgtgctctaccatgcctgccatatttttttttgagagggggtctcactatgttgcccaggctggtctcaagcttctggcttaaagtgatcatccagccttggcctccccaaatgctggcattacaggtgtgcaccaccacgcccagacccctctcccttttctgtagcacaccccaccctcaccccatgcacttttgcatgattatcaatatgggttgaaccacatgaaattgccaattttgtagatcaaacatgatagaatattagcaaatagaatcatgagattgaacatatccttttaataacactaacgtattcagtattttatcaagcatataatttaaagttgtattactagttataaatttaatatttacctctttcaagcccaagcacaaaatatttggtttgtttaaactacatcatgtaggatgaaattaatacctcaagtgggattctcaacacactaactagaaacagctctcagagaagataattcaaagacgaatttaaaatcaatcccacagcaagtaaaaccaacttttttaccaagtagttcagtcacatgggagcagcggaatcagtgtgacattttcttttcacgggatatgtgcaaccatgctgtttaaaagggaagaaataagataagctgattttatttccaccagtgaaaaaagttttcaatacagcagctttcatcgactcagcatggctaacaaaataacattatcaatgaaaataaaataatagatcagctgcacaatctaggcatttttgtttttagaggccttctctaacatttctctgtagagatctgtgaatgcctggttcctgtgaatgaaaaccaccctgctgttttttctgctcctgctgagagacttgcaaagaataaaatctttttttttttccagctggagatcaattggtttgaggactgctctggcccccaggaagtattctttgcccccatggggggaagagatcctcagttccccaccctgaccagagtttgcccccattggatagttttcaaagctgaatccagaaacagacctaaaagcatatccaaaaaatgtgccactgaaaaacagctaacgattcacatggaaagtccacaccctccatctagccgggtctcctcctgcctcccttggggaagaagggggagaatgccctttccaatttcgctcgactgaaagcaagggctgtgtctgtcccccttgctgaaaagcctccttttgtttttcttttctactgtcaggaagcctgcctcagaggagtggacaatgcataccaatgaggaaaggagagcagaggtgattgaaagtgaagataatttttccctgtcatttacaggctgcttctcaaaccatgccccttttgtgattccacttcaaaacacattcttgccaactctcatccaggaggcttttccttagtgatctgctccactatcttggagtttggcttctgttatcacctgaggagctgaaaagcgttcagattcaaggaagcctctcctctgcccaaatcagcagaatttaaggctcatgaggatgaggactgtgacagggaagaaggaggtgacagggaaaggaaatgatactttagcttatttcattgttgaatggagcaaagttgaaaatgattcttctggtgtctctccttaaatcttggggtattgatacagactcatacaaaaatgaaaaggagagaaatgaacatattcatatagtcctttggggtttcacagtgatctacctacagcgacatgttattttaaattacaataatctatttaaagagaaatatggtggaatttacttttaaaaaggttacgttgcagggatgttttaaaagataaaaattaaatggcaactcaaaaaatatctgtcaggcatttaaaaatggatttcaagacaagcatttgaatcctactttacaagaagtgactaggttaattaggaaaataaggtatcttctgataacagtaaaccttgagatacatgtgtagctcttataccggaatgaccatgaatcactaacaaatttactttctagacaaaagatggaccacttagacagcacagtataagaaacaaggaatgttaaatgaagcttaacatcatgtaacagatgttaggttttctcctctcccccaaggaggactgtaatactgttggagatgacacttgtcaactgtgcaatgtgtgtgataaattacagaagcaaaaacataatattattatttaataatccattttaaatatcactgtcatttaaataccacctgtaagaaaagttgtataaatttggcaatgaaaaatacacaatccagaaaaaattacaattaaggatcaggtttttctttgaatatagttataatttttaaaaatcccttatcacttttattaactataattattaggagactggagacaaatataaccattgaagcaaactgagtacctttcaagggccaccgtctttttcctctaacctcctcaggctcacatccccacctcaccccaccacatttaaattactttaaaaacactaaaaaatgtttcctatattagaaatttgaatctatcaaccctgatacttctttagatcctggaactccctttgctttaaacacaatgtccaactattgagaaagaaatttcccataaagaaaaccatagtatttctttggtcacagctgagaggcatttttttttttctgatctggaaaacaacaatcacagaaagcaggttgtttgcaaaatgagatcttaatttacttaaaaacagaatagtaagatgaacctactaaaagtaacaccatagcactgctacaaatgatttacagttgttcacattactgccataatattggaacgataaatgacatgccaaggggctcaaagtaaatttctggagttgaactgcacaaagcaaattgctgagtttgtgtcatatcctaccgtgaggatggcatatctagagcaaggctcaatctagaaggtgtctggactgaggattctagggtacgatgaataacaaatggaacaaagatgtcacccacaggaagtggggactacgggactcactgtggacacctaagccaccgcctccctatgcgatgaaaatctgttcttcatagcaatccagtatacattcaaacaagcagaagaacaacacggggtaagggctacttaactaacttatattatcctattttccatggaattccagcaatcataagaaaaagttccatcttcttggttttgaatgttttaaattaaaagaatttcccttcccaacactacaaatatgtacaatgacacattaaatacaactgtgctttctaaaacctgatacttgacagagagctcttcttcaaagctcaactgcaagttaaattttactgcttatcttttgtttatcaccaacaagaaaaaaattgagcttgagaactgtaagcttataactgggtaaattatgttttgtataagaaatacaagtatccatatttggattacttttgtatagatgggatatacaaaggtgccgacattacaggactgaaaaaaagagccaacttgttttgcattaaaacatttttttaaactttcaaaacaataagagactagtggtctcttaaacacagtttaatgaatttatctctggcaatgtattgtgatatgtttgtgtgataaacctgataccatgaaaacatgaaaataatttctggaatgtttcatttcttaagcaaaaatttcttaaatatgaaaattgggggcttcttctgtgcagtaataggtaagaccagtctggtctgaagcccatatcaaatatttcaacatttcatgcctatataattggctttaaaagactaaaaactctctgtacagtctgttttttttattgttgtttttctcagtccttaatatcctggagtcagaacaaatgaagaagccccatcagcttcagaccacgacacacagcttgcaagagtaaatgatttatggagctacaagcatgagttatgagggagcggtctacatatttgcgttgtgtagctatgcagggggaaagagacaaatgagattcttgaaacatttgtgaaatatagaaaggaagaaaatagaaaaaagttaataagctgcctcagatagtaactaattagatagcaaggtattactgacaaaatgaaacaagaacaaaaggcaacaaaagttggtttagggccaaacattatctgtattttcacttttggatctctactcatttcctttttttccatttcattcaaaaaactattgtgcaaatcaccattctattgtcttctaacattgccgctattttcactggattttattcaatttaggaattaaattaaaagtttcaacatttccagtcatgttattctttcatgttttttgccttaaggagtagaccatagacatcacctattttaatagtttcatctagtccagaatcggcacttggagcttcaagctgggggttagggagaaagcacagacacaggcaggctgctatgctgggccctaagggcaatgtcaaactcaagattgcagatacaggctgggcgcggtggctcacgcctgtagtcccagcactttgggaggctgaggcaggtggatcacttgaggtcaagaattcaagaccagcctggccaacatggggaaatcctgtctctactaaaaatacaaaaaatcagccaggtgtagtggcaggcacctataatgccagctactcgggaggctgaagcaggagaattgcccgaacctgggaggtggagactgcagtgagctgaaatcatgccactgcactccagcctgggccacagggtgagactctgtctcaacaataacaacaaaaaagatttcagatacagagctgttggctttaggaaatgcacagaacttactgctccataatacaaacaaaactttaaaagggtgatgactgattccagattactcttgcttttatcttaagctaatctctgtgttaggtaaggacaagcaggtttgaacggctgttaggacaaggcatcattgtctacaggtgttatgatgaccatgaagattagaaagtagtgaatctgccgggcgtggtggctcacacctgtaatcccagcactttgggaggccaaggcggctggatcacgaggtcaggagatcaagaccatcctggctaacatggtgaaacccctatctctactaaaatacaaaaaaaaaattagccgcgcatggttggtggtgcctgtagtcccagctactcgggaggctgaagcaggagaatggcataagcccaggaggcggaggttgcagtgaaccaagatcgcaccactgcactccagcctggtcaactgagcaagactccgtctcaaaaaaaaaaaaaaaaagtgaatctttgaagttttaaaataatgctatctatggatagaataaaataatcagaatggaaagtgtaaagatgacatatatatagtgagcattcttaaaactgattatcattgatgtccatctattaattaggctgccttacaaaggaacggattttctatcactggaggcactgtatatttttataacttgttcccaaacttatgattttacagaccagtaaaatttctgttcttttatttaagaaaattaagatatctgatgctaaggaacagttaaaattttcactgatttctgagagatggcaaaatgctagtaaacaacacctcttcaaaaacaataggattctacttccttcacttctgaatgtttctgaaatcgaagatgcggcagaaccatcaattccaggttcaccttgccggcaaccctgcgtaatagacttagcgtagctacaattggttgtgcctacgcaaaaatagccaactggggaaagttatttggactggtaacactagaaactatttaaattttaacacgagtgtcacaccactttgtttaaatgtgttcaaacagaagacacaatgtggcaccgaaatgcagcaattgtgtggaggcaatcaagtatcacagggcagataatgaattcaataaaggcagctgaaattgccaaatcttcaaaaggtagaaacagatcgtgtgaagagtatcactcatgtatctaaatatctttatggtgaaagcttcctactttaagagtagctgttcaacacttagtgatatgtgattaagaggtaattaagaagttaagaaggccaggctcatggctcacacctgtaatcccagcactttgggagggtgaagcgggtaggtcacaaggtcaacagatcatgaccatcctggccaacatgatgaaacccgtctgtactaaaaatacaaaaattagctggacctggtgacacccatctgtagtcccagctacttgggaggctgaggcaagggaatcgcttgaacccgggaggcagaggatgcagtgagcccaaattgcgccactgcactccagcctggtgacagagtgagactgtctcaaaaaaagttaagacaacctcaaatttaaataaagaaatgtatttttagaatatattattcagactattctgactaatgggagatcttcataggtaatactcagcaacactcgttaataggcatctctccatttgaaagactgcaaaacgctgaattctgttgtttagtgcactgaattttaatcatttaaaaattgtgatgtctttaaatcaggcatgccatctccagttctcagtggctccactactttccaatatttgacctccagtatcatgctttaaaataccggcctggcacttgtggacatttgtgctaatggcccttggtttccatttataccactgccataacaatgacaaaattgtcgagggtgagtatttgtttgcacattctgtcctattttcctaaataatatattttttaaatcctcatttaagtgctttccatattttcccaccatttgaatcccccagaccccacctctacctggtgacattcaagataatcgtagcagagcagctttagctgtcaagaagtctgtcctttgctaagaggtggtaaggatggttaattattctgatcaagtctattcggtctgtgccaagaagaaaactatgtttctggaggtaggatggaagcaaagtcactagatttccttccttctccttttcatattccttacaagttgctgagtaagtatattttatttggaagcattttgataaattcaattaaacctgctgccaggctgtaagaatttttctgtgtgtagtttgtgggcagaacatcatcaatcagttttctccaccatttttggtttctagactattcctgtagttaaataaaaagtatatttactatattctcaaattattttctttctgctctttttcttaataacttacctacttactgacacgtgattggggacagacaatattttacatttctacaaagcattttatctcatttttctatttctaaaatgaaaatttgagtaaagatgtacatccttaaattctgtacacagaaaatatactaaaatgaatcaacttaataatcaattaaagaaattttttatttaaaaatggataagaatgtgtttgaaatatatggttcagtcttaaactaaacacaaagcagttctcctaactaaacagctgttttaaatctatagctcttctgctccagcatcctaacagctggaggaaattagagtccagagagacatgtgcataatttgaattaaacagatgcgggctgtgaagacaatcaaacaacacagggtaagagatgcaaacaatattactgaaactccaaggagtttttattttttattttcataatgatggcaaatgtggccatagttgtgatacaaactacctacccatcctagtaaaaagtcgtgactttttttcaaaagtgcaaaaggaaacatgccaaattctaaatcaaagccaggacagggccatctctgtatttttccatttatagcactcttgatgccacgcgttgactgtgagctaggggtcgctgcctttcctgcccccggcagccgggcatcccctgaggggatctgcatcctgcaaaacatgccaggccactcacaccatcacatgctggcagctgtgggggcagaagactgaggaagagtgagagatgaccagaagctgaagggagacatatgtaaagtagaaaaggagtaacttaaatgtcattttctgattcaaaatatgagtgacctgctttaatgagcaaaaccctgcatttaaagccacaagtagttcaagcactgagggccagatggtaccctttgaaattaaagcgctctcaaatggaacatagcagggaacctccctgtgcccgactgtgtaacaacacttctcccagataatgtccgttaacgtttatggctttcggtttctagctcagttcatgaacgtgtttacgggtcttctgttgagaaatcaagagttagtgtccacgtggcaggttttccaagacctaagtgtgaacgtgatcatcacatttcttccacctcttcaccttcatagtagacttttcaatactccatgaactcttgattactgatatgaagcacaataaatatagacaagcatttggaaaacagcctgagggttctgtaaatagctaaacattttaccacatgacccggcaattctactctaggtatacgcccaagagcagtaaaaacataggcctatacaaaagcctgcacacaaatattcatggtagcatcattcacgatactcaacaagtagaaacaacccaaatgtccatcaactcattagtggataaataaaatatggtacatacatacaatggaatattatttggcaataaaaatgaagtgcagattcatgctatgacatagatgaaacttgaaaacattgtactaagtgaaagaaggcaatcacaaaaagatatatattgtgtaattccatttatatgaaatgtccacaatagacaaatccacagaaagtaaattaatggttgccaggaactgagaaaagggaatgactgctactgagtatgaggttttcttttggggttgatgaaagtgttctgaaattgattgtggtggtggagtgaaaacgctcccaagatactaaaaaccatagaatggtatgcttaaatgggtgaagtgcatagcatgtggactgcatatcaacaaagttgaggccagcactcaaagagattgcagaacaagaattggagtgttcctggagcttcagatgtaggctccacgaaaaagtgatgaagagagagggacagacagtgtgtgtgtgtgtgtgtgtgtgtgtgtgtgtgtgtatgcgtgtgtgttgaggggggggatggctggaacctgtggaaaacacccattaggagggcagatggacccagtggctgatggtgtgcacggttcctgcacactcatgaaggaatccaagcacacccagggcactcctgcctgcaccaggggagctgcagggagggctcctgtcagcagaccactgcagcccccaaaagccccttctcaggaggaggggagggagaagccagctagaatcatctgcgagggtgtggggcaccaggacaaggacccaccctgtacccagtcccaccccccaaccctggaggtgtcacaaactgggaagcaggcacaagggaacatacaggtaggcaaggcaaagaaccagagacaaagcccattccttccttaggctccaggaaaagcaggtgcaagcaggggcggcaggggtgggaggggtgttggtaagaagatccaacatcaaattaacttcgacgttcgtattattgtcttggcttggatgttctaattacatccttaagactatgtctgtgacttctagtacctgtaaggaagtttgttaaagagtgaataaaaatgtcaggggaccttctgatttcccatccagggacagggaaaaattgctcttcctcaacaaaaggctggtgagagatgaaaatagttttgttttgattatattgcaaagtgttcaactttattataagatgtgtgattaataataatagctaaaatcaactgagcttaagaagacgtttacatgcatgtggtcagtcctcacaaaaacactatgaggtgtataaataaataaatgtacaagaataagacatttactattctcattgctcagatgaagaaactgaggcacactaaggttgagccagcaggtgcagggtcaacaagctggaacccaggaagttggttctgcagcccagtcctagccctggaactccacagtgcccacaacgctcccaagtgaaatatatgatggagcatctatgggaggtgaggttagggggattttactttttgaaaaatgctttttggtatttgaaatattctcatataaacatccatgacctataatgacagagagagagagacagacacagagatagagacagagccagagacagggacagggacagggacagggacagagaaagagaaagagagagagagaaccattttagaaagttgctggaccagggaatattttgcacaacatgaaatgattacttactatcctccctcctgatttgggaaaattttagaaaattacagtggaaagcagcagcccccaacctttttggcatcagggactggtttcgtgggagacagtttctccacagactggagcagggagatggtttcaggatgattcaagcgcattacatttattgtgcaccttatttctattatttgtactttgtaatatataatggaataattatacagctcaccataatgtagagtcagtgggagctgtgagcttgttttcctgcaactagatggtctcattgggagtgatgggcaacagtgacagatcatcaggcattagattctcataaggagcgtgcaacctagattcttcacatgtacatttcacaatggcggggaggggggactcctggtgtaaagcattatgtttaaaataccatagcctgagatcaaaattttaggcacaaatttaatcacattgaatcctttgtcttctattagttaaaaggttgtcctgctgccatcttggaatgagtgcaagttggaaaatctagatccgagggtttcacatctgagcatgcataacagtgccctggagagctgctaacagtgcagattgcctgcatccagccagcagagtcagggagatttcaggggagcccctgcccagtggaactcttaaaactgcatttataacaaccttcccatctcctttctaggagattcggatacagacagcccatggcaaatgttctgaggagtaatatggtattatttttaaaagctaacacccataaatactacattaaattaaaattcagggatgaatgaaggacttgtagctatgactctgtagctcagagacataaaaagtgtaagaagcaaaattattactcactaagagataagcaggaaaaagatggggacacttacagttttaacggcttacctcttttgtagagccagaaaagtcagcagcggttggaactctggtaacaatacagttttggtcttctacttatgtactctcttctctattactaaattttaaaaaccagaacagcaaacctaaatcaagcgatacagtcgagctcaaagaaagactgagctcaaatgccttacgtctgccccaagagaagctagcattgaactcacacatcctccctgtgagcacaggcttgccagccacagctcaccaccgctttcttatgacccaaactcatgtccagagatctctgattctccttaacagaactccaggtaatcattaataattgagaggaaacaggcttacttggaaatcttattatgcacgatgtttatcaataaccctccatcaggaaggaagcaacaggcagcacctgcgtggctgttttgtgccaggcactctctggatacttgcctaacattattaccctcacagcgccctgaagatcagatgttatcctgatttttattatccctgtcttctcaagtaaagaatctaggctgttaagaacaataactaatttacctgccatcccatgagacacagttgatggagctaagacccagggtggttccttgtgactttcaactttccctttgatattttggcctctcttaatttagctacatgaaatgttaacctattatgtactcttagttcaattttttggtttatttgtaatcagaaatgatacaatatggcaccttctcaatgagtccatcaattcatatcattgtctattaactcaggatggctagctactcattaacaaatgtctaccaaattcctccatggccttgctagatagtataaataaacaggagaagaacaacgcattacaggaaaacagcaacagtctactgcaaacaaggagaatcaagtaagtaaggcaaagacactaaaggactcaggaacatcattacataatgttgaccagtaactattaatataatgcaatataaaataggaatgcaaaggtattgactgaaggagctacaaaattaagagatattctactaaactattaaagtatgtattctatttataaaataaaaataatttatctaaataagttaaataggaagtaatatctaatttcagcaaggaaagcttatcttcaagtttagatgaagtccttaattacaagtaactatcacatatggctgctctgggacccacaatttgagctgagcagcagatcatggtttgccactgggaattctttagtcttgtccaggaaagattcttagaatctgcataatggaaacagttactaagacaccatgtatgtatgctttacttgctaacttcaaagagttctagagttctgttttcatattttctgagttattttgttttagcatgaaagtatatttagaaagaagggctacttaataatatttctttaatcaaattcttcatataaaaacttctggtccaaataccatttctgctagaaaaatttacctgcccctagtatacaacagtaacattgctgtcaagccagtgatgcatcattgatagaaatgcattggccacagcatgaaacagtatcacatggtagtttttatgccactgcacatgagctgacagccttacttgggtcttgcatgtagagctctcacagggcagggaaggtccagaatacagcaggtttgactgcacatcccaatattagtggtacttttaaaaaatgactttgggtcacagagttctttacgagtaagaactggggataattgagagggctcaggtatctgctacttttaaaaatggcttataggacattaagagtcataagaaggaggctgggtgcagtggctcacgcctgtaataatagcactctgggaggctgaggcgggcggattgcctgagctcaggagttcgagaccagcccaggcaacatggtgaaaccctgtctctactaaaatacaaaaaaattagctggacatgatggcgtgcaccagtagtcccagctacttgggaggctgaggcaagaaaatttcttgaacccgggaggcagaggttgcagtgagccgagatcgcgccactgcgctccagcctgggcgacagagcaagactccatctccaagagaccaaaaaaaaaaaaaaaaaaaaaaagcatcataagaaggaaagtaaaaatgattattcttctagtcgctttctggattctttgcctttcattgcttctatagtacatattaatattacaaagaaatctgaattggaatagacaatcatttcccttacatataaaaatgtaactgaataaagacattaccctaaccatcctggggttacattcctagatactcttggattccatctacaccttctcaactaagcacttacagatgtctggctttatatatgtacacatcagtaactagaactaagtgttgaggtaatgaacaacaaggagatgacagagtgactaactctggccatgatgaaaatggcagatctaagatggaaattatactaggaaattccccaatcctagaaatacagttggccttcctccctcccttccaccttccctccttccttcccttttcctctttcattttttatttcctttgtaagacatctagacaaagtttaggtgctatataactcagggacaatcttcagcttcattgtgtgagattttattcatgattgccttatcacacacaatgacagggagtaggagaaacctcatttgagtatataatctgctgagtgtgatgcaaatgtcagtatctgtggtatctttgcagttacaacccactggtttcctctattctcttaccacttagaggtgaatttctaattctaggaactggtcgtcatcagaaattgatgaagacttcaagacgttaaatcaattcagccactgctacatggtaccttatagaagagaccattaattatactaaataatgtctattcatttattcaacaaatatttatccagtgcctacccactggataaaaataaccaccctgagtgtttagatgaatgcctaatgacaagggtgatgcttatgccattctaaaagtgatgaattgaactgaacatttatttccacacaaaaacctacacacagatgtttatagtagctttgttcataattgccaaagtttggaagcaaccagcgtgtcctcatagggtgaacagataaataaactgtggtacattccattcagacaaggaaacgccattcaatgcaaaaaaagatatatgtgaccaagccatgaaaggtacaaaagaaacttaaatgaagattatcaagtgaaagaaggcgatatgaagaggcgactttatgattctatctataggacatcctggaaaaggcacagctataaaaagggtaaacagatcagcggttgctcagggtagagggaagaaatgggtgatgaggtagagcacagaaaatctctaaagcagtgaaaagactgcacaatcctacagtgttggatccatgtcactaaacatttgtccaggccctagaatgtacaacaccaagagtgaaccctaatgtagaggactggctctgagtgacaatgatgtgtcaatgaccagttgtaagaaacgtaccactgggggtgtgccgggcgtggtggctcacgcttgtaatcccagcactttgggaggccgaggcaggtggatcactaagtcaggagttcaagaccagcctggccaagatggtgaaatcccgtctctactaaaaatacaaaaaaattagccgggtgtggtcatgggggcctgtaatcccagttactcaggaggctgaggcagagaattgcttgaacccgggaggtggaggttgcagtgagccgagatcacgccactgtatcccagcctgggtgacagagcaagactctgtctcaaagaaaaaaaaaaaaaagaaaagaaaagaaatgtaccactggcggatgggggtgggaatgttgatagtggggaggttgtgtgtaagtaagggaatgaggttgagaattttccacaatttccacacaattttgctgtgaacccagaactgctgctctaaaaaacaagtttcattaattaaaaatcaaattgctgctttcaaggttcatggttcacagccacataggagatgggtgtcttagcctcatgtaaggtggagaattagaactaaaatccttatgtagaatggagtcctagaaaaccaatgactttcgttaaaggattgactagaaaaaaaaaaaatctacccatcagaacaggtagaagaaaacttattgacctgatactagaccttacatttgatggtttgtaatcagagatctgctcttccttcgacaaaaggtttaaccttatactatttatatagtccatttttcacaacgctgaaaaataaacataaaaaagtagttacacactgcatgccagagacaagcttaaaactatggtgaagagacacactgccagcctgccacgaagcagccccacaaagcccaagaactcacattctaacacagaaaccttgtgaaaatataatcttccaagggagagaagcaatacacccagtcaccatcaggattagttacctaagaaccacagacacagaattttgtacagatatcattaaattactatttttcaaatgattaaagacttaatggaagaacattgaaatataaaacaagagcaggattccatcagaaaaggcagtgacattggaaaaagaatcacatagaaaacccatcaatgaaatatccattctttgaatgccactgggaatgcaaaatggcccaaaaatggtacaactatgaatatacaactaagggcaaaagaaaggtatgattaaattacctggaatgcagcacaaagagataaagtgatgaagaacttagagaggaagtgagaggtactgaaaaaggaataaaaagtccaacatataatgaacttatattctagaattagaggaaaatgcaaaaggaagagaagcaatatttgatgacactggtgtatatttttctagaaccgatacgaatgttctcatacaggaatcacagtgaatacggaaagaaagccaaagctgaacgcatggatgtgatagcgactaaccacaaagatttgaaatgatttctaaagctgcaagagagaaacagattacctccaaaaatactgcaagtagactcatagcatacttaccagtagcaaagataaaagctatacgctatgtcttcaaaggactgcaaaagaataatctcaatatagaattatctttcctgtaattcagaaaataagacaagttattcctaaagaacaacaaggtgggtgatgtgaaatgccttgtcagataccgcaaattataataaaactatagtaatataacaacgtagtattggtgcagggaaagacaaatagacaaacagaacagagtagacggttcaaaatagatccaggtatacatagaaactatatatatgtcaaaggtgtccttatgaggcatgactgttcaatcatgggaatacacaacaggtgatccctgtgaagaaaataaaataaaactggatcttgcgtggacagcacatgtacacaaagataaagtccagttgttaaagacctatatttaaaaactaattttcttttttctgagacaaggtctggctctgtcacccacgctgtaatgcagtggcacaatctcggctcactacaacctctgcctcctgggctcaagccatcctcccacctcatccccaagtggctgggactacaggtgcaccagcttgcctggctaattttcatatttttttgtagagacgggtttcaccatgttgcccaggctggtgttaaactcctgagctcaagggatccgcccacctgggcctcccaaagtgctgggattacaggcatgagccaccatacccagccaaaaaccaaaactttaaaatgtatacaaaaatattctttaaaaatattcaaggccacaacatatgaaaactttcacattagacacagaagatacaaatcataaacaaagatgaagtaagttttccacattaatgtgggaaatcttatacatccaataacagcatcaaagttaaggagacaaaccagaggttgacaggttatttgtttcctacgttagccccaaaatactaatatacattgtgcattaaaataattcacattttaaaaccatcacaggcccatgagaaagtttggccaaagtatactaaatgctcagaagacaaaatgcaaatgaatagtaaatgtgaaaagatgcttaattgagaagtaattagagaaatgcaagttaaatctacaatgacagaaaagtttacaccagtcaggctcaaaatttaaaagtctgaaaatattaaacgttggcgaggatgtgaataattgggagttaaattgttatgatcacctagcagagcaattatttagtatctattaatagtaaagctgaagttattggtgcacaaataccacacccaggaattggtctagagaaagtcttatacctgtgcacaagacttgtataagaatgttcagtgcagcactatttgtgaagcaaaaaaattagaaacaccttaaattcccaatagcatgagaataaatccattgtgatgtcacacatggtatgctattcattagtgaacacaggtgacctactgctatatccactaacacgcattaatctcaaaatatgattgaacaaatatgttcagttgcatacaataggtaacatcatatcatttatttaaagtttaaaagcatgcaaattagcagtattccatattacttataggctggtaaataaatgtttttttttctttttttttttgatggagtctcgctctgtcgcccaggctggactgcagtggcgcaatctcggctcactgcaagctccacttcgcgggttcacaccattctcctgcctcagcctcccgggtagctgggactacaggcgccccagaccacgcccagctaatgttttgcattttttttagttgagacggggtaataaatgtattttttaaagtataaaaacatagttgataatgacaaatcccaagttcaggataatagttacctctgtagagaaggaagaaatggaacacaatcagagagcagtacatccatcgcttcagttttagttgtaatatttttcttaagttgaatggtgggcccactagtatttgtcatataattcccatattgttttccatccctggggttttgcaataacaattacaaatatgtatctccctacaaagtttatacaatggtttatatataattcattcatctttgacttgtaatggaaatctgacttgcacaggaagtcaagattgctaatgtcagacttgcaaaagaacaagcatgctaatcaaattcaaagtcactaatgtaatttccatgtatttctattatagttctcgatttagattctacatctaacctcatcttgactgagaatgtatgtatagattctcaaataagctttatctgaagaatgtcttactatatattatttggtagcactaggtatcaaacactgaggctcaaatttatatttctgttctgttctaacctcaacaacagacagataaacaaacttcctactggagatcgccacctaaaatttatttgaaaccttaaacctctcaaataaagtttatttgaactgcccctcccacaataacccattcctctttttcttccactctcctctgtgcctggtggcatcaacatctaacatgagttctatatctcacatagccaagtatcaatgtgtcatacttcaattttctctttcccttgcatctcacaatgcgtacatctgctagtcccattgacacaacctctaaaacatcacaaagctacatgtgtccctccattacaacgtctagtaccctagcgaagccccatgctccgtcccccaaacacctagactagcctcccaattagcctccttgcttccaccaacttccagccacacttacctcccttatggccttggcatgtgcttacctaatgcccactctaggtcctttgctccctctctctggaatgattttctgcagatattcccagggctggctcctttagctttcagctcaaacttcaccttccaagagaagcttttcctaaatttccaatataaggtagtgtcaccagtcctcagcctattttaattctttccaagcacttatcactaactgaaatttaccatttttattgctttacttgctttaaacctgaagattgtatttggttgcatgtaccggaatactgactacagaagtataaccaattggggtttatttttcgcatgttacaagaagtctaaacaaaagccatctagaactggctgggggctccctgatgccctcagcaacccaagtttcttctatccttctgccctgtccttttagcacgtggcttttatcttcatggcactctgactaaaagcattaataaccttcttgcacatggaatgcaggctccacaagaaaagggaccttgtctgtcttacccatcaccggaagaatgacaggtgctgtgttaacagcttgatcagctagagcagtgaaagaggaactcaagagtcctcaacctcagcatcattcctgcatcctgggagtcctgcaccacagcctccattcattggccctggagattctacccggatttctcttctcatgaagccctggccttcatggccttctttattggccctgccttagtccagggcttagtctcacgctacagtctcctaagtggcccgccacctgccccatttcgcctgccaccctgtcacacccacgacacaaactgatcatattcatctctagaactcttatgttttcttaaagtctgcactcaaatagaaagctccacaaaagtggggacgcaccggtcctgcttaccactgctctccaggcctaggaaccaggagtgcttgctgtggaggagacacttggcaagtatttattaacagaatccaaggaagcatctaaattcccgaagattatgtgcaaagcccctctgcgtttgacccggctcatcctcttcccggtatcaccttcctcattctcacttttgccatttgtttagtcacagcaaataattgtaattctaaagtagtgccagacctttgcatcttttattttataatatctgcataaaatattccttccttttaaaatcagaaatcttctgttcatcacttaattcccagcttatgattctcctcagcttagaggccttactgactcagcctaggggagcagacagtgcctcctggatgcagcactttgatgatgatgacgatgacgacgacgacgacgatgatgatgatgatgttaaaatcacaatgccagcaactgacatcatggggtgttacaacgtacaaggcactcttgtaagtatttctgtttggtgactcatttaacccttgtagcaaccccatgaggtagataacacaatttttctcattttaggagaggaactgaggcacagagacattaactaatgcaccaaaggtcaaaatggcataagctacattccaacccatgtggcccacctcctaatccatgcactatgacttgtggacatatttgtacactgtgacctgaaagattgttgggagcagggctcataccttatgatacataatgggtgcccaataaaagaccgttgagtgaacagattttaaaacaatcagttgtataaatacagaatggggaaactggcttacatatatatatatatatcttgtaaaaacagagttggggtttaaatggactgtatggctctctaagtcatatcattgatcctaaaaataaattacaggccacattaataggcagattataccaaggggcatgtagtaactccagcatagatcaggccactttgagaatctagtacagtcctctctctttagaaaagaccaaatggagttcgtccaaagtaggtaaaacatatggctgctaaaataggaagagaaataactgaagggcatatggattatcgtcaagtatctgagaaagtgttatgtacaaaaatttcttctgatttaaaagggcagaacaaatctaagggtggaagaacaatgtgctcagataaggaagcaaattccagttgtgtgtgctgggcccactcaggctgcctcctaagaatggacagggaacacctcttcccaacgccgccttcagtgttattatgttggtcccttaaaaaaaacagggctggcaggttttgcagggaaactccaaagtgacaatcagagctttgtatttatagagagtcagtttacctgcttatcactgcatttatcccatttagttgctaaaaaaaaaaagaaaaaaatggacttggttgccttgtggagaatggatagtagttgagccttgtggtgaatggatagtaattgagaatgcggcagagagagatgacttcgtaaccaacagatacatatcatcaatgcgcacagaaacttaaggaggggccaatgtgatacgcgaactgttgtcagtcctttacatttagttatttttaaatttatttttcaggaagtatctataaaaacactatatgtaaaactatttataggtcaggaggctgaggcaggagaattgcttgaactgagacccaggaggcagaggttgcagtgagccaagatcgcgccactgcactccagcctgggctacagagcaagactctgtctcaaaaaaaacaaaacaaaacaaaaacaaaactatttataggttaaacactctttataagtaaaactcatttatttaaagaaacagactgatatttttatagttctctcatcaatctcttctattaaaaacaaacaaaatactaaaagaaaactgccaatcattttgaataagagatggtccactacattcctccaccagaggcaagaattaaaaatttaccaagtcaagcaggaaaccctaaaagattatcaacaaatgtattatatttttcaaattcgtaatgcaaaatctataggtatgttttctaatcagtccaagactccaaagtaattagtgaatttattgccattttcaaaaagtaataccccttgatatttaagtttcaatagtatggttttaataaactgaaatgaatcattagaagaatttcccccctttatcataactgattaagtctattttaaagcttatatgccctcttcagggaaatctttaaaaatttccaattgtttatatcagtgaacagggctgaataaccaatgtataattggttaaatcagatacattatttccccctcaaaacaatgccattgagttgaaggcaaaggatagaaatgaactcaccagctatatacaatattatatgacataagcaatattaaagattggtatataagaaaccaagcttggctgggcgccgtggctcatgcctgtaatctcagcactttgggaggccgaggcagacggatcatgaggtcaggagttcaaaaccatcctggccaacatggtaacactccaactctattaaaaatacaaaaattagctgggtgtgttggcacgcagctgtaatcccagctactagcagggctgaggcaggagaatcgcttgaatccaagaggtggagactgcagtgagctgagttcacaccactgcaccccaacctggcaacaaagcgagacaccgtctaaaacaaacaaacaaacaaacaaacagaaaccgacctttaaaataaatacaaacacaaaaagattagtatgtatttaatctgcaaggctaaagccacacaactggatttcagtgtactacaaaatgacagatcatataaattcaaaatcttcattctgcttatcaattacagaggcaaaaatataactatttaagtgggtcttagaatgtattttctcttcagagtgcttcctgatcctcttgccctctattttacattcaagcgactcatgaattcttaggagaaatctgaaattacttcatgccccttgttaaacagattttgaatggtaagtactcctgcaaaattgctcccccaaataaaatttcacatacagatacattcagtgcattaaaaaagtaaactccattagaatagaatatagtattttcttaagataactgtttagacttaactcaaaggagttcccacaaatatattctgttctcagttagttcaagtgtggaataggcaatttggcatggggtaaatctgtccccttttgcaatgttttaaaacagaataaatcgtgggatgaatttactgcgcattacaaataaaatgtttatattttctttgtgaattattcatcaaattaaactaataacatgttaaaatttgcttatgtgtcagtcctttgtaggtaaaatttcatataacactcaaaacaaacatataaaatataggcattattactatctacacttcatatagatcagaaaaataaagactggagagcttaaatgacttgtccttcccagagagtctgactttagagtgattcatatctactgtacttcattataacagtgtatttgaaagtctagttgaactcttaagtgatttcatctagtgtatgacattcttgaagttttgacttctcatttatatatagcaataagcacatgtgtaggatggcatcataaaactcccttggaatgaaaaaaacatataaaaagttttaggctcctacaagaacagcatgtatctcaatgttcctcaaaatgagaattgactccaaggtacaaaacaggtaaactgaggaagcagatgttaattaaccactttagcaggttctgaagttcttagtgtccaaggtttaaataacactagaactatcttaaacaaatgtttgtgtttatttcctgttttctgaacaatgtttttgatgaattacgcatagatggaatgcaaacacacagacccaattccctttgaaatatgtaagcctataaaaatgagcagaaaatatccttggcaaaacctgcactgagctttcaaaagcccacatatttgaaattgagtttgtgatgtactcaaaacacaaacatcagtgggttctcgcattcctcatttctccctctaatgtcagaatattctattaatttaaaaagcagagttctgtgccataattagtctacatattaaatcttatctgagtgacacctctgaatgcaaagtatccagaacaaataataagacaagaaacattccatgcaaaataaaattcaatgacagaataaaatcttcaatccaatgcagtttacacaagtacacccacaaaaattataatttttcccaggaaatgcattccccaaatgaatgtatgcttctctgtgtgaagacatatatgtacaaaaggctaaaacattttttaaaaatccaaaaacaattgatactagaacactatactgacaccaactttataaatcatgggcttgcccaacaattcagtaaatacttgatgttctgcctccattcaaatgagtctgtgcatcctctgatttagcacatggccaaagaaagatctttcagcccatccttctgtgctttacaaaggctactatggcaatcttcacttgtccaatgtgaatttcagttaatttaacttctgctgctaaattgtttatgataattttatttttatcaatattaaacctaatatttgaaaaaaaaagttaacacaacatattaggccagactctcccattcccatttaattgtgttttctgtgtcttatgggcatcactaaagttatactttaacataaactattataacataaaggatcacatcccacacatttaacttcatctgccatttaacttatatctaaggaagatcaatgctggaataaatatttactaatggtaacttattaattaaagctatgacccaagcccatatataaatagaaaatgaaggagcacacatactcccatatgtattcatcataagtgagtttggtatataagcttcaaagaagtttctcatatacaatcttattgttccttgacagtcatctcaggcttgttacaatgacttagtaaaaagggaaaaaagtaaagatggaatttcagtgaatcatctttgggttcagagcttttgggtgtatagacacaacctctcatttcttaaattcttccctaaaggatgatgactgtattaagcaaaatctcagataacatcaggtcaattggatgatggaatcttagtccaataatggagacaacagaatatctgaaactaggacttcagtgaacagtaacacagtttcagtatggcatctcttctctgtcatttatcaggtttcctgtaccctaataagatgcatcctatgttaagagtttggagattggattgctgcagagtttcaccctctcacacattgcttgccttggaatgtgagtgtaatcacaatggaaacatctatgagatgagagcctattaaatgaatccacagactatatatcttcagcatcttataagctataagaatcttagctttttttttttcttcaagtctatgcttattgatggcaatcctcagagatgttttgtaagtccacatgggcacagaaatgtcaaggcttcctttcaaagaaaaataacatttctgagagttctgaattatgcaaagaggtaagtcattcagggatactttctgacatgtagaggcaaccagacacaaatagatgaaataacggtcttcccaaagtgagcatttgccctgtacagatgatcattctttgattctagactcggacacgtagcaacacttactagttcgtataataatgtacctgttctttggaggaactcaagaggatatgtacatttgcctaaataaaggaggccagcagtaagttccatttgcaaggcaaaccttcagagagaagatgcttgtatcagtcctgtagtgaatgagcatctcatttacatgaccaatctcttacacagaaataaatcactgcgtgactgtgctctgggtataatggtattgagcctggcctccttttatcttataatcagttaaaataggaactatattggtcatttgcagaattcttttatatacaaacaaaaaatcatggtggaaatgtattcagtgctctaaattgatactagcctctttctgttttatagtcaatagaaaaagcaatctctactaaaaatacaaaaattagctgggtgtggtggtacatgcctgaaatcccagcgacttgagaggctgaggcaggagaatcacttgaacctgggaggcagaggttgcagtgagccaagatcatgctattgcactccagcctaggcgacagagtaagactccatctccaaaaaaaaaaaaaaaaaaaaaaaaaaaatttgaataaattaccaaaaaaaaccatgaaatttcaataaatttagttcagaaatgaagccattacatccctaaattctattacataaatatgttactaatgtttactctataaccacagcagatcatctgtttccttttttttttttgaaacagagtctctttgtggcccaggctggagtgcaatggcgcaatcttggctcactgccacctccgcctcccaggttcaagagattctccgcctcagccttccacgtagctgggattacaggtgatttttgtatttttagtagagacggggtttcaccatgttggtcaagctggtgtcgaactcctgacctcgtgatctgcctgtcttggcctcccaaagtgctgggattacgggcatgagccactgtgcccgatctggctcatttatttcctaaaattataatgtatgactaacaaatcaatttaaaaactatgtacaactggagtacacaattgtcaagaactatttacttttgcttagtttaaatatttggtaaagagtttgcaaataaatactcatcatgtctattcagatctataatgtgctaaaaattctgtttaagacttcaagaaagaggccaggagtggtggctcatgcctgtaatctcagcactttgggaggacaagatgagtggatcacctgaggtcaggagttcaagaccagcctggccaacatggtgaaaccccgtctctactaaaaacacaaaaatgagccaggcgtggtagcgggcgcctgtaatcccagctactcgggaggctgaggcaggagaatcgcttgaacccgggaggcggagcttgcagtgagcagggattgtgccattgcactccagcctgggcgacagagcgagactctgtctcaaaaaaaataaataaataaataaaaaaaggcttcaagaaagaggcattaatgtctctataagttttactcaccctgtactcttagtatgaacaagtctttaaatgtgtctgctaatcaattaaattatttttctcatttcttatgttaaatatcactcattgaatacatactctccctttaaaagagagacaaatagcaagcttattttctaagaaagtgatagtttcaattcctctgtgaaagtggacagatatcctaggttttttttaaattcaactttatattaaaatgcttacacattctaacgcagttgtaagagatagcagagaaagatgccagctaccttttccccagcttccgccagtggtaacatcttgccaagctagacgttataattgtactataagcattgttacagtcagcacagaggacggccgtcaccaaagggtcccttctgttaccctttcacagtcgtaccctcctctcacctgcttccacccccttcagaactgctgggaagcatgaatctgccctccatttctatcattttgtcgttttgagaatgttatataaataaaattattcagtgtacgatctttggggatgggctttttccacacagcacatttcccctgagatccatccaagatattttgtatatcaacagtcggctccttttttactgctgagtaatattctagggtgtggaggtaccagtttgttgaaccacagatccactgaaagacatcagagttgtttccgtgttctgctaatgtgaataaaactgctataaacattcatatacagatttgtgtgtgtacctacgtcttcatttctctaggataaataactaagagtataactctgtcatctggtaaatacatatgtcattttttatgaaactgctatattcttttccagagtggttctaccattttatattcccagtagcaatttgcgagtaatccaatttctccacatcctcaccagcatttggtgttgtctttattttgtattttaatttacctactttacctattactctagatatttctttatacattcttaacttgtcatgctctactgcagttgctattttgtaggtcaagtttagaaatcttacctttccttgcatctgtgtttatgtttgcctgaaatgtttcttctacatgtagaactacattagacaatgctataacttttgctgcaaccctctaacataatttagaaaactcaagaggagaaaaacagtgcattgtatttaaccatatttttgcttactatgtttttccctccttcctagtgttccaaaattcctttttttgttgtttcatttgtttagaaaatttctttagccattcttttagggtaggtctgctggtgacaaattcgcttagtttttctttatctaaaaaaaaaagtattgatttgttctttcttcctgaacgacattttcactgggtataatattacaggttggcagttcttttctttcagcatttgaaaaacattgtgccacttccttctagccttcatggtttctgatgagaaatccactgtaattagaacaatgttagccctatagggaaggtgtgatatttctctggcttctttcaagatctaaaatttgtctttagttttaagaagttgaattacgttgtgtgttggtgtgggtttctttgggtttttcctgttttagattcactcagctttataaatccatctataactttatgtctcttgcaaactttggaagtttccaacacttatttctttgagcatttgcccaccattatcttctccttccaggaatcccctgacacaaactttaaatgctctgttggagaaccacaggtctctgaggctctattccttttttctttttccagcctaccttttctttgccatttggaccgtgtcatttctatgttccaacttccagttcactgactcttttctctgttccttccattcttatgtcaaacccatcagtgagtgttttatttcagaaatttcaaacaagaggctctccactcagcctttactagtgttggtggggacaaggatagggccgcagtttttctgttgcatttggctggagtagactggttattgtctaaatgttttctatgttgctaggcagcccctttctgagtcctctggataaaaaacaggccattgttggggatttcttccttccttcctttcttccttttcccttcccttcccccttcctttacccctcccttctctctctctctctctctctctctgcccctcccttcctctctgcttcttttttcttctcttttctttttgtctatatatgttgacatttcctggttgccagcttcttcagttccacatctgaggtaacgtagcaaaaagaaaactcaagaaattcacctctggattcttccttgggttctaaaatccctactctgtccacattcttctcactactttcagaatcttcctaagcttgtacagcggacccttgaataacatgggttgaaactgcatgggtccatttatatgcagattttcttctgcctctgccacccctgagacagtgagactaactccccctcttcctcttcctctttagcctactcaacatgaagacaaagacaatgaaaatcttgatgatccacttctacttaatgaatagtaagtatcctctctcctttttgtaatgctgttaatgttttctctagtttttttattataagcatacagtacatattacatatgaaaaatatgtattaatcaactgttcatggtatcagtaaggcttcccgtcaatagcagactactggtaaagtgtgaggggagataaaagtatacatgagttttgtctacatagcggttggcacccctaactccatgactccacgagtcaactgtacaatatgcaatgtctaggctttttagtgtagttgctgggaggaagagggaaaagtatgcctactccagcttcccagaagcaaaatctgtgccagatcattcgttttcaatgtctatattttttccattttcctttaattttttaaagttcttaaagtcttgccaataacaaaactgaacagatgagtgtgtaatgaaaataactatactctaacagtgcttctctaagtggcctgtggatatgctctcccagaactgaaaattctatgaaaattttttagatgtgacatcaattctattataatcttacaaataccctttgccagttaaatagacaaactcgctttttaaaattatgacatttcataagactgtggtctcaagctatagttccccaaagtacctgaggtgaggcactaaaactaatttcctcctcaaagaaggtgaaactaagtgtgagagatactgctcagtatgtggggtgaccattgcctcagttttcctaggacactcccaacatataattttgtcctggaataattattgacagggtcttcttttatactcacaatatctcattttgcatgataagctaatatatatgttcatatcacctatgataaagaatacgaaaccaggaggaagacacccagcaagcatagacaccaccccagccatctcttcttctcttcaggacaccaaggtgtatatttaacattcattaatggaagcattaagtagctcatatggaaggtccatcttctttttctcagcagcaacttattattagatattttgtgcttatactgtgaaatatagcacctgtaatgataatgggtaactaaatgatattgactaaatagttgtaaacatatgttctaagattatacaagaatatctaggatgctaaaattctgccagttgtacacttaaagaaaacatagccatcaatttgcaattacatgtgtaacttcctagtctttacagtgaaactcttctatgaacaaagtttgccaacttctcggcacctaaatcatttaactgtgatttaatagaagttccataagtatgaacctttctttttcagtgtcctcagacacaagttctcaacagccagctaggcatctccaaacacacgtactcagctggcatcaactcccatcatgttggaacaatgcagcatccttcccccaaccaaaccgggtcttcagacttcccatttccttctatggcatgacatttttctctagttccccaccaatgaaacttcaatgccaagttagtcaaggttatgtgaaatatagcccatattttattttttgtccaatcttcaacatctctcttcaggttctagaagaacaagaacccatcctttttggcaagcattctctatgctcattcccctattcctccatctacagaatcctacctcaactcaattcatccaagaagttcttcctggtgacttccaaccagatgtgttttctccacctttaaaacttcataatattttcaggtgcgatacggcagttatgtttcatattcttatattatagctattaggttgaacaacatgaaattgttgaacctgtaaaaatggcaatcccatatggttcaatctaatatttctctcggttttagggctcataaataaagagcagtctccatgaaaacaggggctgagttaggtctctcttttggatcccctgagaagcctaggacattggaagtgcttaagaagtgtttgtcaaaatagactcataaatcaacacatgtcttaggcatatatgtttgcaaagtcaatcatctgaagcaattagtctaactacatatgaaatcgctaattgttttatgaatcagcacaaatggcagtttagaacctgaaggttttggcaatataaaatgttttgattcaaggagctgttttaaaattatttatttgtgaaggaaacatccttggatttagaggttggcagatacagtgaaaatctttttagttgactgaaatagaaaaaaaaaaaatcaaaaccctttttagcacatgcacttcccttataaaaccaaattgcctgaaagcagaggccagcagtttgtgcacaacgagtatgtgcctcaacaccatcagcaggagatgcaatgcagaatgacaggaacaatttgcatttctgtagcttctttgtatacccaaattctgagagcattttacaaagccataaatatcgttacccacaagagacagggaaaggatgcagatacaaggacggactttgtgtactctgacccaggagcccccctgcgcggagcagtgatacccacacagctgtaaacctgagtgcaattaattgatgctggttaagaaaaggggaacatacatctgcagggtccttcacagtcacagggaccattcccagaaagcgtttcgtctttcttgcattcacaaagaatagcgtcaacaaatgttgagttgtatttgcgagtttccccaacaaaggacgggtctctagttctaggtgatggtggtattatcagtcacctcaccagtccccctaattcctacaaaaatcaccaatccgaatgacatgtgtgtagggctttcatggggctaggagcagtgggctgccagaagctctgctggggccaggagagaagagagcatcgttcacacttattacgttgcaggggcctatttccagggacaatgttactgaaccttggagaaattcatgcaaaggtatactgttgttgtgctccaggcttccttccccatcagctgcagaactgtgcgattctggtcctggccaaggagtgcccaaagctagttgccaatgggccccggagcccacacctcctctagcgcagcatagcagcagccctcactaacctccaggggtcacaattgggttacaaattcctcacagtgcagggactgagcagcctgattgggaacaatttattcgaatccttcttcgttaagattcaaatggaataagtaaggtagaaattgaacagacacagaaattgtgccttgctgctcctgtagtcagtagacatttattcactaagcctagctcgtgtgttctttctctctctctttctcactcgcagttgttcttccaatctttcctgcttgctgttttaatgcataattaagaaggtcagaattaatgaagcagtgtggagtaaagttcaaggaatccccaggcactatttattctattagatctcaggcatgaatgtcagattggcagcgcaggcggcatgagcaatggagctggcggcatcccaagaacggccgccaagggagactcacctgcacagtccagtcattcctcagctccttccctgcgaaaatcacacgcaactggtcagccggaaccccctgtcgcttagcaaccacctccttgagctggaagatgctggtgtcagaatcgacctccactgggaaaccatggctggagttgaacctgacaaacactgaccaaggaaattggaagggagaagagaaagtgagcatcactcgaagcccttaaatggtgatagcaacatttctcaaccgatttacccctcgcagcccttcagtgaatggtatatattttctttcacttacaacaaaaaacttaatgctatagagcaatatttgggaaaaacagagttagttacccacgagatttccctttcatatattcgtcagtgacctgcaaaccaaaattgcattctccctttgacatccatcctgggaaacagagagacttgagcaggacacttgcttgattggaattgaaagagtcccatgagtttattgaaaagactcagctctgacagcatgtacacactcacactccctccacagtgaccctcttaataaaaataggaggcgatgtgttagcactcaaggtatagcaatggaaaaaaatctaagctgctctatagaccagagtgaagacccactcggggctatggctcagagccctagacttgggtggtcctggccaaaatgctccactgggtctatgaagacaattatttgccctctttttggcagggagggggtggagacactagtgacaccatttgtcttattgaagccactgttccccgtgagacccaggctgcatcctctagtctgtctgtctgcatgccgtcttctcactgcacctgctgtcccacctcttcagcgtctctcactgccctttactttccattctttctctcactgcttgaagtcacgctctcatcacatcttttctagagtctcataatagcccccaactggagtcttgatccacgccatcacctccaaaaggccctacatagttctgcaaaatgagccttattaatacagagctatgtcacaccactcaaatcctttaagtctcacactgtcggctggtgaggaaagactccaagatccctttcatctagcacaaacctacattccagcattttcttcattaatctccatgtgtactcttttaaactaaatgctcccagaaaaaaaaaaatcacaaaaaactgctgcacacaacttcttgcttttattcatgacctccctccttctcctcttcctattgaaatcctgcctacctccatggcccacttcaaatgtgacctcccccaagaagcttctggctatcagctactgcaaaagcctgatcttccttattcagggcaccagtggcatttactatatatgtcttttaatattcaccacattcctcatggaagcaggatagcacacgggttaaaagaacatcctgaagcattaggaagacctatgaaaaatccccacagactcctttaattggcttaggatgctaggggtcaatctattaacctccctctttaggtctcagttcccttatcttgaaaacataaataaaccacagaccatattattcggttcattaaataatatttatagtatttaaaactatcgtcttgtaacatttaaaaataatggacatttagctgtttttgatatacattttgccttctttaaaagataacaaactcctcaagggcaagtgttattgtttatttactgctgtgtttcctttaaatgtagtactatagctaattatttctcaataccaatgtgagatgacccacctcatcataattataataatcattacaatgccaataataatcaggcacttactatgtgccagacattgtgctctcatatggtttttctaagcctcccagtgatctggtcaggtccctattattatccttattttacagaataataaacgaaggcacagggaatgggacccacttttctaaggacattaattactttctaatggaactgggtttcaaatttatttcaatctaactctaaagctcattccatttctactaaaataggcttcctgaaaccatctcagaagaaaagtccaggccaggcacaatggctcaagcctgtaatcctaacactttgggaggccaaggggcaaggatgacttgagcccagaagttcaagaccagcctgggcaacaaagtgagaccccatctctacaaaaaatttttttaaacaatcagcagggcgtggtggcgtgcacttgcagtcccagctactctggaggctgaggtgggatgactgtgtaagcccaggaattagaggtttcagtgagctatggttgtgccattgcactcagtcaccctgggtgacagagaccttgtctaaaaaaaaaaaaaaaaaaaaaaaaaaaaaaaaaaaaaagtccacatttctatccctcatgattaaaaagataacaataaaaaggctttatgacataaatcagatattccctatatgggtgtgcagtacaaataaataaaagctccagtgaggagctaagagcaaaggaccgtgaacaataaccatgaacaacatgggccccaaaacagacgtgacactccagtgagggcaggtggtccagatggcaccacaagaacaaaggcctgacatctctgaccagcacggaaagtgtttagaaaaaggaaggacgaccagtgacaaagtgctccaaataaagaaaattcatgaaaaatactaattacggaggaaaaggtgcttttgatacacttttaagtcaatttcatttgacgcctttgaaaatagaggggaagaaataaaaatgtattggaagccctgaggtatcttcacagcatcctcagatcagagaccataagacaaccaattcatcagaaaagacacatgacaagttaggggctatagggacaaaagatatgaccccagttctaaatttcattttctactagtgagaatagatttaaagtaaaacaccataggaaggaatgtgggaagaagtggctggaatttgtgccaaagctgctataaaaccagataaaaattccaggagatcctaagtttatgattttgctccaggggttcaaatcatggaactcctactgcaaggatgagagtttttttgtaaagggaaactgcaaaaaatattaaagatacctctgtccaactactgaaatcctaagtatatacaagttttttctataatagaaaagttacagatttaaagttacagtatttagataaatcataaatactacggatatgaatatttttaacagtaaatctaacatacaatataaatttaaaatggaaagataaaccaaatacataatatttgaccaactaaaacattcgcatgaataagaaaaaacatcttaagaaactcactgagttcataatcaagtgccattatgtgaaaaatggctagtgctgaatggcagtaatgtgatttgagtgggtctcaacctttttctgacatatgtgggaaacatgtcatgtcccatctgtaccagcccctgaactccagccatgatttccaaaacaggagtggaaggaagtacccagttctccccacctactacctctttaaagtcacagaaggcagaacgtctttagagctacataaagagaaatttgaatgctggttgtaacgcttgctaattttatgacaagttacctggccaccttgactgttagcttcctgatctaataaatcggtataagggatgcaacaccaatgtctgttacacaagatttattgagattatggatgtattagaaaatctcagaaagagactagtacagggcctatcctcctagtgctgggcaagtgtgtgctccaaaaatagttccctattctaggcacctagaggaggtagagctaatgaaagcagtgtcctttgcttgcatggtaactaagggagattagataggatgtgggtaaatactaaataaagtagccaatttttctggattctgctcctcttggtggacagaaaacttccagagaccaagagatatgatagagaatatggctcacctctactttctaaggtttaattacatatgaaaagcttggaaatgcattgttttaataattgttttgatgacgtataatatagtatcagaaacaaacaacataccagtaaacattatcaatcatgtgtattatcaatcaacatcataatgcactgataacaaaaaacataatgagatatatccagattccttttttatgatatccctaaccagggttgagaagtcccagagagtaaggaagtgaatgggtgggaagaggggaaagggttattggtggatgggcccttatatttcttttaagacaattttatttaccaagtctgaccagggtataaacttcataaatatagtagtcaatatcaataattaatgattcttaaatgattctggctgctcctcaagcagccattccgcctcctgcactgagaagagcaatgtcattcatcagcacagccccatcctccttgtcattggtcaaatgattggttcagggatgatgcaagccaatctgtgcctggcactccccttgttccagtgattgattctgcagaatacaggtgacataaggtggactaatcaaagtcatatccagaactgtcaaaggttcggtgaagtccttttagatggcaaataacatcatgtgatgcctcagacagttttgctgagagacccaaagaaaatcacagcccaagatagaccattaacatgagcacaaaaatggactcagtgcactgaaggcaggcaattcttcctcatgagagggtttcctaagctccgtgggatgttcggctccacctgcagcccagtaagtatcagaggcacgccccggttaattgcggcaacacaaaagtaactccacatgtttccaaatgtcccttgcctgggaagtttcttctgcacctttgagaactatcactaaatctagtattccctaactttagcaaaccaaccaacctgtcctcacaccctcctgcgattactaccccatttttctatatagaaattttcattgagaatttcttatcaccctggtctccatttctttattttatactcttccgtgagccaacacttgaagactgctcttggtaaagcaatgagctctacacttcaatcctgtcatcacatttcagttcttatcaggttgaccttccagggacattcaatatagttggcttctgttctcatcatcctttcttctcttggcacccgccagagaaacccttctggtttcccctacaaaagaggacatacttttgtagcttcctcttctggattctctccctttattggccctgcagattttggagcatcccaggagtctgaatctgtgtattctcccaggtgacctcctctaatcccgtggctgtaatgcaatggatatgtcatcaactcccaaatccttatttccagacttgccatctccctggacctttctttctctttctctttctttctcttcctccctccctccctccttcccttcctccctccctcctttatttctttcttttcctctctctctctctcccttcctctctctctctctctctcatctcactctgtctcccactatagagtgcagtggcacgatctcagctcactgcaacctccgcctcgcaggttcaagcaattctcctgcctcagcctcccgagtacctgcgattacagatgcccaccaccacacccagcaatttttgtatttttagtagagaaggggtttcctcatgttggccaggctggtctcgaactcctgacctcaggtgatcaattcgcctcagcctccctaagtgctggtattacaggcatgagccaccacacctggccctcactggaacttcagataattgcatctactagcatttgatatctacacggatgtccagtagataaataaaataaacattctcttcctacacctgtcttagtgctttgccttattcctaccctctttgatccatcaataaattttgttaacggtagtccttcatttctaacctaatctcatctacagcaatctatttccctacccaataatttgtggtggaacacaaatctctagaactgcatctttggactcatagctcaatgttaagtgaccttgcatgtgcaatttcatcttcattgggttgttataaggatctgcattattactagctacaagcatttttatagctcgttttttattttttaattgctatttttatgttttatattttattatttatttttatttttataactattacctgcatactcatttagcacttgagtatatgctgtatgataccatcctctagtagcttgtttcataattctttatttctgtctttgaagatctttgtgacaggaagcctcatttcatctccccacttatacatagaggccaggatttttgccttttataatgaattattaaatgctatcggatcaaccctcctgcaaaaaaactactataaaattgggacttcactaaagaaagcagattcttgaaaagccatagaagagtgaacaaaaaaaatgaagatttctagttagggggtccacatcaggagaagtacagttacgtaaagggagtgcccattctcacagctttaggcttgaagccaggtgcagtccgtgcacatggcatgtgggccagcaggcactttggttgcaaagccacagtttttctggctgaagaagcaaaacaccaagactgggacacctgcctccgaggagacacagaagaaaatgagtcagaaagagaaacccaaatttctatctatccacgtctctggctaacccctgaatgatgaaggtgcgttatcagactcaaagttgctcagctaaaggaaggatgtgctcaaggaggtgaagtataatgcccctgtgacagtaaatcccctgtgaatgtaaacgcccctatgactgtaaatgcccctttgagtgtaacacccctgtgaatatgaacgcccgtgaatgtaaacgcccctgtgattgtaatccccctgtgaatgtaaacgcccctgtgattgtaatccccctgtgaatgtaaacgcccctatgattgtaacacccctgtgattgtcttcctcctgaagaatacagcatggaaaggggaacaaaaacaacctcacagtggagaaacctgacaggcgctaccgcagccaggtgatcaaggtcaacatcaacagtggtaagtcatcttgatcatgtttacccttgacacagtgtgatgcaatgggcaatttatctctgtgggctttctctcaaaaacacataagcccagtctaatcttcacgaaaacatcgcacaaaacgcaattgagggacgttgtaaaaaacacctggccagcactgcgcaaacctttcaaggtcatccaaaacaagaacagtctttagaaactgttagagtctaagggcctaaggagatgagtaaatgcaatgtggtagcctggatggaatcctggaaaagaaaagagacattcggtaaaactaagaatatccaaatacagtttgaattttagttaataagaatgtatcagcattctttcattaatgataacagatgtagtataacaatgtaagaagtttaaaatagggaaactgggtgtggggtacatgggaactccctgtactatttttgcatctttttctgtaaaactaaaactgttgtaaaataaatgttcatatatattaaagaaaaagatctagatggagatcagacttgcacacaaagaacagattttcttttcaagatcaaccaaaataaatgtcttccaaaacaaacaaacaaagaaccaagggtcactggagaaaaaattacagaattcagtgtctccagtaattacgtttataatgtctgcgatataattttaaaagtatctaacatttcaaagaaccatgaaagtaaaccattctcggagaaaagaaaatcaagtgagacaaaaccctgaaatgactctaattttgaaactaggaaacaaaattttaaaggagctagtagtattactgtccttaaaggagtaaaaaaaaaaaaaaaaaaattgcaatgagtggaaagatatgacagataatcagagaaatagaaattataaaaaggaatcaggccgggcatggtggctcactcctagcaattttttgggaggcccacacgggcagatcacttgagcccaggagtttgagatcaacctgagcaatacagtgagaccttagctctattttaaaaaaaagaaaaaaagagagagagagagaatcaaatagaaattctagaactaaaactacaattgcctggaataaaaatctgttaaataaatttaatacccaaatggagattaaagaggaaagcattagtgaagaataaagaattgtttttaaatgaatagatgttagggacatattagataatatcaaatgatctaatatatatgttgttggagtcacaaagaaaaaatgaaagaatggggcagaaaaatttttcaaaaaataatgccctcaaattttaatatgtgatgaaataaataaatttacatattcaagatgttcaacaaatgtcaagcaggataaatatgaacgtgcttgtgtcaaggcaaatcatagcatagtcaaactatggaaagccaaagacaaggaacaagctttgaaaacaacaagaaaagtttgtctgtcacatacagggttaaaatgatgtaattaagggttaacttctggtcagaaacaatggagtccagaagtgacggcacaatattacagttcaggaagaaaacaaaaagcaaaaaatgcttgtcaatgcagaagtttatatccagtgaaaatatcttttaaaaatgagaataaaataaagatattttaagattaaataaaattaagataatttatcacaagcagactcatatcacaagaaatatcaaataaactcttcaggctgaagtgaaatggtacaagacagagattcaaatccacaagaaacagtaaaagcatcataagtgctaaatacagaagataattaggtaggaatttttttgctttattcaacataatttatttaatgcagatgactgggtaaagcagaaattctattccatggggagtttagaacatataatatgtatgccaagtatggcataataggtgcggggtaaatatgggtcttttatttattttatgaagtggagcaatattaacaatgaagaaactaagaagttaaggacagacattatatttcttatagtaaaaatcaaaatgaataaaaatattgacccaaaaagcaagcaaaaatcataatggaattccaaaaaatattgaaataatccttccaaaaagggcaggagataatgaagaatggaagaaaaatagagaggtagatagaaaaatacaataaactggtgaccagaactcaccacatcaataattacattaaattttaatgaagtaaacactccaattaaaaggcagggactacgtggacagagggaagtgggtccagctatactctgtctacagggctgcattttagatataaagacacaaatggtttcaaaataaatgaataaaaaatacgccaagtaaaatgtaatcataagaaggcagggatgacaatattattaatatcacaaaaaatagattcaaaggcaaaactattttgaaaaaacaaaaagagagaaacttaagactatgctgccaccacttgaaaaggtggatcgcaaggctcaagaatcatagcccaagccttcccactccttccctccttgaggtggaagaggtgcccggtactgcatcgggccagactgggaatgtcaaggtctcctgccacttccaggttccccggctggaaacagaatgaggacttcctaccctcctcagggagtaagagaccctggtcttagaacatagcaactgatgaggacatcgcgcatagcctcaaggaaacagctttggttctttgacgagggtgtatctccagtagaattccctcctctctctctttttccttctctctctccccaacatactctttttttattctttgattaattcttccacttttaaaattatttagtagaaaccacattaagggagatggagaatgagaggtaggaaaaaggcaactgaaaatctatataataagacgtgtatactgtggctaagaccatggatgttagaaccctctgtgtgggttcacagactagctctgtcccatcctaaccaactatgtaagcatgtcacacagtttctctctctcaatttattaccaacaaaataggcaataataatagtatctggccagacacggtggctcacacctgtaatcccagaagtttgggaggctgaagtgggcagatcacctgaggtcaggagttcgagaccagcctggccaacatggtgaaaccccatctctactaaaaatatcaaaattagctgggcgtggtggcgcacacctgtaatcccagctactcaggaggctgagacaggagaatcacatgaacccaggaggtggaggttgcagtgaactgagatcgcgccatggcactccagcctgggcgacaagagtgagactgtgtctccaaaaaaaaacgatgagaaagtggacataataataagggcaaaactctttggggaaggagatgacaaagaaaggagaagaaagactggatgataactagagagggtttgtgtcttataaggtatacgttctcagtatactttgtacctcatcaaaaataataatcatagtatctacctcctaaagttgttgtgagaatttaataaatcaatataagaaaggtatttagaagagtgcctaggcacattttaagtttcagcaattattgactcttaacttcaggtccaacatatagtgtaaaaattattgtaattatcacgtcagttgtgccatattaatgtttggttttaaaaatgtaccatttattttctttaaataagaaaagtgttcccaatggagctctattccactacactttatagtaaattgtaattggtctaaagtgtcgttagtatactgatagtgatatcttctgtttaaatagagctctcaattttcaaagtgcttttacagacattatctcagttaatcttcacaatagcactgaaagataattgggagaccatttactattcctatttttaaaataaagaaacagatgcacaaagaataaaagtggcttgcccaaacttcacaaggaaagaagcaggaaaaagaatcttgggtcctaaactccctcctctgtgtcagtggctttcacactggactgtatgttaccctgagggtatatgggacgtgccaatggaaagttctcctattcctcacacaccgttccttcaaacagatatgtctggaaacacatttatggctgtttcatgatggatcattttgtcccagcttcccttcgaaatcaacattctcccacttcacaaaacaaaggaatacactcaatctcccccacggtggctctggtgcaccaccacagggtgttaaaggagcatgccttgaacaactgggaacggggagcctcttttaacccaacccgttaactcacagtagagctttatttctttcagagtaaggtaaaggttggcattaggaacgatgatgtattttttagccatttcggactgtgttttcagcacgtgggttgagttaggctggtatgaatacagatacacagtaaagagggacaagagagatggtgatgttcatttaactctcatagctcttctaccccttggtattgccaaagaagtaattcctcctcagggaagttctcagaagatcagagctaagattgttgtctataatactgaagatgacggtatcttatatcacccaggagacaaactgctggcaaagttccatctcttacctaaccatccatctgtccatctgcccattcatccacacatccacatagccagccatccacccatccatccacctactcctctgtagtatagttatgcgttttgagaaatgcatccttaggcaatttcatcattgtgcaaacatcatggagtgtatttatgcaaacctagattatatagcctattacacacctaggctatatgatatagtatattgccccaaggcaacgtgtacagcatgctactgcactgaatactgtaggcaattataatacagtagtgtttgtgtctctaagcatagcaaaggtacagtaaaaatatggtactataatcttaagggaccaccatcatatatgtggtccctcattgactgaaatgttactatgtggtgcttgacagatataagatggctatgggggcccatttttttctgaaaaattaactcctattggctgtctgatttgaaaaagattggttttacatcatgtcaaaaggcggtcactttccacaaatggaatatgcagctccaaggttttgatttaaaaaatgttaaataaaataattttattataaatattgtattgacaaaagtgtattaaactgaagaacatttcaatttttcccaatgtttcaaaatttgtcagattgaacaaaatacctctaaatgatagaatggcaagaaaaattaagtgagttaaaaaaaactttataaaatatatttgatacatttcctagaaattgaataggtgaatgtctctatataattttgtccaagtaattagcttcaaattctttattttcaacaaaattaaagatggattcaattgggttataaattgacagatcactggagtaattatgacaaatattactaataaatttttgttacaattttgaagacattaaaagaatgaagttgctataataaaatctcttctattccaataaacttattagttagaacacgggcttacacccataacaatgaaaaggaagaacaaaatgatgctgaatccatttcattccagcaataagtaagattcatccacagacaggttaccatgcataaaaataagcccattcatctaattaagggatttatttctaatatttttatgcttagtaattatttgtcaaaaataccaagaaaccattcacccaaatatatatttatatttttaagtgatttgtatactaaaaatagcatgacacatcatgattcactagaaattaatactaaggcttatggtacaagagaatttaaaaatatatcataaactttaattcttatacatgtttttgttgcaaagatatattttgagatgatgtgtaaagatatttaaaacaaaaaatagttgattcttgttattttctataggctatagttgtagtctgtaaagtcaccacgaacagtaaactgctgaatactaaagcattgttcctaggggaaaaatacagggttaggttcctttgagcctctggttacaacattttcatccaccagtcaatacataaccttgttttatgtgtgtttctgtttaaagacagcttgtttattacattttattgattcattaacattgcactcatagccaatatcactataactaatgccttaactaggtttctataatgtgtatttctccacaacggacatcaccacctacttaaactcaggaacactagccagtacttcagtactatgcttggggccatttcgaacaatgaaatcaccaataaaaagcaccaaaatatgaaaaacatgacactacatagacctcaaagagggcatttgtttgcagtacgaaagttgaaacaagaaagcagaacactcaacctcaactgagaacatgcttattgagcaactcaaatcttcacaactctgccatttctgtgaatgaccttaaaagcttccagtactgattttggggcaaggaataattttaccatgttggtgaatttgcaaatatggaacccgtgaaaaatgaagattaactatattacattgggataaagttatgcaggagagtagaatagaaatgaaaaagtttgtaaaaaagaaacaatatcaaatttcagactattaaaaatcatcttttacatgtattattagcaagatgatactgaagggtaaatcatcagttttaatatcccccaaaaacatttttaaaatgatgcaattgctgtataatttaaccttaatatttataatctgaccatactgcaactacttaaacctataataaaatttttatatcaacttaaaaatgtgcaaggaagtatatggtttctcaaggtgttttataatacatatgagcaaaataatttcaagattactaactttagaaatagaagctaaaatcacaatgaggctgattaatacaaacaaagaaataaaaactacacaaaatcccaaacttaagagtcaggcgttgaaaccaaatagccattcagtgatgcagacacaaactctggggctcacactgtaatgagtgtgttgtgtttgtcttattaataatgatgaagtatttttttataaatactgctttgctcatttttatatagacaattttcaaacaattttatatttctcagttgcttcaatcaaaaagaggtttgtggccgggcgtggtggctctcatctgtaatcccagcactttgggaggccgaggtgggcagatcacttgaggtgaggaattacagccagtctggccaacatgacaaaaccccgtctctaataaaaacacaaaaattaggctgggtgcagtggctcgtgcctgtaatccaagctctttgagaggctgaggtgggtggatcacgaggtcaggagtttgagaccagcctggccaacacggttaaacccagtctctactaaaattacaaaaattagccaggcgtggtggcacacacctgtaatccccagctacttaggaggctgagacagggagaattgcttgaacctgggaggtagaggttgcagtgagccaagatcgctccactgcactccagcctgggtgatagagtgagactctatctcaaaaaaaaaaaaaaaaaaaaattacctgggtgtggtggcacgtgcctgtaatcccagctactcaggagtctgagacaggagaatcacttgaacccaggaagcagaggttgcagtaagccaagatcgcaccactgcactccagtctgggtgataagagcgagactccatctcaaaaaaaaaaaaaaaaaattttttttaaattaatagaggtttgtaagaatatctaagaaaaatatttcctcagacaggagcattactttaaggaaaagatagtactatataaatatattccactgttaaatatttccagtacgtgtcttttcctcccagagatgggacagcttgctggctctgtgagtaaaattaattagtcctagctttttgttgcctttttttttttttttcccagtggcagcttgtaactttatctcttttttttaaatatccataaattttccatgcaacaataggataaatttatttcactaattttaggataaagaaaatgaataaaattaaatgacttatattgagtaaaataaaagaagaggaagaaataaatgtttttgttttgtttttaagacagggtctcactctgtcactaaggctggagtatagttgcatgacatcggctcactgcatgcaacctctgcctcccaggctcaagggattctcctgccccagcctcccgagtagctgggactacaggcatgcaccaccacacctggctaatttttgtttttttagtacagacgggattcgccttgttggccaggcaggacttcaactcctgaccccaggtgatccaccctccttggcctcccaaagtgctgggattacaggcatgagccaccgtgcctggccagaaataaacgtttttattgtgagccaacagaaattactgattcatgcattaaaaatattgaagcagatacagtccaaaggcagcatcatattactgtagagatactacatgcaatctgcttggaagactgtgcatagtaagcacttattaggtagataatggcactcccctgaactgaaaacagaagttataaataatatttaaaatccaaaaacatgatggtactaatattagtacaagaaattaccaccttatatcttatattaacttagcaaaaattattaattaatatttaatgaaattgtcagttagatggtcagtaaaaggaagtctttggcccacagatcaaaattcacaatacaattttatccttaatctttaaatacaaaattacatttacgagcgtatttttaacttcgcagcagagatttaagccagtggcaaatacagaggctctcaagccagactacctcagtttaaatgtctgcttctcaactttcttgctttaataccttcaaaagtaaaatactgttcacatgtatcttacagagttgttataagtatgaaatgtctgactacatgtaaaattcttagattaatgcatagtatacagtaagcactcagtaaatgttagcagctactaaataaaaagtagccgcattttcaaaaatgattcggaactttctagtaatcaccaacattactttcagaagctctagttggaaatatttgttaaaatcttctcttaaaatctcaacagatagggagaaggtggaatctcacacactgcaggtgggaatgtaaaatgctaccgccactttggaaaacagtccagcaatccctcaaatgctcaaacctagagttatcatatgatcctgcaattctactcctaggctatatacttgatagaaatgaaaaatatgtccaaataaaaacttgcacatgaatgtccctatcagcattattattaatagccaaaaggtggaaaccacccaaatgctcatcaattaaccaatgatatatgcatgtgtttgttgtatccatacattggaatattactcagcaatgaaaaaggatgaagtgctggttcataccacaacctgggtgaaccttgaaaacattgtactcagtgaaagaagccagtcataagatgttgtatgattccattgatattgaatgtctagagttggcaaatctatagacacagagagtgcattagtgattgcctaaggtggtggtggacagtgtttggggagaaacaggagttactgctaaagggaagtgggtttcttttgggagtgatgaaaatcaaaattgactgtggtgatggttacaaaactctgtgaatatactaacaaacaatgaattttagaatttaaatgggtgaattttatagtatgtgaattatatcttagtaaaactgtatctcctccgctgtccctccctaaaataaaaccaaccaaatctctgtatacccatcacttattaaagtacttggcaaaacactgtgacttagtacttttgggataagcggatgaatgaatgtgcattcacttcactttaaatgttttttcccctattttcatctattagagaaaactgtaatcatgagaagaaacttacaaaatttgtaaacatcatctttcacatttagagtttgtttttataatgtgacaaagtttttctgttaaatatctcacagttgctgtacctagaagtgctttaagaacctgaaatagtactaatggtatgaaaaaggtagacttatatttcaacctttaatatagaaaatataatttgctcaaattactcacactgttctaatttccatatgctctaaagtaagtatgaataagatttagacctaattgctggtgacattaaaattcattcaattcttactgtcaacaaatatttactgaataagtaactatttgctaggcacagtgctagaaagtgatattacaaaaatgaataacacagcctggtgacagagatattacaacagaattatgtacaagaatatgatacatgctatattagggcttgtgccatgcgtaccacaccaaatgttttaagaatgaagagaaaaaaaaggaggctgggtgtggtggctcacgcctgtaatcccagaactttaggaggccgaggcgggaggatcacttgaggtcaggagttggagaccagtctggccaacatggcaaaaccccatctctactaaaaatacaataattagctggacgtggtggcacacacctgtaataccagctactcaggaggctgaggcaagagaatcacttgaacctgggaggtggaggctgcagtgagctgagattgtgccactgcactccagcctggaggacagagttaaagtgtctcaaaaaaaaaaaaaaaaaaaaaaaaaaaaagaaagaaaaagaaaagaaaagaaaacaaaaaaagaagagaccagcactttgggaggccgaggtgggtggatcacttgaggtcaagagttcaagaccagcctggccaacatggtgaaatctcatctctattaaaaatacaaaaattagccaggtgtggtggtgcgttcctgtaaccccagctactcggggcggggggctgaggcaggagaatcgcttgaacttgggaggtggaggttgcagtgagccaagatcacgccactgcactgcagcctgggcgacaggctgagacttcgtctaaaaaaaaaaaaagagacaatgaagaagagtggctaaaagctggagtagttcaaaatatttcagagataagggaaaatataggaatgatagagaaaaataagtaggggatttccaggtagagatttgttttttattgctacaggttaaagacacagtttaggaattactcttttagacaacaacagtgtattttcattagccatgaggttgtcagtattataggatggaggtatttacagtagtgagcagagagcaggcagagtcttatataactgtgagaactctggagctgtcccatgaaacttttaacgagctaaattttctattttacaaaaggacaacgtaaataattcatctttcaatattaagacaacatgttaactaatcaaaaatatcctggctatcacaaaattcaaaaggaaaatgtcaaaatatctacatgtttatattttgaattgaaagatattctaaaagttgtttcatgattatgaactgcacaatggagaccaatgtttggttcacaaatgtgtgctgttaattagattgagagtgattgtatatggtttctcacaaaggcatcttgagttcaaccatgtaaattgatggaattatcaaaacatcagacctatttcatttcaacctggcttttataaccaaggtgtgtgtgtatgtgtatggtgtgtatacatgtgtggatgtgtgtggatgtgtgcgtacatgtatagtctcccccaatataaatgtgaggctacattttcaggttaagagggctaatgtgtatcttgccttctcatcacaaattgttctacaagtccatccataatgataattatatccttcaatagacggctgcttacttcccaaattttaaactgaacaaaaatattacggatccaccagataattttaaatctatctacttgaactgcaaaattaggagttgaatgaaaaccttacttagtgcagtatgtttaaaactcatctttggctaggtgcagtggctcacgtctgtaatcctaatagttttggaggccgaggtgggtgcatcacctgaggtcaggagttcgagaccagcctgggcaacatggcaacatcccatctctactaaaaatacaaaacttagctgggtgtggtagtgggcgactgaaagcccagctacttgggaggctgaggcgggaggttgcagtgagctgagatcgcaccattgcactcccacctgggtgacggagtgagactccgtctcaaaaaaaacaattaaaaattaaaaacgaaaaaaaaaccacgtcatctttgagcatgttagtacttgctttgatacaaagggtctgcttgagtttgtattaaatcatttaactctccttgtagtttcctctgttattaaatgatgagaatgttcctaacctattgcaaatgattacttaccatggaaatacaaccacaattatactcaagattattccaagcacaaagttttgcatggaatcactgtaacattaacactgtctaataagaaacaaaacccaaatctttctgttaggagattattctccatgggtctccggccttctgcaatcttacctcactacctctatgctggactagctttccaagggggtttgtataggaagcatccttataagacaaaggtagtgtcttcctctggatcaaagggcagaagtgcttcctgtctgtcataaaagattcgggttccctgagctccgggttcctctccttttaacacatcctgctgtgtgtgcaggtgtcacttcacattgccctgtggaaactggggcctggagatgttgacaatgtgactactgctatggggcaagtaataaactatccagctccctgacccaggaatctcatgtcttggggccaatgtttggttcacaagtgtgtgctgttaattagattgggcaccagctgagtgactgtatatgatttctcacaaaggcatctcgagttcaagattggcatccatgaaactgtgagcagcctgcaagagggataaagtctcagatacttcacagttcctgacactgtctatcatttccttgacttaggcattacattcttactctctgaagctgttattttgttgttgtttttggggacttaataagcacattttaaagataaaaataaagcttaaactgaaatcaaaataccagtctttattttattttaatcaaagactgccctgacctttttttgagatgagatcatgaggtgacgtttaagctttgtaaatgcttatacataacaagtactttcaacaaaaaattctaacaattcttgatgccttatatgccagcttagaagaaatcaatcattgtttactttttcacttaaatttgcagatgctgattaaaaggcgattactattttttttacacttaggtctttctttaatcaaaattgactatatctctataaatgggaatcagggatctgctattacacaaaaatagatgtcaacatatgaaaattaaataaatgaactttgccactgccctgtaattaagtgataaagatttcattcacttttctaaggttttaatcatttatgataacttttattttcttaaggaaaaattgaactttgattttaaaaattctaaagttttcctaaaatatagcactaatatgtaatggagcaaactttcaaagtcacattctatttcattagaaatttgtctacaaatggccgggcgcagtggctcatgcctgtaatcctagcactttgggaggccgaggcgtgtggatcacgaggtcaggagatcaagaccatcctggctaacacagtgataacccatctctactaaaaatacaaaaaaaaaaaaaaaaaaaattagccaggcgtggtggcgggcgcctgtagtcccagctattcaggaggctgaggcaggagaatggcgtgaacccagaaggcggagcttgcagtgagccgagatcgcgccactgcactccagcctgggcaacagagtgagattccgtctcaaaaaaaaaagaagaagaaaaaaagaaaaagaaagaaatttgtgtataaatacaagttttaagagccccccctcctccttcttaataaatattaatgcatttgctcctccactaaaaacactttaagaaaatcaacagccatggcgatctcatggctgtgatgtgctcagggcaagcatctatgtaacatatccctattctgcaacacctcacccagcagacagaatgtttacctaaaactccctgagcttatgaaaacttcaacaatcatgtcaacatttaagctcgttcccaattaaccagtcttaccaagcatcacttctatgaacattttaaagaaaaaccagtgaagtggtgaaatcaactctgtccaagcttgcatgcaactctaggaaggcggttagcttatctctcaactagttcttatattacaccactatatttaacatctgacttttgttgctgtttataatattaccctttattttccttcaattttagaacctcagtttgtggccacctacagaataaactttcagctttaccaaattttctcttcttatgagagatgcacaacacttaatagagagaacactatttttcaagctgcaatatactgtggtgttttcatgttagacataaatagtgtcagtgaaaatgttgatcaaagaaatgaaattctaataggatgtcagaagaagcagattaaacaaatgatctagctgttccaaagacatcaaaatgcaaaataattcttttctggaggtattacttagccaaatgtaatttctttagcaatttcaagaaagaataggaagtgttaatgttagtttaattatagaaataatgtcaagtgacaatggcagggaagaaactgaatgctgatttgatctacacacagtgacatggacatttagaaaatatattatatgataattatataatcctggctaaattctttgataggtttcagttgcccctgtaaatgttctaaaattaaattcaggagggtatattgtgatatttaagaatttaacaaagttatctcaagaacatctcacactctcatgctatctgcaatccttgaatatatggtgactaatatatcttaatgtatttttgtatatcaatattttatcatgttatttcttaagacgacaactccaaataacaaagtgttgaaagaaaatatcagaaccaccaatatttttctttccttgacatacttgcagatatatatttttatgtttataacagaagttaataaagaaacatgcccagcttattatttctggattgattgcagaaacagctactaccttttttgatgatgtggaagtttatgcatgtattgaggaggcaatagctgtgataaattacttcaagaaaataacactttccattgcctttctttttttccttacaacctgtgttatggagtgaaatgtacttggccttgtcttcaggaggcagaagcaatcatttgcagaataggctttgtgtgctaacatttaatattaatctattcccaggcattatattattaactttgaatagatgctgacaagtcttgtttttggagggaggtggggcagggtatcgctctgtcacccaggctgaagtgcagtgttgccatcatggctcactgcagccttgacctcccaggctcaagtaatcctcccacctcaccctcaagagtaagcaggacaataggcatgtgccactacacagggcaattttttttattcttgttttttttttagagacaggagtctcactatgttgcccaggctggtctcatatgcctgtgctcaaaggatcctcctgcatcggtctcccaaagtgctggaattacaggcatgagccaccacatccatttcacttttgctttttttttaatgtgccattgttgcatctgtttctactgaagaataaaacagataccactatgctctttgttttccttttttttttcttttaatcactacccatttattaaaggctaggtggatttgggtaattcatcactgctaagtaaggtaactaagagcacgtttatggatatattatatacactggttacctcgtttcaataaataagcagctggtaagtcatctcccagttttatccccaacttctaaaagaaaaataggtcgaaaaaattaacaaatctggttaggaaaaatacactgagcccaactattatgattccctggattctattattacgtttatttattagtattatgagtctttgctaaaatgttgacttcttatggaaggcctctcaacagtgctgtttaaaaatcacacgtaatcaatcctttcactcggcacaccctaacctttttcccttcttcctttttctccacagctttcatcaatatcaaacacaattcatcatgaaaatcaagatttattcgttttgttcactactctatccccaatgtctggcacatactagctgctcaataaataagaatgaatgtgtagtataccacatggatgaagtatgggaggtattcattcaagcacttatcatgcgctctcctaaattacttaacatcagtgactgcccccactccacccgctcctcatccagcctccactgaatgaggaaacagcaccatgaatgaatagctcatgataaaaatttagcgatcgtcatcagtgtatccctttatccctatcattgagcctttggttctatctccaaaatatttattagatttctctacctctctccatctgcattgtcgtgaccattatctgtcttttgaatcagagcaatactctcagaacaggactcccaaaggcagtcagaggaatcccttgacacaagaaaaaactcacgtcacttcctactttaaaggcctcaatggccttctattgttcacaggataaaatctacactccttactgcagcctacagggctgcacggcctggctcccacttgtcctccagcctcaaccccctgtcacgctcccgctacgccgcccaccgagctcccgctatgctgtgtctggaagaagccaaccccttgctggattttacaccttggtacttgttgttccctttgcctggagcactcttgcctcctatctttccatgactcattcacagcctctagagagtatctcaaatgccagctgcacaggtcttcctgtgaccaccctaattaagcagcctccctaactactctctcatcaccttgtttactgctaccgtggttcttatcaccactttgttaacttactctttgttaaatgtaagccccgacaggacagggactttgcctctgtatattcacagggactaataaaatacgtggaacatggaaattgctccatatataacaaccgaatcaataaatagaacattctccctcacttgggtggcatccctcgtctcactaattagaatgcctgacacagaagagacatgctacaaatgttgaagtgaatgagaaaactgaaatcttttattgtatcctgagtggcacccagaaagatctttgttcattaatatttgcatataataactggactgagagaaaaatgaattcatttgattgacatttactcagtgtctgtccagtgctggaaagagcatatggcaatttggcttgcaagcacagaacagaggatatcatttctaaactgttcggtaatcccataaatataggacacacacatttcaccaaggcatttggcaaagtttctcattatatcttgtctttaacatgcaggaatgcagattggatggtagcccagctgatgggtttggtactagagagtggttagatgaagacagcttaagcatgttcaacagctctttcaatgcagcaaatatttcttgagcagctccggccagccaagtactgagcttgaggctagagtaataaaataattaagtgtggtctcttacctagaagggtgcataagtcttcccgtaaaacatttcagatctctgccctgtaccattgacattatttttaaattaatatattggatggatatatacagaatgtacttctatcaaaatcatatgagaattttaggggaaaaaacagaagaaataataaatcaggatccaagagatgataggtatctcaaaggctggaatgaattctttaaattaaatttagtgcagatatgaggtcctaccaatgaatccaaaataccaactacatatttacaaaatgggggaaatatggaatgtatccactcataaacattccttagggattttaatttacagtactctataaaaatctattgtgatatagtgatcacagaaactagtttcaccttctggtgtatttacaaggaagtaatcagcctgtgctcagaccacacttaagactactgtgtttgaaggcacgcaccacactataagaaaagttcagaggaggcggtcgagatggacacgaggatccttgctgcaacagccaatggtgttgctaaaacactgacactaatgaagaatttgtggaatgttaagaaagtgggggggttgcaggggggggtgggtgacagaggaagtcattctacaaaaaggtacttgcagatgcatgtttatagcagcacagttccaggttgcaaaaatgcggaaccagcccaaatgcccatcaatcaatgagtggatcaagaaactgtggtatgtgtgtgtgtgtgtatacacacacacacacacacacatacacatactactcagccattaaaaggaatgaattaatggcatttgcagcaacctggatgggaatggagatgattcttctaagtgaagtaactcaggaatggcaaaccaaatatcgtatgttctcactcataagtgggagctaagccatgaagatgcaaaggcctaagaatgacacagtggactctggggactcaacaggaaaggatgggaagggggtgagggataaaagactacaaattgggttcagtgtatactgcttggatgatgggttcaccaaaatctcacaaatcgctactaaagaacttacacatgtagccaaatatcacctgttccccaaaaacctatggaaataaaaaatttaaaaaaagaaagtgtgggtgaatggtagagaaggagggagctaactgtccataagtattcaaagagcaggtatgcagaagaaatagtaaacctgttttacacgatcctagggcacaggactaggaaactacatgaggacagattttgattcaccataaaaaggcctgactatcagtgctgtcctgcgaaagtgaagcatctcgtgaggaagtcagctctctatcaatgacaggtctcccacggccactgggacatcctctggacaaagacatcagactcaggacttaaacgctgcatagacagcagatttctagaccctatgtccttgacattttatgatataatgaaaagggaactaaaaaataaggaagtatacattttcattcactcaaccaatgcttgctatggctaggcgctgttttaggcaccgtggacacagcagctaacttaggcaaagtaatcccagcattttgggaggctgaggcaggcagatcacgaggtcaggagttcaagaccagcctggccaacacagtgaaaccccgcctccactactagtacaacaattagccaggcgtggtggcaggcgctacttgggaagctgaggcaggagaatcgcttgaacccgggaggcggaggttgcagtgagccaagattgcattactgcactccagcctaggcaacactgcgaaactctgtctcaaaaaaaagtatgcttgtgaagcatacattctagatggtttgggacaaaatgaaacacaagcataaaacaccaatctttgggtttgagaggatacttggtgctagtttgaggcaaagctacacctgaggcattcacactttaattttgtttatttatttttaaattttatttatttgtttttttgagatggagtctcattctgtggcccaggctggaatgcagtggtgcaatctcggctcactgcaaactccagctcccagtttcaagtcattctcctgcctcagtctcctgagtaactggtattacaggtgtgcgccaccatgcctaatttctgtatttttagtagagatggggtggggcggtttcaccatgttggccagaatggtctcaaactcctgaccttaggtgatcggccagcctcggctacccaaagtgctgggattacaggcatgacccaccacgcccagcccacactctattttttatttatttatttattttcatttttatttatttatttatttattgacagagttttgcttgtcacccaggctggagtgcagtggcacaatcttggctcaccgcaacatccacctcccgggttcaagcgattctcctgcctcagcctcctgagtagctgggattacagtcacctgccaccgctcccggctaatttttgtatttttagtagagatgggttttcaccatgttggccaggctggtctcgaactcctgacctcaggtgattcacctgcctcagccttccaaagtgctgggattacaggcgtgagccactgtacctcgcctccacactttatttttaagctggaagttatcatagatagagccatttgttacaataactgcagtagaccttttgcctttattcccgctatatgttctcctttcctttctaacctgtggcttccactcctcaccactgcaaaacaatttacaattaattgcttatactgcaattattaataaaatatattttgccatttactaaactattagatatgttttctgagtttttacacattaaaactttccacagtaaacattataagtgttcattattagaattcataaattatacagaagtgcaaaaactaaaggatgtatctacttctgttactttcacagaataatctatgcatatgtactaatacagatttagacatatgttatcccaaatctggtagtacttttgtagcttttcattttattctagtactaaaattattagaacactagtctttttggaattgatttttaaagtcccctaattggaattgcagccatctttttggtctgtcctccgattgaagaagatctaacagtgcaatcatcatatgacacttaataagcatccttgctgggcacctggtccataagaacattgagaataaatactttcctgacattcagtcagattgattgatgcacatcaagtcaatgacactggggaacgctttgtggatggaatgactacataataacaggaaaactctaggaagatacacttaatgaatccttattgatctaaatacacctaaaacttgtttgtaactttaacctctgccacattatagaggaagacattccaaactcaaactttttttttatatactttaagttctagggtacatgggcacaacatgcaggtttgttacatatgtatacatgtgccatgtgggtgtgctgcccccattaactcatcatttacattaggtatatctcctaatgctacccctccccccaccccccaccccaagacaggtgtgatgttccccactctgtgtccaagtgttctcattgttcaattcccacctatgagtgagaacatgcagtccaaactctaacttttattttattttattttattttattttattttattttttgagacggagtctcgctctgtcgcccaggccagactgcggactgcagtggcgcaatctcggctcactgcaagctccgcttcccgggttcacgccattctcctgcctcagcctcccgagtagctgggactacaggcgcccgccaccacgcccggctaattttttttttgtatttttagtagagacggggtttcaccttgttagccaggatggtctcgatctcctgacctcatgatccacccgccttggcctcccaaagtgctgggattacaggtgtgagccaccgcgcccggccccaaacttttattttatatatatatatcttagtagaagttgaacaaatatttccgaagctgttcagaacaaggtagaattcaacatactggaaatgtgtgtgtggcctgaaaattatagccagctactccagaaacctatagttgtggtgttttggaatttggtgacttggccatggttattcaattaaggaaaatattctcatacttatttttatatcagtctttcctactcaggtccttcaaagaaaacatggttaaacctattctctccccttcatagttgcttaattttattttttccaacccaggaagtcctaacttgtacaagtgtatcctcataaaatactaatgccttggtcatgttatctactctgaagtcattttaagcctttccctttgctaggatgcttaccacaactggatatttcaagtatggaagcaccatgatgtgaagcaaagatgggaaagtagttttatttctgtttgcaaacaaatgatgtctccttcttcactggtattttaggtaaaggcattaggaaaaactactggcttcagagaagaggacttaatgacactaagttgtgtgatctggtgaacacactttgaatcagttttgtccaaatgcatttccctatgtttgccaacatcaagctccctattataacatagtttctagaacagtgctgcccaatagaaggactagtaaagccaccgatgtgggccacatataaaattttaaattttctggtggccatgataaaaaagtaaaaatatgcagatataattttaatattttatgtagatgcaaaatattatgatttcaacaaataatcaatataggaggtattaataagatagtggtcattctttttttgtaccaagtttttgaaattgggtgtatgttttgtaattacagcacaactcagttgggactgtccatatgtggctaacggctactatattggcagacaattctagaaccaagctgaaaaccataaactgatggcaagtgtggaaagagcacagtttgcactctcagactactagattacctagactctttactcttgaaacatcaaatatgaattcatctattaaaaatgtcaccataattatagatgtaggttagcctttcttttacaatgatggggtaaaaataactgatttcccaccagctttccggtgcaacatccattaccataataaagcaaatttaaatttaattagaatgtaattaaaggtaatgtgggtgattccaggatagctgatttgttttactagtaacagaaacgccctttgccacttatatgaagctggaacaatattaatcaaatgacttattatctgagagaacaaagtacagaaatatttacataacatagtaccataggcagaatatccacgttaaactaatgttaagaacgacaaagggaagatacgccagcataatacatcttacttcttttccaataatacaactgggacattgcaaatacccaacttctagaatctgtcaggaagagtaatctacatgtatttaattctctcctgcacatgttgaatgactaaattgtgaaaatatatttgaatgcttttttttagaaatcactatacttctttgttaggttacttaatttttagcataaacccaccaaatcccatgtcaattgttaaaaatggatctattcaagcctacagtataaatttatggtttcccaggaaatcacaggaaagttgttgtaaaaggtattaaaattattgccaataaatcccatgtttaaaaatattctattaaatgtaaatgttgaaagtagtattaataacagctatgttcaaagaaaactttaagggcaaacataaaacaatttacttggaaggccatattacaagattcaaagatttgctagattctttgaacaggtttcgatgggagatgatgatcttgtgatctgtagataagagactctgaatatcaagtgatcagaaaccaaagcagagataaggctactgaaaatagcctatttcctgtgctggtctggacctaggctttggggtataggcaggcctgataccagaagtccgatgtagcaaaaggaatgaaggaaaaagatgaagagacaaaaacatgctgacactgtcattatttctacaaatgtcaaaataaaattcaaaatgaaatcgattttttaattataaaaattcttctgagaattgtttattttcccctccagacataagtaaacttaaggcaaggaatcatatttaccttctgatatgcttcacatagaatttgccactttttatcagcaatattaaaaatgattatgtgatgaatagctttcagtctatacgccctgagagcaggcaagaaaaattattcaaaaaaacaaaatgcttctcactattaaccaaaaaacagcctatgaaaaggcacagtcaaatgatcttggtcaacaaggctaaggcacccattcattatttattgagggcttattgggtataaggacatctaagaattattcaacgtcaagtgttgtgggccaaaagccacaagagaaaaggattttcacttccaagtccagcctaatagttccaatcttggaaagaacgagagaaataacagaggaagagaaaagaaagagaaacttggaggaggaacaaataaacagcagacatgttgttactggagaagacaaaaaatgcagtgagaagatagagacgtaagaaccgcgcaggtacatgcatgtatgcatgtgtgtgcatgtgtatgcatgtgagtgtgtgtgtgcatgagtgtgtgtgtgtttgcatgagtgtgcatgtgagtgtacgtgtgcaaatcaagagacacaagcacagggctgcgtgtgcaatgcggctagctgcgtcatgcctccggaagtacaaaacaccactatttatttatttacgcctctggaagtacaaaacagcactatttatctatttatgtattttgagacggagtctcgctttgtcgcaatctcagctcactgcagtggcgcaatctcagctcactgcaacctccgcctcccgggctcaagtgattctcctgcctcagcctcccaagtagctgggattacaggcgcacaccaccatgcccagctaatttttgtatttttagtagagacagggtttcaccatgttggacaggatggtcttgttctcacctcgtgagccgcctgccttggcctcccaaagtgctgggattacaggcgtgagccaccgcacctggcctaacaccactctttttttttttttttttgagacggagtttcactcttgtttcccaggttggagtgcaatggcacgatctcagctcactgcaacctccgcctctcggtttcaaacgattctcctgcctcagcctcccgagtagctgggattacaggcatgtgccaccacgccctacttatttttatttatttatttatgtatttttagtagatacggggtttctccatgttggtcaggctgatctcaaactcccgacctcaggtgatccacccgcctcggcctcccaaagtgctgggattacaggtgtgagccaccgcgcccagcccactctttttgagggtagggttcacaactgtgtatatgtaaaatttttagtctcaagatttctttaaagtggtaaacagtcatgctgcagactcataaactgtgtaaattcatacaaaagtttagtaaatcttctcaatcccgtttgtataggctttcttaagtgaaacaaaggggcagaaataaacaataggtaatgataactgtggaaaagaaaacaggcagcacagcatgaggaaaggacgagcacagggaagcccaatgggtcagaatgatgtgcaagctcggtcttgcctggttcaacctcatgaacaagagaagatcagcaaacgtgataccccagccacaagagtaacactgataataataattacgattctatcgtcatcattcatgtggaggtgcatgccaggtgctttcgaattgttaaccacccacaagaagcctgaacacctagagttctcctcatcgtgtacataagcaaagggaagggagagagagtctttaattggccccagaatatacagcaataaatggaggagctgaggagtaaggccaactggttctgaaatcctgcctgtggtgtctggctgtaaaactctgactcttgcctaagctgaagtctagcctgggacctgaagtgcagcaactctgactgaagctggatggttactctacttccagtattgtgctcaatgaagaggtcagtttttgagcaaatacacttgactctttgagggagttaagaaaaatgaaattgaaataaagccagaatatacaccagagaaaattttggtgtctattttcctgaaatcacacaatctatcttaaaatttttacaatgctcaaaggtgtttcatcattgcccaccaacttctatcctggtaggtaccaggaaattatcatctctcaggtttcaaataaagcaggtataggccagctgttcttgctcacagtgatactacaggcagtcaaaaaataaattcgctgatgaatgttacctcctagaacttccacgcgtgggacttacacactgatgcacgagtttccattggcatttttgacagcatctatactcctcttatatcaacagaatatgtccagaactactggctttataagagtcgagttatgcagttgctacacagggtcattttgccagtcctttcattcaaaaccatctttggtgactcccttcattgagaacaagatgcaaagtcttcaggtgttcacagtcctttacgattccctttttccacctatttcttgctatactttcccctttcagtatccactcttttctcatcctcctcctctctgctgcggcctctcctacttcacaaacaccagccacagggagcttgtttctaggtcatgcttcatattctcctgcataactgcatgttctctgggataacctttcccctacagcatctctaactattcaggaagctaaccttgtggaaggtccattcaaattatacccgtcttacaaatcctgctctatctcttgctgttgtttggcaacactaggatcctttactgtttgtcagcctcatcctgtttcccggcttctgcaactgtttttctcagtacagtgcagagtcccagagtgcagggtcctaaagcgcagggtcctagagcacagggtcctagagcgcagagtcctagagcacagggcgaacatggttatccacggtgagatcttcttcccctagtacctaccacagtctcccatataggagacattcacatgtatttgtttaattttatgaacaactgtagagcttactctgagaaaagaggtttcatactgacctgtaattggatattctctttctggcctagtatataacctccctgattcaggctgcggctcagagttcttcaaagagtaagtacagttatcactgttgaaagtgactctggctgtaaacatcaaagacgtgatttctaatgttgttgtggctgaaactccgcttaaacactagggagaacaacaagtccacagaagtcacatgtctgttcattaaacgcacaggaagaccttgaactaaacccttcacaaaacatctaacacagagcttgcaatggtgaggagcctctctctcctgcacagccagtgaacaatctaggcttggagagacagagagaagagcaagagcattctaataagcaggtgtctgtgacctcctgagtaaccaaccgtgaaaccaagagataagtacagtcatgggtcactgaacaacgaggacacattttaagaattgcgttgttaggggattttgttttgggaacaccacggaagggacttacataaacccagatggtacaggcgactccacacctaggctctatggggcagcctgctgctcttggctacaaaccggcacaacatgtttactgaatgccttaggcaactgtaacacaacaagaaacatttgtatatataaacacaaaaaagtaaagtaaaaacacagtataaaaggtaaaaaatgggacactcgtctaggaaacatggagtttgcagaactggaagttgctctgggtgatcagggagcgagtggcgagtgaatgggaagacctaggacatgactgtccattaccacagacttcaccaacactgcacactcaggctacgctaaagttagaaaaaaacatttcctttcctctgtgataaattaactttagcttactgtaactttttttactttataaactttttaactttttgactcttttaataataccggtttaacacacaaatgtattgcacagctacacaaaagtattccttcttcatatccttactctatatgctgttttccaccttaaaaaaaaaaacaacctttaaaacttttttctttttttttgagacggtgtcatgctctgttgcccgggttggagtgcggtggtgtgatcttggctcactgaaacctctgtatcccaggttcaggagattctcctgcctcagtctcctgagtagctgggattacaggcgcatgccaacatccccagctaattttttttgtatttttagtagagatggggtttcaccatgttggccaggctggtcttgaactccgtatctcaggtgatttgcccacctaagcctcccaaactgctgggataacaggcttgagccaccatgcctggcctatctttaaaacatttttgttaaaaagcaagacataaacacacagtagcctgggcttagagagggtcaagatcatcaatatcactgtctcccacctccactcacatctggtcccactggagggtcttcagggacaataacaaacatagagctgtcatctcctgtgatcacaatgccttcttttggacacctgctgaaggacctgcctgaggctgttttacagttatctgtttttttttctcaaaaataattagtaggagccaggcgcagtggctcacgcctgtaatccagcactttgggaggtcgaggcaggcagatcacgaggtcaagagattgagaccatcctggccaacatagtgaaacctcgtctctactgaaaatacaaaaattcgctgggcgtggtggcgcatgcctgtaatctcagctacttgggaggctgaggcaggacaatcgcttaaacccgggaggtggaggttgcagtgggccaagattgtgccactgcactccagcctgggtgagagagcaagattttgtctcaaaaaaaaaaaaaatagtataagttctataaaataactataaatacacaaaccagtaatatggtcatttttctaatcacgtactatacataattgtatgtgctggacttttacacaattggtatcgtagtaggctcattgaccccagggtcaccacgcacacgaggaacgcattgtactaggatgttaccatggcgaagacatcactaggctataggagcttttcagctccatgacaatcttatgggaccacccttgcagatgtggtctgtcactaactgaaatgtcatggggcacatggctgtatacatttttttactgtatttgaatgatacggacaattactgacgaccaaaaatagggaggagaggaagaagatgacatggaagtaagtagaaactatttctgaaggagaaaaacttacatgggaaaaagactccttctttgtgccatggatttgccagttgacatgactgaaaagcagtcacccaaacaatgaccaggaggaccgagtgctgctggtgaagcccaccagagaccagcggacggggactgctgctgtgttagcgaggggaaaaacagcctaggacactgcccaccccatcttcaagggcttccctgactctagcaaatcataaaaaccaaaacccataaatgatgaggccaccaagtcataaagaagaagtcaaacccaatcattacccttttgttagatagtatggaaggagacagtgtattttaactgattctctttttttttaagacagagtcttgctctgtcacccagcctggagcgcagtggcacgatctcacctcactgcaccctccgcctcctgggttcaagtgattctcccgcctcagcctcctgagtacctggcactacaggtgtgcaccaccaagcccagctaatttttgtgtgtgtgtgtgtgtgtgtatttttagtaaagacagagttttgccatgttggccagcttgtcccaaactcctgacctcaagtgatctgcctacctcagcctctcaaagtgctgggattacaggcatgagccactgcgcctggcctaaactgattttcattctactagaattaatgttctcatataaagaattaagtagtcagctatatggaaaagtgaagctttcaaaaataacccattccctattgatctagccagcttcagatttataatagcaaacaggataccaaattataacgagaccacaaattcttatctgcagaatcctcatgtccatggagaggtaaacttaagtctcttcaaaatctgtaaatactattagctaattattctgaaactggttgctgatacattttaaggtttctcttaaagttaactcactttctaagattctaccactactggtgggggaaaaaaaagcagtttttttgttaacgtataatgtttccattaagtggaaattcaagggcaggcagatgctatctcttaagagttgagcattttgtattaaaattaaccagcatgatatttggcatctcactgggatgcaaaagggaacattatttgctgctgcgtgccattagtgccagaaacattttttcataaaatgaagagtgcagctccactaatctattagtcctaagccattttagatcataccattgattaactaaaatatttttttttcaaatgacggctgatgacagagcactaccttaaaagtcaaagaactataaattaaacatgaatccagttaccatgttctgtcaaaacaagaaatacatgcgtgtgtttgtgtcctttatatgggccaacataagcttttcctattatttctggaaatattcagatttattagcacacataaaatcctcagactgaaattattataacatttatttcaaactgaaaaaaataccaaaggagtaatctggggggcttggtgtctcatggtggactcctatttgcttttgccccttttcttctttgggtcttaccttccagcatgcttaaacttctagttatagaaacccatggcaacactcactgcccagaataactatgtttactcagataatgaaaagtggtgtgataaccttatctcctgggataattaggttatgtccaaaaagccaggctccttaaagatccttttcaatgatctccatgcttgatacagggcactgactttactacaaaaatatttaaaacactgtggcttttcatactttcacaactttttattttatgttcagctgctactcaaaaaactaactttgtgcagtattccaaccaatacatcatcacataaatacatcttttacacaagcaagtgcacttgaagaaattccagttgaaggcatacaagaacctccaaggttacccaggaaacctattctgacgagttatgtatatgtcaaaacacatgagtctacatcttcataaaactgtgtgactgagagtgcatcaggggttaagctacgtaaacaaacaaaaccagcaataatggcaacagaaatattcacaatattggaatcaaaagtaactatttgtgacatctaatgttgattggttatccataattttttaaagccttcatattaaaaacaacgaaagaaaaatacatgaaccaagtatactatgtaaaatggataaatgaaagcagagaaaagaaagcaagcaagaataaatatctactccaaaacccaactctaaaatgagatgcataggctctttaaatcacaaaatctgtgtggcttactaatggaaggatccttagagatcatcttgtccaatctaccttccaacgtggaaatttattatccatcatacctaataccaaactgacgcagtccagcagaaacactccggcctgagggtatgcactgattccattgttggacagctagctctatttgttacagcccaacttttgacggatgtgtaagacttgaagacattaagacccagaaatgactctatgattatactatgattataatgactatatgattatacctcattataattactacagcctccataaatatatgctactcaaagtgtaaaaagtcacatcaccagaagacaaacataatgtgaacccctatcccaaggataatttatctgccatatgcacaaaacccagtctcacgatattcgagtctgggtcctctctgagaaacagacatcaagatctgatgacatgtgcaagaaatttattgggtgagacacctgtgaaggaagcggggatggattctttggggagttgcgattgttttgtgtcttatgtgtggtggaggtaaaagaagttatgcctatgtaaaaacacatagaactgtgcaccaaaaaagttaatttaactatatgcaaatttttaaaattagaaaatatatatttaaaaatttggagggaggtgtaggaagctgagaagcatcagactgggatacagattcaactctgtgaaggaggcagtggcggcagtgggggcggggaaggaaggaaagaagggacgtagggaaggagggagagagggagagagggagacggggaaaggaaagaagattttaaatatgtgataacacatgatgttccaaaaggtgaagaaaaacaagccatctcacagattgctggaggcagtctacaatggtaaggctaccaagaaggacaagttggacagctctatcaaaattagaaaggcacaagccctctgatccagcaattctacttttaggtatttacatgacagaaatatgtagacatatgtaagatgatgtgtctataaaactactaattgcaagattgcttataacagctaaagctgaaaaaattcagctcagtgtcaataataggggacaagttaagttaaataccttgtgttccattcatttaagggaataccatacattcttgaaaaatactgatgctcatatgtactgatgtagagatatttccactgaatgaaacattgcaaaaatatgctatcatttgatcatctgtattaaaaagatatatatggttgtctatgcataaagtatgtctaaaaaagaagaaagcaacgatagcatcagatgcctcttaatataaaggaactggctgtttgggcaagagaagttggtgggaaatgtcccactgtaaatcctagtggaaaattttgaaatttgaatcatgtaaatatattacctgttttgaaaggtaagcagactctattttaatgaagatgaaaaagatcattctaaatgttaggtgaagaatacggttcattagggaataagtgtcaaggcaggaagacctcttcaggaatggtggtagcaaaacagggggtctccgtggggctgacagaccctgcatacatgctaaagatgcagccaacaggagttgatactgtaactagatataatggatcgggggaaggggactcaggctggactgacttttggcttgagtatccagataaacaatgttggcatctgttgagatgggtatgactgagttacaaacagcttagcaggtgtaagaagacaaaaacaagaattctgtttgggacacattaacgtagagatgtttgttagccttccgaatcaagagagtaacagtacatcggagtccataaacgtgcctactgagatcaacagtgcttttaatttgcggttcttcagctgcagtgagacggggcatgcttcttaggagtcctggtcattgtgatgtataacactgtgactatctgttcatcatgtttgctcatttgcctattgggcattttgttccttattatttgtaagtgctgttagcatattcaagaaaattggcccttttatcacttacattaaatggttttcttcagttcatcaattttacttttacattgtttatatcattttccctagaggaactctaaatttttatgtggtcatatttactagtttttctatggcctgtggcatatattcttttcataatcaggaaaaacaaagacaaatctcatcagtaattattaatgtgaatgtaaattctataacataaaaaatacattttatataatttcagaagttttgtagtacttacacaagtgttgagggcattcattcgtcacttttgtagttaacccactggaatatctttaataaagtaataggatttttctttattccttagaaaaattggatatttagggatattcttcaattcaaagctcatgatcaactaaggattctttagaggaatggtacgtattattttttacttacagcattaaaactcagctagagataacaattgtgtttgcatagcttatttttaaaacatgtgggcacagtgactttgtgcaattattttagaaaacaccaaagtagtatgagagacactgctattttttaaatgctactcagcacaactaatgacttataaaataggtaattatttcctttgaggtcagaagtagacttaaatgttacagcagaaagccaaaataaatgtgattggtttttctcaaaatagtaaattagcacttgactcccacctgcacactggtatttatcttcctctccacaactagtaactcaatttgatgcagtagcagggtactgggatgccacacgtggtttaactcaccaaggagacagctgctttgtactgacacccactacacttgtctttaccccaacaactgttcacattaatctgagttaactaccctttggagcaacctgttcaatctcagttagtcgcctactggagtgcacagacacaggtgattgagatttgagggaaccacagtcacactgacagaaatggaatctcacccactgcatcttcagtctggctggagaacctgaaggagctaaaggcttgttagaaaatcctaaagaaccataatcttctatcgcatatgcaaagcctgttttacgtcaaatgattgtcagtggctattaagttgcattcacacaaatcgctaacaaattaatatctgacattaagaggggtttatttcagtcttttgtttttcttaaattataaaatgaattgctcttttatttttgaaacgtgcatacactttaaaaatgaaagtgactcccctctccacccaaccccctcctaattccactctccaggggaaagtgctgttaatattttggtgtacaactttgcaggctcttaaagctgcattactactcatacatatgtatatgtacgtatgtatgaatatgtatgattgatatatatgatgcacatatcaatctagcctgctgtttaagcaaaaatggtatcatacaaaaagttctacaattccatttgtactcaataatgcacaaaactccttccgttaaaggaactacagttctaccacatttttttcttttggtgtcatggtgtaccacaccacgtgcatatcagaatttatgtaaacattctcccttggggggccattccagttgtctctgtttttcataattaacaataatgcatctgtgaatatgtaccaccatacacttgctcatctatttgtgagagaccgaatatgagaagtgaagtttctgggtcagagaacatgtccacttgcatttctgataggtattatcaaatgccttttcaaatggtggttgttttacttgacattctaccaacaagaaagactattttataaggctgcatattcaaaagttattttaaaagcctcattacatgtaagacaccatatggagcatgtcacaagataaacacatcagtactctcatataaaagtagattttggccaggcgtggtggctcatgcctgtaataccagcatattgggaggccgaggtgggtggatcacctgaggtcaggagttcaagaccagcctgaccaacatggtgaaatcccatctctactaaaaacacaaaaattagccgggcgtggtagtgcatacctgtaatcacagctactcgggaggctgaggcaggagaatcatttgaacctaggaggcagaggttgcagtgagccaagatcgcaccattgcactccagcctgggcaatagagtgagactctagtctcaaaaaaaaagaaaagaaaagtagattttaaggaaaaaaacgcataatcacctactaagaaggtctagaaagtgtgattaactctttaaaatctaataagatatgaactctacctccttgaccacccagtgtctaaagggttattcctggggtcagctttgcagaaagtgcttccttatggagtggttgttagttgactttgccagacagcctctgcgttttcattctctaacggaggctggcaagactttgtatagagatagaaacaccaattctagtttgttccttgagaaggaaggccaagtgactggttttctgaggctgtgtgtatctcccaggcacaagcctctgtccccaggagagcctgcacgcgtggcaggacacatttgtggtggggctttttacgctccctgtcatcactttttatgattttctcagtaattccttttctttactgaggaaatgaacacacataaaactggaaaaacgagcaaagaattacataaaatctacacaaggacttcctggcaaaaagcttcactaacataatagatttaagttcttacaatcagtggttcccaggcctttgaatttcatggaccagaattttttttttaagtgaagaattcaacatagaaacaactattatttgttctttaaaaacatttttgaaaacctcactcaaacaaataacctagcaaaactgttttataaaataacgcctggctgggtatgaggactcatgcctctaatcccaacactttgggaggccaaggtgggaggatcacttgaggccaagagttccagaccagcctgtgcaacaaagtgcgacccccatctctactttcaaaaaataataaaattaaattaaaataatgggtattttaacaccaaaaagaagagttttgcctagacagcctcccagacataagaacagacactacatccaccatttccctttttttttttttttttttttttttggcggagggttaaacactcactaatatttaggaattagtcctctgcaatttttcacttgtcctgataaaatccagattttacaaagtttaaacaccacaaaaatcacagggctgtctatagaaggaagaattcctgttactcttagctgaatattcccaataattctttgactttctttctttgtcttatcaaaccaatgagaatctccaggcatgcatgttttaggtcaaattaaggaaacgcccctatgcctgatcctatttggaatttccatttttactcatgtatgtcccacgacaataaaattattgaaaagcaagtgccaccagtgtggatgcatggtctccacaaatccactcttcactgaggagatttccccacatccactaaggtgtgggtcgcctccagctgcagcgccatacctcatgagatcagcagagctcaggctgaatagcattcctcctttcctcctctctactcacacttcctcagaggctatccagcatgataatgaagaacacaggtggtggggtcagacagccactgactacctctgtcactctggatgggtgaccgtcctctctgagtatcacttcctcctctgtaaatgagaacaatactgctcactgcatagggctgcttgtgtgagaacagcacgagcaggcccacatggtgttggaaaaggccccgacgcatagcaagggacaaatagtgctggtgattgacactagcccctgccaggctcttgggcattaggaatccatagtcaagcaatgaaagggtcctgccctcatggagtttacactctagcaggaaagacaaatatttaataatcatgcaaactgaaattagaactctgataggtgatactaagaagggggtaaaggtgttcctgaagcctggggtctgggtctgtctgtggagatccaggataagccaccactcctgaaactttaaagatgagtaggagttaacaatttggcacagggagaaaggagcaggggtccagggagaaggagctcacccttccttccttccttccttcctcttcctttttcctaaattgtaaatgtcacctactctaaataaggcagtgtcttaaagaacaacctaataatctatgtactggtataaaccttaaacaaagttcaaatttactccaatgcacaaaaattcagttaatctctatgaaacaatcaaggatggcattatattctagaattcttctgctggccctcctccaaagcgacatatgaaaagctgaagcagcatacatttagcttgtttcacagaagaatacttatcttctaagtgcacaaagtaaaacattagaaagggattcagtacagaatattaaaactctgtatttttcaactgcctgcactgaggaaagatagaaaatctatcccacaaaaaagtatgagtttggaccagtttgtttaaatttaacaaaacaaagttcatcatggctgatgaatcaatctttgttttgagtccctatttttacgcaaaaccgcactttgcccgacagcatgagctacttgtgaaataaacacttcaagcctcaaatttcaaaggagttataagtatgttgggggcagcaatgcaggaataactttcccaccccctggtcactatcaacttggagaaaaattatttccaatttgccttctactttgtacccttgtggtgtctcagatttcacagtccctgaaggatgtgctgtccgtgcactcacaaacaccccactctggccatctccactttgctacagatcacagtctctttgcttccagtaacttttctctatgttccagggtcacaacccctcctcattatccccaatttccttggggtaaatttctaagaagtgtctttataccttaaatccttgtttctttttaaagcaagaaaatgctggcatgaggtcagatgcaaatcactttgcatcctcaaagcaactaaatattgtcccattgtagagatgggatgtccttaccatagtgacagtgacagcatactctctcatggctccctgcagagtccttggaagcgatgtgacaggttttcataaagagggaagagaaaaggacttaaaacactgcctgcaggagcctctacacccttattactttctgggttattgcctcatgaggaaaaagaaattcaatcatttgtcggggggaaaaagtgtgctttttcttttcaaagtctacccttttatgaaatatttaagcaaacatttatttacttctaaaccaccaggaaaagaaagaaaagcaaccaacatttaacttcacagaagaaataaacatttcactaactgttatacctttaaatttgttttgatatacagaagatcatgaatacagtcatctatattttcctagtcagtgcaacaaaaaataacactcactaatagatcagaaaatggagatgacaacacttaattccagaatccaggaattttttcccatagtttcctgtaatccctttaagactctaaacaaagtattctaccttttttctttaagaaaacaaaacgaatttcatgcttatttgatatttctaataaatgattttaataatagactaagccaaaaaggaagctggtctatattcattaagaaaaatgcaaccataatcacatttcgtgaatggacaactttcacatatccacactctcaatgcctacaaagtttaaatggaaagatggatcgttcaggaaaagcgttgagagcagcatccagacctcagcactgccctcacactgagcccttcaaaaggacggcacgaggggccaggtgcagtggctcatgcctgtaatcccagcactttgggaagccaaggagggtggatcacttgaggccagaagctcgaggccaccctggccaacatggcaaaacctggtgtctactaaaaatacaaaaattagctgggcgtggaggctgaagcaggagaatcgcttgaacccaggaggcgggggttgtggtgatctcagatcgcagcactgcactccagcctgggtgacaagagtgaaactctgtctcagaaaaaaaaaaaaaaattagccaggtctggtgacacatgcctgtagtcccagctgctagggaggctgaggcacacgattcatttgaacccaggagatggaggctgcagtgagctgagattgcaccactgcactccagcctgggcaacagaatgagactctggctcaaaaaaaaaaaaaaaaaccaaccaaccaaggatggcaccagggaccactttgtagggtgtaaacaacaaattgctcagcataagaaccattttgaaaacacaatgaaggaaaacctgagatcaccatgcttcactgggtctccagggcccagacagaggtgacgcaccaggtgtgcgtgacgacgtcaccctacaacctttagtccaccttcatgctccagccactgcctgcagctgcgcccagacagcacctgactgcagttgccgtgcctcactcactttccgccttcatatgcctcatacactgccagctcgtgggacgcccatggagactgacttagccatccggctcatacacaagcctgggggagcaaggcagctggctcagggggtcaggcttgactagggagaaccagtcttttgggcagatgcctttgaggcccattcgtcacagctccttggaaggtctgcagcagggtccacaccgggtagcttgttgaggtgaccagccgcacaatcagggacttccgggcatggctccatgtcttgataacatgccagtggctagaacactcctgagcaaaagtatcctgtcagcagatcacgtgttccctgagaaataaactgctgctgagaagctactattaataacagatggcggacagtttgctgtgatacctggactgagtacctcggtgcctctgctgtctctgggccatctggatttctaggtgtgactgtggcagacgtgtctcgggtgcagaggaaatggaaacaagatggtcctgcttctgaactcggcctcatgccctcatgccccaagtctgaagttcttttggtctcctcttctgtacttctggaagcttccactagtctcttaccatgctcacatgaactaaaagccagatgcctaaatgactaacatgataaaagattggcctgtaaggccacagtgacaaatgtcacctgaaagacgaaggggaaataatttgcattgaagggtgcgcttgcttatcctcaccccttggctcatccaagtagcagaagagtttgggttgcatgaagcttccaaccattcaatgcaggctgagctccacagcagtgcctaggggagcacagctcagattgtgctgagagccacctctcttgtctcacaggtcccatccctgggctgaggctctttatcgaggaaagaaagaaatgtcctgtctggcctcacacacctgaaagtcgagaagcagaagaatggccgggtgcagtggctcacacttgtaattccagcactttgggaggccgaggcaggtggattgcctgaggtcaggaggtccagaccagcctggcatggccaacatggtgaaaccccctctctactaaaaaatacaaaaattagccaggtgtggggccgggcgcggtggctcacgcctgtaatcccagcactttgggaggccaaggtgggtggatcaggaggtcaggagatccagaccatactgactaacacagtgaaactctgtctctactaaaaaatacaaaaaaattagccaggtgtggtgacacatgcctgtagtcccagctacccaggaggctaaggcaggagaattgcttgaacccgggaggcggaggttgtagtgagctgagatcccgccactgcactccagcctgggcaacagagcgagactttgtctcaaacaaaaaaaaaaaaaaaaaaaaagaagcagaagaacatgtctcatgcacacttgtgcttcctgccccctcccacacccaagggaggaggatggtgctcatgcagaagacatgtaatctcttcttccagagttttttgttttataccagcctatctcttacttcccttgttcggccagcaggataaaaatcaatggacatttctatcgccaacctgctgcagctgcttctcagaaccaccatccctttatgtagaggaagagagaggcaatttaaaatggaaaagggagaactgcgaagaggaaggaccaaaggtgacttctccctttatccttcctgaaggccaaaggttggagacagtaaaaggaaactttgctgggtttgtagaggcaaagagggatattatggacttgaaagaacttttcagatgcggttggttacaagaatgaaaatcaggcagcaatgagccaaggacactcagcaatgccatcagcagtacttaattccacaaatagagttatcaggtgactataaggtactcagagaaaaggttcatattttagatataaaaagatttatctcttgggtctaagaaactacatatttcaaagagaagaataatcagcttataactaagaagacagactcaagaaatatgagcagtgaagaagataaatggggaatactgaaagttttttgaatttgcatatttaagctggtgataagaaaataagaattgtgttatttcatcctttgacgaaagcgtccatgcatgaccactccttccataaggaagccctggtacacacagagcctagattatccactgataaccccacaccatctcaacgaagctaaataaagatggagaagaaggggctttccacctctcaccagctggcctcatccagtgtcttcaggaaaaccagcctcctaggctttgactggacttccccatttgtgagatgagggagaaaactcaatgacctctatatcctcttcccactctgcaatgtggtgactgaatcgcatgatggatgattacatggcctttacccaatcccctccttactgttactgtccatctatttcgtctttcctgcctcattgtggagatgctgcaatgtgccactgtggctgtctggactacatttcccagaatcccattctctccatgtctcccattgtggtgcactataaataagagaggttcttaggtgggatctggaagatgggctgaagcagccacccttcattctgcagcttacacaggctgttgtcatctacagcctgggcgttggcatcaggcaacagctgggcctgcagctgtgctgtgtcccctggcctttcctcaacatctctgacccagggccaggtgtgcttgtttagcaccctggtggggaaccctggcttctgcaagaccccagtaagcccagaggcaacaacagtgacacaagttccagcatcagggttgagattttcttgctctcccccacttcatatcaaccttctcttctccagagcctgccatgtggacttcaagctccagcatccaatgtgagacaacagccttataaacactgcttgatcagccctcacaattgcagaaggtcaaatccctataacaaagctgcttgtatatatgatcagacatatgtgggttggaaccttgaataaacctcttaaatggggattgtaattgtgaagatctcataggatcactgggtggtttaagggagatagtgaatgtaaagttggcatggaatgcacagtaaatactgtgttattattaactaaaaatcccagttaccctgctgagaaaatctctctcattttttcatagctgtagaatcaagcgaagtaggcattttgcctatgtcgtaccagggactaagctaacagaaccctggctccactctaaacctaagagaatctaatcctatttttattagagaccagaacatagtagctaacaagtacttaacctctccctccaaggaaatgatggcgaagccaaaaagaacgataccaaactggaaaccattgatttcagtaagatatttcactgtcactgaaggaaaacatcattttaatggtggagtttgatatccacattaaaagacagttaatcgagagacatcatacaatagagctatttgggtagagtacttggtgaactgaaagcctaatacataaattttcctctttcagctcttactaatgaaaaaagttattcaaagaagtatttgagatggacttaaatatcaaaaccatacttcttacttttttaaactacttaatacatatcgtgttccaaaaagatctaagtatacaaaattagagtttttctcatcagagaattaaatttaagtccatcaagaaacctcaggctttctgatctgtacagcactttttggtctttttatttcagtctcaaatattttgaaatggtattaagttgtgtccaaatgacacagtgggccagtggctgggggagggaggtgagacctgaatgccaagagcttggggaaccattgtttcccactctattctgatgtccaagctgacacccacagcccactgactgtctcacctccagtgtgccgtgtgagccacctggcacacacacacttcaaagccagatctcagtgtgatacctaaagagcaaacgtcatcttggtcctcagagccatgagcccttgcagattctctgccagtgtcatctttctttctcactgtcactcaattttaaaacactgccgccaagtgttgttcatctttccctgatggcactcagcaccatcaccgacgtccacaggtgcttccagacacatctccactgtgcctccagcctcctcaccaggttctcaccatcccacacctggacagcctgtgacacagccggtccggggtcaccaactcctgccccctttccatacattcattcacatatgatctagtcccctcccacatacacttcactatactatctttcactatataaacctttaatgtggccaggtgcggtggctcacagcactttggaaggccaaggtgggtggatcacttgaggtcaggagtttgagaccagcctggccaacatggtgaaaccctgtctctattaaaaatacaaaaatagtcaggcatggtggcgagcacctgtaatcccagctactcaggaggctgaggcaggaaaacagcttgaaccccaaaggtggatgttgcagtgagccaagatcacataattgcattccaacctgggcaatagagcgagactcagtctcgggggaaaaaaaagaaagaaaaaaacagtatagattaaaatgattgattgtagagaattctgctggtagaaaagtaaatttatacttgcatgagtaacttctacattctttgtaatggattttacataataggagcaggtattttgtgacagtaataggcccactcaagcagctggatatacagctaactctttatcactgttagggctgaaatgaaacttggtttacttcttacatggaaaaaaagtccttttcccaaatatcaaatatataaacttagattcatttagaaaagttgactcctcagtagataataaatgtctcagatgaaacaaatctctctctctctccttaaacacatacagaataggaaaggcttatacacatgcgtgcaaattctggctcctcgcaatgatcctgagtgtgttattttccatttaagccttggtttttctccttctaaaaatggaagcaatgatatctatgtgacaaagctgtagagaagattaaattagacataataagtgcctagcagaaaagagacactttagacgcaattgataaattgtagccataattatgtatatgaaatacttgtaactataagcccattttccatgttgtttattccttcaaggctacacttgtatttgaatgtctatctgccactgtcctggtttacagcaaaatcaccttataatgaagaaagaggctgccatgtttcgaaacctcctttaggtggaatccaatgggaaataacttataaatacatatttttattgtatatgtaacagtatatttttagatttatcttagtgatgttgtaatggctaattgtataaattctgaatcagcctcacttttccttttaactcagttcatatatcaactcttcagccaatggaaatctcctttatagggtgtggcataaccattaacctccctttgtgccccatgtaatttgactataataaatttcactatactgtcactgctttgtgcatagtagatgctcagtgaatattcagtgaatttaaacttggcaagtagtcaaagagaaagaaattattttaagtaactaaacttaacaaaacacctaactacgcttccggaaataggtaaaagaactaaagattacataaagtatcaggtgttagaagtctagaaaaacataattctccaaattgtgattgtcaaaatgtgagcccagagataaattcccatgcctttgcatatgagcaaattggctctacaatttttacaaaagaactatggctctgcactgttggactcaaacgccctttgtgctgcattttcattaattcaaaacacttagaatcattttgcagagcagctcattttgtgcagcagagggaggccatgaattatctgttgtgcctgaataaagctctgcaatgttgagccgtgtctttgctgagtctaggcgcctccacttcttacatgccatgcgaatgacacagtttgaaaaacacaaccaaatgtacacagtattccatcttctacgaaaagcataaggggggaggaggaaaagaggttggttaatggaagtgagtatagatagaaggaatatgttctagttttcaatagcacagcagaattcctatagttaacaatcatttattgtatatttcaaaatagctagaagatttgaaatgttcccaacacaaagaaattataaatgtttgaagtggtggatattctaaatgccctgatttggtcattacatgttgtatgcatgtaacaaaatatcacatgtacccataaataagtacaattgttatatgtctatttaaaaaaggaaaaaaacaccatttaaatagaaaacaacataaaaagaatgtatacatcctttacattgatgagatctctaaaccagttgtgttcagttccacctttgaaccctcagaacaagggatttgtgcttattgctacttacttgactctacctggtgttcagtctattgtgtacaagtctcctgtacatcttatccttatacccaactctataaattgtaagctccctgaagaacggagctttgtcctgtccttcctgacacaggcaacactcaacatttgatgtctatctagtctacgtaactatctcttccagcagaatcattttttttctttctttccttttttttttttttttttttttgagatggagtttctttcctttttctttttttttttttttttttttttgagatggagtttcgctcttgttgcccaggctggagtgcaatggtgcgatctcggttgactgcaacctctgcctcctgggttcaagcgattgtcctgcctcagcctcctgagtagctgggattacaggtgtgcaccaccacgcctggctaattttgtatttttagtagagatggggtttctccatgttggtcaggcttctttttagaacagtccataaactgccgcctttaagtgactgaatcctggaaataagtgtcaaaaaacctaatgtgtatccatgaaagtattacagtaaataacatgtaataatgtgtatatgagaaagaaattgtattattctgtaaggtaaaatgaggtttatgagaattggacagtagccgttaactgctgttttattatttatccttcatgtataggcaagatgctactgaaaatgatcattgtctaggtatgactgaaaaaacaagcatgttcattcattcgtttgctcatccatttattaaacaaatattttaatcatttcagcaacatgtttgtgttgctgccaaagagaaattagattctaacatgttcaacttaaaaagacttcagtggctccctgttgtctctgggagtaagtccaggtcttctgcgggatacgtaagttctttcctgatctggcctctccctgtttccctgtcttatctctcatcacgcccctacttccaccctttattgttactgtcttgtttcacaccctccatgcctctgtaaatcttgtctctgcaaggaatagttttcttctctctcctaactcctatatgaccttaaagacttacctgaggcaactctgtgccctggtaaatctttcatattattcaaatctagagcagctgttcctcctctaggtacccacagcatcctgggctttcctttgtcatagcatttgtcacacctcttcaaatctgtttctttatctctcttgtccactagactcttgcaggccgtatgatactcttatctgcatgcccagtgcctagcatggtacccagcaaattgtaggcaaccaatacatatttactgacgactgaataaatgtggagactggggcaactatgacaaagagaacagacaattaactggaattcaggagacccggacactgtcttcaaaggttgaaagacttttggaaaattaatctttttgtgcaactcctggcattagctaaggtggttgtccaaagcattccttagctctgtggctacctgacattttctaaaagtgacaaagttctaatgtgtctctagccgagaggaacagttacagttggcacttaaaaacattatttgtttgcttagggagacattctgtatcttaatttcagactacttatgacaggtctctgatacaatgtatggagtgtcaaatatatcatcttttctaggttttaataaaaagaaaaccttaccaaaaaaaaggttgccttgacaatatatctatagacaatatctgaattaataaactgaccatttattttcttttctagttaaggatgccatctagaacaaggacttggtcatgacaattggaaagccatccaatggttcatggctcatggcactcatattagcaaaggtgggttcctgtcatccctaccctgcccttctcagctcaggtgcacatctcctcccatcacaccaaacagccacaaacagcctttctcttttcttctttttttttttttttttggtgacagagtttcactctgttacccaggctggagtgcagtgcatgatatcggctcactgcaacctccacctcctgggttcaagcgattcttgtgcctcagcctcctgagtagctgggatcacaggcgcccgccaccacgcccagctaattttttgtatttttagtagagacggtgttttacatgttggccaggctggtcttgaactcccgacctcaggtgatccacccgcctcagactcctaaagtgctgggattacaggcgtgagccactgcgcccggcccaaacagccattcttactgcacgtctatatggtggagttaactccatttctcaggaagacggacggaatgagtattctcaacagataacagattttcataggctgtgaaaccttagtaatttgaacaatagaagaatgacctaagtcagtagagtctcttttcttacaatggcttaagtgctttcagacacaaagaactaaataaggcatgctaacaaatagattggctggtgaatccttatctttttcttaatgaatacacaatatgtaattgatatgctatctgtatataacttgaatgtattgaaagaagggccttaaatgtacctcaaaaactatgtttctctaggtatatttaatattatttcttaaatactattaattttattacttacataataaagatgttttaggttgggtgcagtggttcatgcctgtaatcccaacactttgggaggctgaggcagaaggactgcttgaggccgggagtttgagaacagcttgggcaatatagccagaccccatccttacaaaaaatttgaaaaactagccaggcatggtgttgaatgcctgtagtaccaacaactcagggaggttgtggcgagacgattgcttgaatccaggagttcaaactatgatcacacctctgtagtccagcctgggcaacacggcaagactctatctctaataataatagtaataaaaggtgttttaatatccctcctcccccaagctccaaaagataaattctaaactagtggagtttggatcagtgagggttgatggggaaaaatgtaaatatagcagtcttttcacttcaggccaggcctcgtgaaatccatatctttaaacttcattatgtttctaaatcccttttttcctttttttttttttgagacacagtttaactctgtcacccaggctggagtgctgtggtgtaatctcggctcactgcagcctccacctccctggttcaagcaattctagtgcctcagcctcccgaatatctgggattacaggcatgtgccaccacgcctggttaattttttttttttttttttattagtagagacgaggtttcaccacattggccaggctggtttcaaactcctgacctcaagtgatccgccctccttggcctcccaaagtgctgggattacaggtgtgagccaccgcgcccggccatgctcctaaaactctaacctgtgactctggaatatgtttacaaggaagctcaagattgaggacactgcaggccatctcaaaatgatgtcagagggcagaaccaacgcttacattaatagaattgctggggcactagttgccttgccggagtggcacccttgaagataagaaacaaaatgacagctcgcaccaagtattcacccttaggccacacagataaatgtgcagcaaacctcttcaggctccacttgtctggagaaggagacacatgatatattgatgtaatgtgggaaaaagacgaattaagtaattttaaaaattattttaataggtcatctatctagaaagaatggcaaagaggaagaccagggtgggtgggcaaaatgcaccattttgtttgttaagcaacatcttaaaaggtgcagttaaaatatatgtacacttcctcaaattaagcaaacatcatcattaggatatttcagatactgaaactgatgagaggcatcccacgcccctcttttttgagacaaggtctcttctgttgcccaagctggagtccagtggtgcgatcatgtctcactgcaaccttgaccttttgggctcaagcgaccctcctgtctcaacctctgaagtagctgagaccagaggtgtgcaccaccacacacagctactttttacattttttgtaaagatgaggtctcactatcttgcccaggctggtctgaaactcctgggctcaggccatttccccaacgcctcccaaaatgctgggattacagctgtgagccaccttgcctggctgaacagtacctcctgagatgaagcaaggtgtgggcaggcttcactaaagggcagcattacaacagggaaatagtcatgcgatatgtctaaagcaaattatcatgcctaataatatttctttcagttgaataattacaattcattatggctcatttcttatcattaatattttcatttaaaattataaatgagatgatcacataaaatgaaaaactgactttaaagttaaaataacacacgcttttcctcaggaaaagcgtgatcccagcattttatagaattggaaaatatttgggtgatgatcaaatccaatatcctcatttcacaaatacataagatactcaagagtctaaatgatatttcaattttatccaactagtttggaataaatccagcagaaccagtgtctctggatccccaacccagtgtttccagaacaatattctgtgttacataattttatatttatttggcaaactacattttaaagttaaaggatctaaatatagaaatagtttcgtatattatctttcttaatattaaaataaaatagaatatcttgtattgtatttggtggactgtttttgaagcatcaaatttatgtattaataactatggatcatgtattattattcctcaatggcgaatttggcaccctacagaaaatagtcttcatttctttttttttttttttttttttttgttggccggggggtgtttttttagacagagtcttgctctgtcacccaggctggagtgcaatggcatgatctcggctcactgcaacctctgcctcccgggttcaagcaattctcccgcctcagcctcctgagtaggtgggattacaggcgcccaccactatgcctggctaatttttggtattttgagtagagacggggtttcgccatgttgggcaggctggtcatcaacccccgacctcaggagatcttcctgcctcagcctcccagagtgccgggattacaggcatgagccaccgtgcctggcctatgttccttcctttcaaagaaacattcatatttgaatgacttgactacatagaaaccttgaagaaaattccaaaatgtaggaaaattacaggccatgataacataatttaaaacataatctaataaaagtataaccaagcaataggaagatagtttagtatttaaaccatttgaatataaaagccttttaacctttggtcaacagagaaaatccaattatatttaccattatctaaacgtaaattaagtgggaaaatacctacaatgtgaatgttgatacagctgaactcggaggatccgaacagctttcagatattgaaaggagagaagacataacctaaacttacccaatgtgggtaaacaggagggtgatggggcaagtgaagaaggacaaggctggaacatcatgctaattctaagtcagattacaaagtgtttcaatgccgtgcaaaagaaatctgaattatttttagatgacaaaaagagcacatcagaattttttaagaagcagagaaggacttcttggcaacacagctgactgaattgagaagggctcttcttcctgctccaggcagaactactggaaagagagacagagaggacacagagagagagagagagatcacaaaggcagagaggaaggcaggctgacgggaaactccaggggttggaaaggcagagggaaggccaacccggagtggtgagaacaccagctgactccgcatcagcctagggtcctggtcccagaccctgctgtcaaggctgaaggatggagctgagcatacttgctaatacgagacacgtgttttagggcctgcaagaggcagaaagctagatctgagaatctgtgcataagccatgaccctggaagacacacttggaaaaggggtttacaaaacttcacccaaataagtggcaatgaagcccagggctctgggaggataaaaacacacaaaaaatgttataataaaagtagtaactaaaacagtgacatactggcatagggaacagataatagatcaatggactggaatagaagccctacatagatatgacatcttggtgtacgacagatacagcattctgtattagtagggaaggatagagtcctatataaatgagacctaaatgtgaaaagcaaagtgttaacatttaagagagaaatataggagaatgctttgtaacattagtataggaaggctttattttaaaagttcatgaaaaaaagaactgatacatttgtccccactctatttaaagcatctgcacgtttagacaaactataacccaagtgaagacaagccacaaactggaagaagacaccactgataaaagattagtatccaaaatgagtaagaaaactgtagaaatcaatatgaaaattcaaaaaaaggcccaagggaaaaattgaggaaagacagaactaggcagggcacagaggaggtaacctgaagaaccactggccgtaaggaagatgctccacctcagcatgaatcagggaacgctgaggaacatggcaaggctgccccatcttatagccattttattgtggaaaaatctaagattccgaagatactaagggagaggaaaatgcagagcaatgagcacttccataaactgccagtggccacgtaggagtttatttgtatgaccagatagagagaaatgtgtaaagagctactaaggtttagtattcacatttcactggacctagcaacttcgtacctatgttctaggggcactattttcatatgttcaagtaaacacgtacaaggatttttaatgcagccttatttgtaattgcaaaaaatttggcaacatacaaaatgtttatcaacaggacaatgattacatgcattgtggtagtgtcataaaaaggcatggcatgcccctattaaaataagcatactagagcaatttttctcaaaatgttgttcaggaatagcagaatcagcatcacctggaaacgtattaaaatgtaaattcgcagaccccactcaagagctactgaatccgaaatgctggcagtgggacgcagcaatccgtgttttaacaagctcccttcccccatgtcaggttgagagcagttatactggatttacctgtgtccacatggataagcttcaaaaccaaaatctgagccacaaaagcaactatacaatacaattaacataaatcttaagaccataagtaatatatggacagaaaggatatatgccaactttaggagggatgaaggggtaatagaaatagaagggagaggatttcaaatgtacccataatatgtgatttacttgacaaaatgatatgaagcagatctggaaaactgtgagtatttgtcacatcagcgtgataagtatagaggtgtctgctagattattctctgcatttttcagttagttttgaatatttcacaagcatactggcacagccaagtcagtgtttctgtaggataaccacattgtaagggaaggtgtaaggcaggagagatgggaggcaggggcaacaagttcctatattgcttcagttacccagcaaaggaagggagctttaactgaggtctcagttttctaggacttgatcctccatttggtgctgggagtgaagaaaaggggcagccaaagaagattccaaaatgtgcagctatatggaatgaaatctgaatctgagaagaaaatgtatgtcctcattcaatagttggtatttgataatagagacagcaaatggtggtaaggcaagatgaaaatatcactgacaacagaacccttgggaaaataaagaggaagcaaaaaaaaaaaaaaaaaaaaaaggaatgcctttagaggtaggaagaaaaaaggaagcaaaagaatttctactgaagtcaagagagttttacaatggaaaggatcatgtggtagagaaatgtctagcaagctaaagactgagaagagacatgtgatactaggaagagaatttgattattacagtcctccctccagccccctgaaatgcttattttataagagatcttggagaaagtctatttcattatttgaaagattaaatgtgcgatatggaattggcaacagcaaatatggacttaccttctaagatgttctgagacaaaacataaacacaggggcagtaactggtgattaaagtttaggaagaggtgggataaaaatggaatcatgatcccgggtgaaagggtcagctttgggaaagatgaggaattcttgcttcgggagaagaggtaaggaggagatatcaatacagtgggaagagatgacgagatgagtttaggaaagttcaaggagcaaatagctccatccagcaccagcttggaggcaagagcacatcacaggtgccttcatgcccttaagcgcatcacagtggacttaaggggccgaggagaagagacaaggttggcactggagaatggaaaatggggtttgctaagaaaaggtcaaagaatcaccatcccatattttgaggaaattagggacaaaaatattttatataatgagtgagcatagttatttcaagtagcctgatggcagaacaggagagggtaaaaaagacctgggttcttctgaaagtgaagaatgagaaggcaagcactccaatatttgcattatctcaacatacaatgatctggaagatatgctagagccacctccaaaatatactgaatttccatccattcctctttcccctctagttcttcatgctatgatttctcacccagaacaagacagtagcagtaactattctcatttccactatgctggctccctaagactcattctccctagaagccagagtaacttctttgaaacgcaaatcgtatgatttcactcctatgcttaaaaccatccaatggcttctcactgtcctagaatgaaatccaaagatggaccctgggaagcagaaaagatgacaatcaagagttcttcctgtctctcaaaaaaagaaaagaaaaaaaattatatatatatacgcatattccttaaggttaaaaatacccagttcgctccttttgccagcaccatattgacagcctcaaattctattcaatgattttgaagaataaatgtttttataaaacttaagtaacaaaaagatctactacacaaattaaatcactgttaagtgtgaactaggtaaattaactgataggaacacatttacaaggtatgtataggatttatgaaagcctatactctacttttcctctaaaagactgatttttaattatattatttgagtgatcatttgatctatgtctgtctcccctgttggagtgtgagcttcaacaagacgaagatcacctctatctactttattcacaggattatccttggcattctgcacagatccgacatgctgtaggggctcagtcaatactggatggattaccgaataaatgttagttaaattactgaatactcaacgaagtagaacagaaaaggcttgggcagagtcccaggcaggatgaaggactgcagtccaaactctatgattaagaaagtatgagacttgctatattagtcaattttcatgctgctgataaagatatacccaagactgggcaatttacaaaagaaagtggtttaattggacttaacagttccacatggctgggaaagcctcagaatcatggcaggaggcaaaaggcacttcttacatggcagcggcaagagaaaatgaggaagatgcaaaagcggaaatccctgataaacccattagacctcctgagacttactcactactgtgagaacagtatgggggaaactgcccccatgattcaaattatctcccaccaggtccctcccacaacacatgggaattacaggagtacaaatcaagatgagatttgggtgggcacacagagccaaacaatatcacttgcttatgtcacattatctttctaagccttatttatcttgtttagcaaatgacataacatgatctgcaaaagcaaatgaaaacgctgtagtgtcccattatcataagctgtgatgactaacaattacatggaacttagagtcaatttgttttctgacacactaaaagtcctcagggttgaagaaagcaacagcatctgccatttcattttctgagaggcatcccacataaagcaaacaatgtcagtcacctgccatctctctaaagacccagtgtttgtaagccatgaggccccagggttaggggctctctttaaggcctctcagactctttaaggactttcaagcctaagcatttttacccagcagcatctcagaagcctctatctaatactagaaataagacagaagctatataagcccgggaggttgaggctgcagtgagccgtgattgcaccacttcactccagcctgggtgacacagcaagaccctgtctcaaaaaacaaaaaacaaaaaacaaacaaaaaacaaacaaaataaaggaagataaagtttctttacaaaaagaggcagagaagacttcatagagatatttgctattcaagtgagaatgctcagatcttctcatgagcacaaatccattatcaaaataactaagaatctaagaatgaggaaacaccactgacctcagtgacaagtcattaaacttcaaataaatactcatgatgctttgcagatatcattgttgtggccaataacaaataaaatttaacccagcagctttaatgtcacagcccttctattttttaagtgggtatttctacaaacatatccattaaaccccgagtttgcctcaaaattttaaaacacaattttaaaacatttactaccatcactgagttgttcctttccaacctggtatccattagggacccttttgtttggtttggcacagacagcccattctatacatactgattaagattttactataagaacatttcttacaggcaatccagtatatatgaccaaatttgtatattttatgttgccatattccctgaatatttaaatgaaaagcctcaacaaaaagaggatttgaaaaaatgtcaatatgctaaatttagctgatcttaaaaacaagcctatcttagaacattctctcaggtaaatcatgcataattcatagatttttcccaaaacattatatacacatccatgcatctcaaatcattaaaaaataaattagtttgaaagtgacaatagtcaaataccatcctgggatagaaaagttacagagatagcaaatgtcttacattacaaaggatgtacctttgctatccccagagcagtattttacgcagacactgctgtataaaaaagtcattagttgttttattacatcgttctgtttatttatttttaataaaaatggtgtaaatcattaaattattctgaatttgaaaggcaattcccactcctgctggaagctagctgaggactggatggccctgctgttcctgcttgcgtgaactatccctcctggtgaattatacaactagttaatatacaaaagaaaataggcaactcccatttggcatgtcattcttttatgcccgagagctcacttcacatgcaacaaatctccacagcagtactgaaagggcctaatgaaggaacacagtgatttaggtcagcccagaaaggctttgctttcttcagtgaagagtgtcttgacagaaagcattttctccgatgtaacattacagcttggaatctgccaaaacaacagtcggcacccaacaccgacacctctacgttcactaaatagacgtttttatttacttaatccaaaaccagagtggtccaaagcagttagataaagttgagtattttcctcttttgcaattgtaattgaaattctgttggttgaataaaaactggaacttgcctttctgaggaatgaattcatgccacagaacttgttcagaatttggaatgcattttccatatgatgatggcaggtgctttctcacgtgtgagagggcgacactcctaggtaagtctggccacgatcaaatctctgtattttcttggcatgcagcccttgtttagtggcctccttggccagctgcaccgaggaagcagggactgctctctggggagcagggtgaagacatccagctctgagccctccagggcctatttataatagaaaaacagcctctgttcccttttcaatgcaaagtactttctcatatcaccttaaaacttatttatactgcaggtcatgcacaatggctcacacctgtaatcccagcactttgggaggccgggcgagcagatcacttgaggtcaagagttcaagaccagcctgtccaacgtagtgaaaccctgtatctactaaaaatgcaaaaaattagccaggtgtggtggtatgcgcctgtaattccagctactcgggaggctgaggcaggagaatcgcttgatcccagaaagcagaggttgcggtgagccgagattgtgccactgcactccaccctgggcaatagagcgagactcagtctcaaaaacaaacaaacaaataaaaaaacaaaacatatatacatatatatatatacccactgaacaataaaattttcctacatttgggaagaaaagtaggtttcataaaggaaattttaatgaaacaaccatttataaagaccaatagcatactgttttccactaatattttttcatgattgagatcttaaagtttttctatagaaaataacccagtaattttacattttaattatgtccccttttatatgttttctttgtgtctgcctaatttaatattacttttttttttcttatcaggcctggaagctaccactctttggtattacttactaattgtgtttgtagcacttactgagatacattagctcaaattgaaatggcaacatgaaatgcaattatgcctacttatagacattctagatgtacatgtaccatattgccttaaagtgcagtttgttttacctgctagaaaaactgtgaaacaggaacacagacatgtacacagaactgtacagaatacaaaaaaaaatgtctacagtgttttcctttctcacagttttcatgtgatttagacattaaatgtcttatatgtaaattctgcaactgtagaaaatgtagataattaaaagggaataggaaatcagaatctaagccatcatttaggttctctatattgttcatggactattaataatacatgtatacgactaaagagatcatactaataaagcccatggtctggggagagtaagggactagtactcaccccagaccactctaaagaccaccatctcattcttgtattaagactccaaattggcatccctgcacctgagtctaaccagccccccatgatacgtgatctacagctttgtatagaaaaaaggacacaattctagtgagcactgtttcttgaaaactgcacttcacataaagagattttaatttttaataatttaaaagtaatggagattacactgaaaatgatgatgtctcaatgaaaataagcctcagctaatacaactcacatggagttgtatacaatggagagttatttgaagcacaacaccttatatttatgctgtgttagtgaaatagcacagaaaggttgatgaaaagtgttcactgcatgccaataagccaaacatcacaggaagtgtgtaaatggattaggattcttagacgaatctatctagcacagcaatatgtaacaaattaaagtggaagaatgaaaatgttactatcatcactttccttacagcttctccttactaaaaatgggttgtgtcatttcttattacaacaaaagattttcttgatggggatctgctaatatggtcatgggaggggtggaaatcaagcattaactatggaatttagcacaaagtatacctttactcacaaaaggggggaaaacattttagcatgaagattgcttggtgcttatgttgcactgctaactgcatattctagaaataattaatgctagtctcaattaccagcatgcaactcacattttcagctaaatcaataactgaaataacaacaagggagaattccccttatattatgaataggttctcagccttatttaagcatcagaatacctgggagtcacaatgttctttgcagttattgttatacctagtgtccgtcataggtgttactaattttgtcatgcataagtggcaacaatgttattacaaaaatcaaaattatgagcatgcacatccacaaaagcagtaagcaactgatctaagtatgactggctgcctctatgctgtactgtgatattcgtgtgtgctatctgcttgcttgctaattcctagctacactttattaacaaaggtaggtttaaaaacaattataggataaaaactttaaatttggaatatattatccatttacttatttttcctgaaaaatgagaaaacattgcaattattcaattatagtgataaaagatcagtctagcatacggtgctatgcacaacagtactaactgttggtcagacgtaatctttgccttcgaggtatttccagtctgttagggctggcacaaatcctaaacttttaaatatgtttctcatatagagcacagtagcactgacatgggctacttggctcactaaccattgaagatgaagaatgcttctcagggaaaattatacctgaagcagttattaaaacgagagcctgaaaggaaaggtggaaattatatccttggcagaggaagcagcatgaccaaggcaaggagacaaaaaaaggcattccagctgggcgtggtagctcatgcctataagcccagcactttgggaggtcgaggcaggcagatcacttgaggtgaggagttctagaccagcctggccaacatggtaaaacttcacctctactaaaaatacaaaaactagccaggcatggtggtgggtgcatgtaatcccaggtactccggaggctgaggtgggagagtcacttgaacccaggagggagaggttgcagtgagctaacaccactgcactccagcctgggcaacagagtgagattctgaagaaaagaaaagaaaagaaaagagggaaagaaagagagaaagaaggaaagagagagagaaagagaaggaagagagagacagagaaagaaggaaggaaaaaggcataccatgggcgggaagccaagtgatagcttttcatgactggactgtcaaagttcaagacgagtgactggagaaggtaactggacataaaccagacttagaggatggaatagcaattatgaattgggagacaaggcaaatgttgacaattttaggcatcaggtagtaaaactgtcctcattcttttgaaaattaacctcgctgggcacagtggctcatgcctgtaatcccagcactttgggaggctgaggcaggtggaccacttgaagtcaggagctcgagaccagcctggctaacatggtgaaaccccatctctactaaaaatacaaaaaatatggtgatgcgtgcctgtagtcccagctacgtgggaggctgaggcaggagaatcccttgaacctgtgaggtggaggttgcagtaagccaagattgcaccactgcactctagcttgggcgacacagcgagactccatctcaaaaaaaaagaaaaagaaaaagaaaattaacctaaaaactaaaataccaggaagaacaattgtgtttataataattccccaaactaattataaattttgcagtagacaaaaaaatataaaatatgaaaatagtaagtaaaatagggaaacatttcttaagactaatttcttctctttcaaaccctcttggttggttagtttttaccttccatcttgttgaaattgactttttttttttctgaaaaagtaaactgaatcaaattcaggctaagcttaatgctaccaatttattttcaaagacagataataaggtcacgtagggcagttgtggggaaaggttagaaaaagtgagtcgccctgtatgataaatgacaggctcaatgcatccgttccttccagaaaccctcaacacaactggctagcttttaatgtaatcagaagatatccacatggtctttctctctgtcctcttctcctcacttggtgattttaagaagcaaaagtctggccgtgatggctcaagtttccttgaacacagcacaaaaagataaatgccagtattgcacaggaggagaatatacagaacaagagttctcagttctggccaggcatggtggttcatgcctataatcccagcactttgggaggccaagatgggaggatcacttaagcccaggagtatgagaccagcctgggcagcagagtgagacccatctctataaaagaaaaaacaaaaacttttcagtcctgatgactaaaaccatcaaaaatgagactatattttagactaaaattagactaaaactataatttttctttaattaaatctattcatgtagtataagtggttaatagaaagtatttctgatttgtaatattatattgcagacattagattgatgtttaaaattgcaaaattgcaagagtgatatacaaaaaaaaggaattattctagacaactagagactctcctatatttaaaatttaaaagcatggtattgaatatcctatttaggaggcctttgacaactatttttactttttttttttttttgagatggagtttcactcttgtcacccagactggagtgcaatggtgtaatctcggatcactgcaacctccacctcccaggttaaagtgattctcctgtctcagcctcctgagtacctgggattacaagcatgcactaccacgcccagctaatttttgtatttttagtagaaacgggatttcaccatgttggccaggctggtcttgaactcctgacctcaggtgatccgcctgcctcagccttccagagtggtgggattataggcatgagccaccgcacctggtgacaacttattgttacttctaatggtttgggagaattcaaattatattagtaagtattttagaaataaaaagccatatagtcatgttaatatgctcataaaatcagaagaaatataaagttgataatcaagaaagggtatataagtattggtagatgtaagtgttggtaatataagtattggcaaagtattggtaagtattggtaaaactaatttctaacttcaatgttaagaaaagcaacagtctttgaaatgagttggttatcgggtacattgtagattctggttttacttattcaaatttttttttttacttgaatcagctttctcttcctatcccccatctctaattatgtctaaatgttcttttctgttcatggagttattaaacaaataaacaaactctctgggagcccttgaccctaggggataaagaagactgagttcttctttcttcctgaaaagtactagaaagttcctaaaggagctatgtctgtactactaataggctagggccgcatgtgactgtcaaaaagggtctctataagaggagtcccaggaacgccctgaagtatcaattaaaatgcagctgtttggtaccacttgttcctgcggaaacttagcagtggagggtgtttcttaccccagtaagctgcttctttgcgctaatgcagcgattgctgtgcctgagggcagccctccctcccagtcgccagttccgtctttgcactgcatgttctctctgatccttctctgatccttccctccttcacagctgatgactgaattcatctttgacgtgtggtccctcaactcaatgtaatcttgcatgaaagttcaatatctgccatctggccaggtgtccacttatcccactacccttgaactcccagctccttctccctaactcctctgctgagtgccttgctgtggccccagatgttgcaccatacacatctgcacacctatccaatgaagcagattaagtcccacccacttccactggacagaacagtagtctcttacatcagacttagctagattcctgtatcactactcggttatattatattatttgaaaacatttctggccaggtgtggtggctcacgccagtaatcccagcactttgggaggccgaggtgggcggatcacttgaggtcaggagttcaagaccaggctggccaacatggtgaaacactgtctctactaaaaatacaaaaattagctgagcatggtggtgcagcctataatcccagctactcaggaggctactcaggaggttgtggcatgagaatcacttgagttcgggaggtggagcttgcagtgagccgagatggcgccactgcactccagccggggcaacagagcgagactctaccatgaaaaaaaaaaaaaagaaagaaaagaaaagaaaaaagaaacatttcttattgaaacattcctcacttgcattcagtgaatgacatttatttgatgcctactatatagctggaattctgctgagcatagtagttaaagaaattgctcagatatacacttgcccttgaggagtaagcaaggcagtgactatctaaaaagtgaggcagaagtgtaaataaatggataaaagagaatgtcctatggtggaaatgcagtgaaaacaggaggtaattcctccttaatggcaaggttaaggatggaggggatgccaaggaggctctcaagaatacagatatcttcctggcttacatcaacagtttatacaaattgctgcattttagactcttgtggggagctttaaaactcttgatgtccaagctgcatcccaaagcagttaaatcagaatctctcggggtggggtgggggagggctggggtagaacccaggcattttttttttttttttgagacggagtcccgctctgtcgcccaggctggagtgcagtgacacaatctcggctcactgcaaggtctgtctcccgggttcaagccattctcttgcctcagccgccggagtagctgggactacaggcacccgccaccaggcccgactaatttgtttttttttttgtatttttagtagagacggggtttcaccacgttagccaggatggtctcgatctcctgaccttgtgatctgcccacttcggcctcccaaagtgctgggattacaggcgtgagcgactgcgcccggccaatatatttttttaattccctaaattaaaaattattccatcgagcagcaaagcctgagaaccagtgaactagatcattgcgtccttgataaaataatcttacactaatcttagttcaagagcctggcaagcaccatgcctactacatgttcttatgtgattttggcattgaatttaaaaaactgaatgaaggaatcattctggtaaactaaaatggacaaaaaaactgggttttatgttatctcaaaaattgtctacatcatatattatattaaccaacaatcttttagactttaatagtagaagctgtagttatgaatagatttatgtataccatgaaaaaaatgtacggtagttattctttcctcaattgtcattttaaacagagccatttatttattaatacacttagctggatgctataagtgaatacaattagtaaaagtgataaaactaagtttatgcacaactgtgaaaaatgtgtggtagttgttttaaaaacttgttttcataggtcaagagcttacaatgcattctccatgaaacagactattcattagtttgagaagataaaacaacacatttatggaacactcacatggtgagctaatcagttaacagtcttactacataaaaattacaagaattttcattaacaaaataatagaaaattaaaatgtaacattaatataagcacttatcattacattaagtagttctatatacacacacagacatccacacttatgtacacacaaatgcatacatttacctcactgctatttataattatttaacagtaggttagcatatttattgatatattttttgagacagaatctcaactgctgcccaggttggagtgctgtggcgcaatctcggctcactgcaacctctgcctcccaggttcaagtgattctcgtgcctcagcctcctgagttagctggtattacgggcgggtgccaccacgtatggctaatttttgtttttgtagtagagacagggttttaccatgttggccaggctggtctcgaactcctgacctcaagtgatccgcccaccttgggataccaaactgctgagactgcaggagggagccacaatacccggccagcaaatttaaataatgagaagcaaatagtcctctaatagtaactattgcatttagcatgtttcattctaactctaaactcacaagacatagacatgtaagtttagtaccctagaaaacacagctacataatttgaattattcacaacacttcatcacaacaaagaaattactaaatttgccatgtatgtgtatactacacatggagtagtttcacaaagcaccattgttacttacgttatttcatgttttaaattctgccttcatagcatggactttcagctatgcctcatttaaaacttactggctcgggggctcatgcctttaatcctagcactttaggaaaatataaaaattaaccaggtgtggtgacgcatgcctgtagtcccagctacttgggaggctgaggcaggagaatcgcttgaacccgggaggcggaagttgcagtgaaccgagatcgcaccattgcactccagcctgggcaacaagagcgaaactccgtctcaaaaaacaaacaaacaaaaacctactggcaataagggagggtcagtatttacgaagtgactcatttaaaatacggaataacttaaactagtacaagagtaggcatgctgtcggagtacagatgccagcgaattaaggctctgtgctgccttccatgttccaaaggtagcttgagcgctagtgtgtcaaatcaattgagcattcagggctctgggccagttactagtattagcctatgagggctcttggatagctttattttgggctttgtgtggtcaggaggtgccccagccacaaacactttgagaaacaggccctattcttaggtgatgcttagatgaagtgataatgtattattaatagttttgatattaacatatgtgagattttgtatgtgtgtgtatgcataaacatagttcagactgatataatactgacttctttctgaggccatggaattataaataaagaggcccacatgaaacaaacccatctcatttattctatttcccactgaataaatggcacttagtccaaatgcatttatttttaatatatctgatgcttaacccatgaccaaatggactcaggaaataaactgtcttccttgggtaagaagaagagatcctatgttttaaaggattttacattgtttttgctgtaatttcatatatgaaggaaatctaaaaactattcatgatttagattcattcatgattcacaaattgcattctgtgaatcaataaaataattgaagatatcaaaatatattcactcatgttaaaaaatacggctgatggttgagcacagtggctcatgcctgtaatcccaatgctttggaaggccaaggcaggaggactgcttgagaccaggagtttgagaccagcctggacaacatagtgagaccctcatctctacaaaaatatatatatatttttaaatatggcttagtgtggaagaacacatttttggatttgcaaatcagttaatgaaagccactgatcatttaccttccaaagaagaatcagacatttctaagacatctacactatggtacacttcactggctactattttagtttaaaaaattaacataaatttcattttattagctgatgtttttagtataagaaccagttgcactaaaaatcagtagcacttataatgaactctaagcattgtaaatggtgacttgacataatttagcattgagatgaattcagggaaacatttttcttttgctgtttgtttgtagcatctcagatctcccctcccaactcctctctgtccaccagttccctcttgcccaagtgctgctattctcttggtcactcataatcatttagcctgtgaaatttattctctatttacaactggctgctacatcactacttctgaacctcttgccaaatattattacaaaccaatgaatttacaaaatctgttcaaacacaaagatgggcaagagagactgtattgtcttacaattgcctctgtgttccttaagatttagtgtattttcttccctgggcacaaatttggtatttacttcactatttcaagtaattacttacttggttttgtcattcaaatttttaaatggaaagaaaatgtctaaggcccttagtttaaaaaaaaaaagattaagagtgtcagaattattctgatccaatgactttcgctaagcaaatctttttaaaacagctcaaatagtatgagcattttacaaatgagctttaaacatccttaatctaaattgttcttaacttctgaatacctagaaaactactatttgcagcttaaatataaacattcatgccagactaatgcagaaaaatctagggcaaatccatgattaatatttttttccagtttgcaatatccagctctatttaagaaagggccttaatgaatgctgctgtaataatttaaatagaaaattgatttcatttttgcattctcactgtcatttcaatcagaattgtcactatcactcacatcttctattcatcattttgatttctatctacactcatttcacaaatgaaaaatacatcattaaactcatcacattttccaaaactataagcaagcacatgaaatcctctcttctttgtaaagaactgccaacatgagagggcagactctagctagtaaagcaaaggatggatggttcaaatttatccttgtaagttatggctgcatttaaatttaattgtctataaactaaagggtgcttttctccctctggataaccttaaatatttcaccatggcttattcaaactactgtgaaaacttaaacatatattcctcatgattacatccattttggtctttagaagaaaaactagcagagcttaaatgtattataaccccttcttggacacacgatgttaaaaaactcagtttgttggaaaaaacatattactattctatacacacacaaactccatatagtaattccatatatttacattataagcatattatatatgtgtgtatgtgtataacgtacatatatataatgtatgtattatatgtatttatagtgtatatttatagttttgtcaaccaaatacttactgtttaaggaatatggtttaagcacaaaatattatatggttcaaattgttaaaaaatcacagcttacttaataaaagattaagaaaacctaagcaaattgatcataaatattaggggcaagtaagcatgaatagaattttaatttaacatctttattttgactcagtattattgttttcaaatcataggaggtttgacgcaatggaatatcaaactaagaaacacttagtgagattacttataaagatgtaactcactttttattcgatgtccccagttaatgcttattatcctcaacctgatagttttctttgagtaagaattatttagtgctagaatattaatacttgtatgatcaattacaattttattttattttgtttttttgagacaagctctggctctatcacccaggctagagtgtagtggggcaatctctgctgactgcaacctctgcctcccaggctcaagccatcctccaaactcagcctcccaagtagctgggactacaggctcagacaaccatgcccggctaatttttgtattttttgtagagatggggttttgccatggtgcccaggctggtctcgaacttgtgagcttcagtgattcgcccgcctcggcctcccaaagtgctgggattagtggcgtgagccactgcacccagccttacaatttgattttgatgacactagtcaacagtaaacacaacaatggctattggtctataccatcatgataaagcagattaaagaatatttggcttttgtttgctttgttaaactgtttctaataaagtgagcaagttttgttttaagtcacccattccaatgaatttgctacgtaggctgctggtcagcacaaaccatgatggggcaggtgaacaccttactccaagagctattaggtgagacacacctaacaacatcactgggtttttctcccatgctctaaagtctttctaacactaaccagaagtactacatctgttacacaataaatagtcctctgtcctataacactgtgagtcagatgaactgatcagaaaaaaaaaaaaaatcaatgtttacagagttataacttcagactaaacaacaacaaaaagaaggcatttcagttggaccatagagccttgaaaaatgtaaatgatttaccttcaaccctgaccattccagcaaataaccccaatcaactcttgctcctcaaattttccttcctcttctattttctgttgattctattaccagcatcgaaaccttggagtcatggctcatgccttcctgatacagtcacatccaagaagctctaaagcccaatggctcaactgtgttccctcctctccatttctgctgttacctaagttgagtgcttataaagtgatcagaggagcaatttagaattcatcaaattaggaatgactcttgatgacgaaattacagatgaggcagtgggaattcacaggagagtgggaattcacaggacagtgggagtcaagggagaccaaggacaaggagatgagttcatggcttgttgtttagatattagatgtgacgagctgaaagtctcaatggaagcgatggaaagtagaaatagtataaaagaaaccaagaaagaaaaactccattgggctaggtacagtggctcatgcctataatcccagctctttgggaggccgaagtgggtggatcacctgaggtcaggagtttctgagaccagcctggccaacatggtgaaactccgtctctactaaaaatacaaaaattagctgggtgtggtggcgcacacctgtaatcccagctacttgggaggctgaggcatgagaatcacttaaacccagaggcagaggttgcagtgagctgagatcgcaccactgtattccagcctgggtgacagagtaagactgtctcaaaaagaaaaaagaaaaaatccattggttattacaacagatttgtttatggggtcaaaaaatctatgaagtttggctgggcatagtggctcatgcgtataatcccagcacttcgggaggctgaggtgggaggattgcttcaggctaggagttcaagaccagcctgggcaacatagcaccaccccatctctaaaaagaaattatgtttaaaaaacaaaaaattatgaggatcaaaactataaggataaagaaaaggaagagtaaggatagtgtgagtgtgaataagcacaacggctagatttcaaagcaaatccagaatacgggctttgctggtgaccttggagaagttacttaacctttctgtgcccccgttataactcagatgtttaaaaaaaaagaaatggggttaacaaccctatatcctatggttcttttgaggattaaatgaaaaacaaatatgcttatgaagtactaaaatcacattattagtgaatttaaaaatcttttagccctaaaatttgattttctgtgtaggagctattgtaaccctggatatttttaatcaacatattttatgctacaatatacctaaggcgtcctgcttcaggatgaccacatccaataaatattcaacaagcatctgggattgcacttttaataaacgtctctgtgttgaaagagaattcttatcatttggaggagtcattttatttatttattggccttggaattacttcagactgttgataattctgattttggtaatagtcttgggtgagaaaattgttcaaggactaagagtgacctgtcatggtaacaacagtctgtgaattctataaaatataatgcatggaccttggtttggagaagagcaatttactttagggtgtattcatccataattctcttctcttgagcaactttcatttttatgtgaattctttacaaagtcaaaaacaactgatgcattgtcttagctacatacaattcatttaccagcacctaaactatggaactgcagtgacttaaagggctagcttaggaagactaactagtttgaggtaagtttgcaaactaaaacaacccactttttgatactacatcaaaaactgctttccaaatttttagtagaacttctcttttaagcagacagtataatcattttatgaaggtttttgtgtcctctaaaaagaattcttgtgttccaaactctcccaaggttataagactgaagtcaaaactatgtgatgtatactggccccatgtacacttttccatgtgaaatatcactgattcttcaaaatggaggttaaaatgtaagtgactgatctttcctcagagaattccagaaacaaatatgctttcctactctccaaagacaggaagatgagcaaagtgagaaataaaatgtcaactacttcgatcaaggatgacacctgagtgggaggccccagcccacacctgggctccaagcgccagttagtcctgcttagtcctagctctgcccctttctagctctgtgaccctgaggaactccctccaccaagaccactctgaccctctgtgtgtgtgtatttgttctctctgtaaaagaggaacaataacctcttgccaggtgctctctgacttcatctccagctgctgtcccctgggttcagctcactccagactcacgggccttcctgctgcccggtcctcccacccaacctcccctgagcctgaagggcctctgtacttctttcctccccctgaaatgctgggcccaggctggccacatcgctcactccctcagagaggccaggcttgatccaaatcccacctgccccgtgaggcgtggcctcatctaaagtcagaaattggctccatctcctcgactccctcccacaattccaatttcccattctgccttacatttctccttagcacttatggccaatacactatttaacgactgtgtgttctcttccttccttaattaaatgcagccccacgagtcagagattttggccaattttgttcacttcatatttttaggatccagtatagtgtctggcatgtagtaatgcttaaaaaaatctgtggaataaataaatgaatgactcttctccacaaggttgtcaaatgaatgagatgtcatcggttaaatcgctaagctgtaaaacatatgattcactatttatttttaaattgttaatttattattattctttggagacagggtctcactccattgcccaggctggagtgcaatggtgcaatcacggcccactgcagccccgacctcccaggctcaggtgattctcccacctctcagcttcagactacaggtgcaaaaccacacccagctaatttttatatttcttgtaaagctggggtttcactatgttgcctaggttggtcaaaatttctgaggctcaagcgatccgcctgccttggcctcccaaagtgcagggattacaggcatgagccactgcacccagccttttaatttattttaacattctgttcatgaaataaaatgtagatgacaaactatcggagtcaaggtaaaaataattaaatagaaattagttataagaactataatgcagaacctccacaaggctaagggaaaaaaaaaaacaactactacaaaatacttggtatcattagaagtaaaaaaaaaaaaaaatcagaaaacagtcaaaagcttaaaaatgaaccaaaggtggccgggcacggtgggtcacgcctgtaatcccagcactttgggaggccgaggcgggcagatcatgaggtcagaagttcaactccagcctggccaacatagtaaaaacccatctctactaaaaatacaaaaactagccgggcctggtggcgcatgcctgcagtcccagctactcaggaggctgaggcaggagaatcatttgaacccgggaggcggaggttgcagtgagccgagatcgcgctttaaaaaaaaaaaaaagtactgaaggtttgtggattaaaccagagctgtgacctctggaccaaagtaataaaagtccagcccatagcctggtagaagatagctagatggaagaaaaagaaaagctgcataagagaataacaacaggcccagagaggcctggagacagaggaaaacacagaggattagattttcagaagctgtggacttaagcaataaaaagtctatcaaagtgtaccttgttgatgtatggcacgtggctaataattcctaggttagccctttaagacacattgaaagatgggtcactccctaagtatgacatgatgaaatgaaactgtgtagaccatcaagcaccaggggaaaataacctgtgtgaggcttgagcttttctaagagagaaaacaagataaaaaaataaaaacaaagcccacaacacaaataaacaggatttactctacaaaacaaagctcacatttgcatatactaaggcttgttctctgcttaatcgaaggtaggaggagccagggtgattggctctctccctgagaacttgaactttgcttcagagggcagtttctagcaaggatgagcactgtttctgatctgaaaccgggataaaacataactgagtatccacagctcagagcaagaccgacaagcaagacgcatagttacagtgagtgtatgatagagctaatctgcattttaaattcgcacataacagtcttcgaaggtatgcaaaaaccgttttcaccaacaggaaaatccaaaataagtacattcgaggatttttttttccacaaaataaaatagttacaaaggttgaataaaaaattatctaagtgaaaatcacttcatactgggaatataaatctctggttctttggtaaataaaattaacaagaattattcaactagaactatcagcatataggtttctaggtttctagatgaacagtttactaactgggtcacgtataaaggtcaaaccagtttcttcgttacgactggttaaaactgatcgaataaaaaacaaatctgctatcagctgataaatactaactttaacaaaggctcagtacatgtagacatggtccatgtgtgttttaatttttaaaaggagtgaggagggaataggagaaagcaatatagctctcatcagcactttcttcccatcaggcgctttacatacagtcgctccttttaatctcatatccaccctgggaaggagaattaggacattacagttaagccacctgcccaaggccacattaacaagtgacaatggctggttctgctggatccagcctgggcctccttccaccaccaatctcagaggcatggcccaaagagacagctcagtcttcaggaacaatcaactgaatttaatatttactcagggccaggtgtggtggctcatgattgtaatcccagcactttgggaggtcgggggagggcgggggggcgggaggggtgcggggcggcgggtcacctgaggtcaggacttcaagaccagcctggctaacacggtgaaaccctgtttctactaaaaatacaaaaaattagccaggcgtggtggtgggtgcctgtaatcccagctacttgggaggctgaggcaggagaatcgcttgaacccgggaggtggaggttgcagtgagccgagattgtacctctgcactccagcctgggtgaagtgaaactccgtctcaaaagaaaaaaaaaaaaatttactcagataaaccaaacaggaagtacaaggcaggactcaagacaagttataatagaagagcaaagatcagtaagaaataaatataaataatagttacataatttacagaaaatagtcattaaactgcattcaagccaagatataaattacttagaagattctattcacaaaatattttaacttctccttgaaggttagtattgtcttatttagtgtaaatttaaagtatcatgtacgcaacaccacagaaaagatactgtctggaagctaagacattactaattaaatgcaaagagttgatatgaaaaggaagtaaaataacctagaagatggggcacggtggcaaggctgaggcagtcagattgattctacgagtcctgaagtttgaggttacagtgaactatgatcccacagcgccactgaactccagcctggatgacagagtgagatcctgtctctaattaaaacaaaacaaaacaaaacaaaacaaaaacctagaagagagtaacagcaccatactcagctttctcagctttttacttatttattttttttggagacggagtcttgatgtgtcgcccaggctggagtgcagtggcgtgatctcggctcactgcaacctccacctcctgggttcaagcaattctagtgccttagcctcccaagaagctggactgtcatgcaccatcacaccgagctaatttttgtattttcagtagagatggggtttcaccatgttggcctggctggtctcgaattcctgtcctcaagcaatctgcccacctcggtctcctcaagtgttgggattactggcatgagccactgtgccggtccatacttagctttttttagtgatacatttatactgattagtttaattctaacttgatgggaaaaaaattagtagttgggaatgaatgtataaaaatacttcattcaatagttacaattattcattacatttaaaatatccttacacctgaagggaactagaaaagcatgcctatatattctaaatttctttttctcctccacactctccaaattcccctgccaaaacagaatattgatattacaatggaaaattataaagacgatatactatgaaagttcttaatattcattcattctgagtttcttaaaatgtatagaaagatggcccaaacacctctgtgttctgcagcaggcaggtctatgcaacccacccgccaagttcgaggaagctgagctgacccatccagtctctcgaaaagaaacatttaatagggacttacggacagaagccatgtctcaggcagcagtgaggccagatagtggattcctgtgctgctacccaccacacccagggcttatataccctaggaaaggaatgtgtaggacaactgaagtccatccctagggaaaggcaagaatgctacatcaacctatgtaagggcagggtttatggtcaaggttgttttgacctaaggccaggatttatagcaacagtagataaagtaaaaatcttaagctgggcgtggtggctcatgcctgtaatcccagcactttgggaggccgaggcaggcagatcacccgaggtcgggagttcaagaccatccttaccaacatggagaaacccccgtctctactacaaatacaaaattagccgggcgtgatggcacatgtctgtaatcccagctactcaggaggctgaggtgggagaattgcttgaacctgggaggtggaggttgcagtgagccaagatcacgccattgcactccagcctgggcaacaagagcgaaactaactcagtctcaataaaaaaaaaaaaaaaaagtaaaaaagtagaggcattcccaggagttaattattagttaacatgattagcatccaagatggatttgcctggaaatggaagtgggatggggcggagaattatcttcatttgtatcacttgaggaatagctgagtgaaaacttgctgtaggcagctgggtactcaggttagactttgaagactcacttaggggctagatttagagaactgccgcttaatggctcatagtcagaagtcaaagccacattgaaattaaacagactgccataaaacagtgtggcctagttgaaagacaaagaatctgaagtgagaagttccgggttaaagtccgagacccaccattaccagccatttccttgggtgaatatttaaatctccagtctcagtttcctcgtctgcagaatgaagaacacagtctgcctccctgggagcagaaatacatctaccacttagggttgctgtgagaatgcagtgagaaaagcactggaaagcgtcttatgaagtccaagtcatgcatgagggatcgctattagcagcatgtttaatggaatatatgttctcaattcaaatgacagagactcgcatcctaaaatttaaagaaaagtaagttaaaaagtataagcctggcgcagtggctcacgcccataatcctggtactttgggaagccgaggtgggtggaatgcctgagctcaggaatttgagaccagcctgtgcaacatggtgaaaccctgtctctactaaaatacaaataattagcagggcatggccgcgtgtgcctgtggtcccagttacttggtagcctgaggcaggagaattgcttgaacccgggaggcggagattgcagtaaaccaagatcacaccactgcactccggcctgggtaacagagcaagactccatctccaaaaaaaaaaaaaaaaaaaaatgtacaggccaggcgtggtggttcacgcctgtaatcccagcactttgggaaaccgaggtgggtggatcacctgaggtcagtagtttcagagcagcctggccaaaccccatctctactaaacatacaaaaattagctgggggtggtggtacatgcctgtaatcccagctactcgggaggctgaggcaggagaatctcttgtgtaaccgtcaaggggttcaccttgctcgctgcctagacagagccgattcatcacaacaggggaattgcggaattgcaatagagaaagagtaattcacgcagagccggctgtgcgggagacctgagttttataattactcaaatcagtctccccaagcattcagggagcagagtgtttaaggataacttggtgggtggggggaagccagtgagccaggagtgctgattggccagagatgaaatcataggacccggagctgtcttcctgcattcagtcagttcctaggtgggagcacaagatcagataagccagttaatccatctgggtggggccagctgatccatcaagtgcagggtctgcaaatatctcaagcactgatcttagaggcagtttagggagggtcagaatcttgtaggctccagctgcatgactcctaaaccgtaatttctaatcttgtcgctaatggtagtcctacaaaggcaatctagtccccaggcaagaaggaggtctgctttgggaaagggatgttacaatcttgataaactgtctaagtcataattttgcaaaggtggtttcacttgaacccaggaggcagaggctgcagtgagccgagattgtgccactgcactccagtctgggcaacacagccagactctgactccaaaaaaaaaaaaaaaaaatgtaacaaaacttactttatctacatttggccacagtgttgtaaaccttctaacattctttacaacagcacctaaggcaacgacaggttcttagcgtcaaccacatcttcactttggcctacagcaaaatatatttcccctatttacccaaatggaagaagtttcccctgaattgtgtttttaaggtatctccccccaactcctctctccagatagcacaaatccaagtatgtccctagactcccaagagctgcttttatggactataaaactagcaacctagctttccacaaacatctttactgctattagtgaaaatatgcacttatgatatatgcacgcacacaagcatattcctgtcaccttacagagctaagtctacatcacggagacgtgagcacacatctcatagtgcacatcgttacacatccccccaggggctgacaggcaggggcttggttttatctttgcttcatctcttgcactttaagagtcccttgggtagtatcttttttgtgctcaggtttgatatttcttactcagtctttatgatgtctgactgaaagctcaatggctcaagatgtcctcgagggtgctaatgtttttatctctgtgtcctagcaccctgcccactctgttccctacaaatgttgagtgaattaacttccgtctgaattaataagaaatgtaaaccacttgtgataaaaaataatctatctcttccacacaaaaggtcagtgtaaatctggattctgaacacagactagattgaacaaagatttcttatctgtatcggaagcaaaactgagtatggtgttttgtacaaggaacaaaggaaatagctacacctctcctactgtagacgtcactgaaaaagtctgtttctctccctggggggatactgtaaactcagtagccagcactcaatactgttgccagaagcaggaactggaagtcatcattctaagtcgcctttaataaagcagaaaagatgcaataatgtcttggcaatgtcagttcccaaacactgacaacctaaactacatcttctggccctaggtgcttatcggctgtactgacgtgcttcacattttataatgttggtaaaatgagggaaggcctgtggctctcaaattcttgtatctgcttagctaattccaacccattattgtaagcagcaacaacagaggaaggacagtctctcaagactgagcactcatgttttacccagttacaatgctattgttctctgggtgaatcagttttaaagtaaatacatttatggctgggcgcggtggctcacgcctataatcccagcactttgggaggccaaggtgggtgggtcagttgaggtcaggagttcgagaccagcatggctgacatagtgaaaccctgtctctactataaatacaaaaaaaagttagcagggcatggtggcaggggcctgtaatcccagctacttggggagctgagacaggagaattgtttgaacccaggaggtggaggttgcagtgagccaagatcgcaccactgcactcaagcctgggtgacacagtgagactccgtctcaaaaaaagacaaaaaatccatcttcaatagaggcaatgtggtgcattacaaaggggatgagtgaaaacaggctggcttcaaatgcgggttttacactttaccaactcagtgatcttgcccaaaatactttgtctgagcatgtattttctatcttataaaaagagatatatgccgagcacacacctgtaatcccaacactttgggaggccgaggcgggcggatcacctgaggtcaggagttcgagatcagcctggccaacatggtaaaaccccatctccactaaaaatacaaaaattagccaaacacagtggcacacatctgtaatcccagttacttgggaggctgaggctggagaatcacttgaacccaggaggcagaggttgcagtgagccgagattgcaccaatgcactctggactgggtgacagagccagactccatctcaaaaaaaaaaaaaaaaaagagatatgaaggaggattaataagacaaatgtacataaaatatttcacacaggcccacatcatgaaatcccagatgttagtcatacatcatctgcctaagtctttgaatatttggggcatgcaaaacaaaccaaaaaggagttgcctattgaagaaaaggcaaatgtcttgacatgatgttcagatcttatgtgattcttcgccatcttacgctagcaggttgatgtctttgtcttcccccacagctctactccagttgaaccggggtaggcgtactctctaagctacttcatgtctctccacttccagaagcttcttcctgctggtacctctgtccccatctctcaggactccatctgccatgaccctttcatgattccactgagaagttacttttctttttcccttctttgaacatcgaaagcatgctgtgcctctttacggtagttcttttacaacttggcacggtgctttgcaatgtaatcacttgattacaagtttcattttcttcattagaccgcacactccttgaagtttatatggctttattttttgcacagagtagttattcaatatacactgactgaatatattttaaaacttcagggagtaattaaatcagccaaagtaaatttagtctacacatacatttatagaatgtacaccatctccagcctcagacaactgcactcaagttgcccctttcccgagccactttctggctaattgctaaacatgtttccaccagatctgcccctccagctgcctgcagctccagtagaggctgtgtggagaagagccatgcagactgcatctgtaaggtcctgcctgtgcactttccgcttcccaaatgaggacagagagcactcctgccagctaccaggcagggcccaatttctaaactctgccttgaccccctgccttcccatcagaggagaagcatccttacctaagaacactacttcttcaatgaccagtcttccttccccagttctcttccttccccagtcctcttccatccccagtcctcttccatccccagtcctcttccatccccagtcctcttcctgggggtatgagaaaaaactcttaacaggtgctggctaaagggaagcccagggtctccaagatctatatctcaccagagtccttcacagcagtgccagtcggagttggctgtgttcatgttccccaagctatcacttgctcggtctttctgcagctcagaggggatggctggactaccaatcctaatgggttgggacctttctgcaaactccagtctccccatctgccctggtcctgccttgttagacagttctcagtttgagttcagataacttttagagtccctggttcctattataatacttaatattttgtccaatgtctttcttcatcatatatatgcatatatatgtacatatatacctgaaaatacacacatatataatgacctcatgcaagatcatctgtctctcagagtacccatttcctatatatgaatagatggtgtgtgtgtgtctatatatatataaatcaaatgactgttttgtatttatcccactcaatcatccatattcataaataataatatttctctagcattccagaatcaaagttaaaatatggcatgaggaccaggctcactgcctcatgcctgtaatcccagcactttgggaggccgaggtgggcagatctcttgagctcaggagtttgagaccagcctggcaacatggagaaactccctttttaccaaaaatagaaaaaattagccgggcacggtggtacatgcctataatcccagctactcaggagactgagtaggaggattgcttgagcctgggaggcagaggttgcaatgaaccaagatcgcaccactgcactccaacctgggtgacagaatgagaccctgtctcaaaaaaaaaaaaaaagaatttggtctgagcctggtcagcactggtctgatgtactgaaaaccatctcctaaacttctctctccaacaacaattaagtaccttatttacacatcaaactatagcaaaaacatcaatgacaagtacaacatctgactgttccatgaagatggtaggactgttcccaaagctttctgcttacaacttaaggccaaaccaaagagccgtggttctcctgcactaaaatggtttcagcctatttccagtcatgctgctttactaacaaactataatgaactactgtaaaacatgtgtgctatacttcactcagcaatgccttcactataagatgttgaaaatctgtgtttctggatgcataaaaatgacaagcagaaggtgttattttctattctaagggtccagaacaaaagaatgtgctttcattgtgactaaggaagtattctgcacagaccaatataatcttctactcacaatgtttccagttcctttgggtacctggtgtcattttagctctgagttatgtattaaggtcacctgctttaaaaaaaataaagacaacacatggaactcagtagagaaagtgaagtttcttgctgcatctccttcgagccatcttccctgcttgtctgtagggattccactgtgctatctcacctacctacctactcctctcattgccatcgatgctgtgataccggcaaacttctttatggctaggccttgctgtcagtgagtttccttaatgatgaaggtctctgctacctgagcagaaaagctcaagctcagcttggtccatgacattcatatgtggagtgtcatgagtttacttttaaagaactgcaagaaatatgaataaacacatttttttgaagcctatgttcaattacagcacttcaaagatgctgtaggaaaagctgaagtataacacagcatgcaaagatgcattgatttctttctccaaatcacatgtaacatatgtaagtctatacatatatgcatacatatatatgtacaccaaagtttaagaaatagatggttgttgaccaattgtatgtttttaaagagttttctaacaattatattagatattttataacttttaaaaatttacttcgaaaagattctcataaatctcccagagaaggcttagaaggctggcttcaaactccagttgcctgaactaggtacagagaaggctgagatgacagcagtttctagccctggctgcacatcacagtcacctggggagctttcaaaactattaaacagcaaaatatctgacacacagtagctaatcaatacacggaaatttctctgttttcccttccaccctatatccaatcccatatttcccaaaatgcctacagagcatactctgccatctcactagcacctcactccgtagcctaaagcttccaacaagtatcaccacatgttcccgcttctttgctcaggcccagtgagttgccaggggtttccgcatcacctatattttatgcctgtttcttcctcgtgttccctgtcacctggcataatggtcttgaactgtcttcccactttaggcccacagtttcctccctgcagcctgggggatctctccacagtgcacgtgtgatcgcatctttcccactgccacctcctccaaggcaatctgccggcagggatctccctgtctctgtacttctgtctccatgttcccctttctgggaccctatattgcaggcaaacagaatcagacagaatgtgtgaaatagatgactcctgcaatcttgtcctgtccctatttctacatcagcttcctgtagatgtttcctctttcccatctcctgttctctccaccagcagtgtccatctccatgtcaactgttcccttcccaaggcccttgtcacttatgtgtatgtgggatgctttaatatttataggaagacttgtgttggtgaaaacacaagtcatcaggttcattgtgggatttattcaagggcttgccttctctcttaagtctacatttgtggattctcttcttaaactacattaccccaaacacccagtggacagctacgacattattgttttgttttgatactggtataaatatagtcatcttctcaactgaatatatctcttccataaaaattcatgtaagagcaaaatataatttcaaaagtcaaagttggaaatacccaaatacctcggcgggtgcggtggctcacgcctgtaatcccagcactttgagaggccaaggcgggtggatcacttgaggtcaggagtttcagaccagcctggccaacatggtgaaaacctgctctaccaaaaatacaaaaattagctgacatgatggcacaggcctgtaatccaagctacaaaggagactgaggcaggagaatagcttgaacctgggatgaggaggttgcactgagctgagattgtgtcactgcactgcagcctgggtgacagagccaaactctgtctctaaataaataaataaaattaaaaaaaagaaaagaagtatctaaatacctaaaggcaacacaacttaaaaaaccatcattattcatcatactaaaattacatgtcttcatgaaaaacaagtggcagaaagtttggtgtgctatgtggtgcagaaattcatccagtagtcagtcctgcccagactgattccatgtttttgtattttctcatagctgaaaatattaaatccagacagaatctctgaggcaacgaccgcgtgtgggaagtcagcctatttaacttgagatcaaccgatctacagagtatgcacatggctctcttgtaaagaggtgagaaaagatttcaaaaagcactgtcgtcagcagaaaggacctttacagccagatgaagctctggttgttttcagccactttcctctgctggggaaaaggcacattaaaaagacacagctgtctatttcagtgtacacatgcttggtagcatgggtgttatttactgataaaaagcacatgacagcaattttaaaacagggcttgtcctgtcagtcaaattagagaggcaggatgtcctctccaagtgattaccgtgggggcccacaatgtggcggcctgccaggtcaattacagcagggctgtgaggacacatgaagaaggatcgccttaattctaaacaggagcatcagtaaaatagaaaccaggggacatattaacacaatgaacaataccttaagactgtggctttggctagagctgtaaaatgtatttatattgagtgtttctccatgtaaacattttttttttaattaacgagaatgaatgtataggaatacaattgcaaaataacatttgtatatttctggagaaaaacatttctcaaaggaaaattgggatgctataattttcatctcatcaagaaaattagacacatgggtaaattagcatttggaaacctgaccaatgatatttcataattgttcatgtccctgatatgtcaatttgccttccatttctcctatactaagattaatttcagtttcaaatgtccttgtcattttttctcctctctattgcacctacagcttctttgtctacaggaaaaaatattaagagatcagcagcatcagttggaggatttacatcatcgactatctgaataccagggacacattcctttgttttacactcatattccaggagtctcatggaaatgcattaaacatcagacaaaaaaatgtaggctgcttgaatcgcagcttaattgtttaggaactagatcctgatagtgccccaataacagaagaaaatccctattcacatctacgtagagaaaatactgggctgctgacactgaattttgcagctatgcgaaatttaatgctgattagtaaactctcaaattaaacagtgaaagattataaagacacatgcaaaagatgtaaattaaacccaaaatatcagaaataccacagtcataatttcccacctacctaaagagttatttctcaaaaaaaaattgttgcgaatttattttattttgttttgttttgagatggagtctccctctgtcgcccaggctagagtgcaatggcctgatctcagctcactgcaacctccaggttcaagtggttctcctacctcaacctcccgagtagctgggattataggcgcccaccaccatgcccagctaatttttgtatttttagtacagacggggtttcaccaggttggccaagctgctctcgaactcctgacctcaggtgatccacccgccttggcctcccaaagtgctgggattacaggcgtgagccactgcacccagctgaatttattttattttttattttttattttttgagatagagtcttgctctgtcacacaggctgaagtgcaatggtgtgatctcagctcgctgcaatctctgcctcacgggttcaagcaattctcctgcctcagcctcctaagccaccatgcccggccatgaatttaaataaattcaaagatcccattaatgtttattacaaccccaataatataggtaggcagaatacaatcctgaaaaaggtgccaaaagttgaaacaatgtaagtcaactcagtttccccaagttaaaattataagagtatattaactggctgggcgtggtggctcatgtccgtaagcccagcactcagggaggctgaggcaggtgatcacctgaggtcaggagttcgagaccagcctggccaacatggttaaaccccgcctctactaaaaatataaaaattagctgggcatggtggtgggtgcctgtaatcccagctactctggaggctgaggcacgagaatcacttgaacccaggaggcagaggttgcagtgagccgagattgcgccattgcactccagcctgggtgacaagagtgaaactctggctcaaaaaaaaaaaaaaaaattaaaaatgatactaaagaccttagaatttctggacatatctgtccaagtatctgtcacgtgtcattctcactatacagaaaacaatctctaaagtcattgatgtctacatgtctaaacttttcaccatttttgacatcttaatacttttaaattacaatccaagttaaaagggcaatgtaggattagaatagaaagaggtgaggattcagaaatcctcacatcaatttcacaactccctgtacgatggaggcctctcttccctgattcttccttagggttttcaaacacggagtccctcctaggtgccagaggttgttctgggctcaggcagtacaatggtgtataaagctgccaaaacccttgccctcatgtggggagacagacacgaggctgagtaagccacacaatctgttaggatggtgatgagtgcgtggtgcatcatttcatatagggtgatcaggaaggcctcaagataaggtgacatttcaggaaggcctaaaagttgaggcatgcatcatgcagataactggggagagccatccagacagggagggcaaaggcaggggcacagggccaggggccagcaaagaggccagtgagaaaagggccatcctaggctctggactctactgctgctgggatggatggccctggggagttcttgcagaagaaacataagccaatcacccaaggtgactgttaaaatgaaaatccccaggcctctcaatctggacttctgattcagtaggtttgaggcccagggattaagatttcttagtttgcaggtagttcagctgagagtggcccaaagagcattctcagaaacacatttctgaatccctgatagtttggcatccctcctctatttccttatttttggtcagctgccctctacaacaagcagccatcattttgcagccgtttagcgttaaacaactaggagagagatgataagaaggaataccctaagtataagagttaaaaacgaagccacttagtttttgtctagcaagagagtctggccccaatatcttctgagctttgctgacattcagtgattggcttgtaactgacaaatggttgaattctatgagtatgggcgtcctatgactatcctggtcattgatttgactaatgattcctgtgcccttgggttgactaaaacgcaaggctgttgtgtttggtgagtttgttaaggtgaaggtcaagtcaaatattgactgcagaagtgatattacagatacccaagttcccaggttgcggaaggtaagagaattcagatgacagggattacaggtgcaaagaagtagtccaatgatcctaaatattttcagttcaagtgcttcttttagggatattacttagtatttcatctcttttcctttgatgtctagataggtattaaatattgcagcaatgaaaacaactgacatcaggtgcattctctctacattattttatttaatcctaaaatagccctgtgaggtaactactgtatgggttaaccaaagcccagagatgttacttgcccaagagtcacagggctattaacaggcagaattgagactctaacctatgtctgattaatccaacacccatgtcttaaccactaaaatatactgctccttaaatctataagaaacatacttgccataaatgttttacatacggcatttccacaagagagcttaatattgagatgctggttaattatcagagacagcgtgatgcatgaggaacactagttttggagcaaaacagatctgaggctcaaatcatttgaccactgaatagcaaatgacttaataggcctgagcccccaaaccttcattcatagagaacattatgtctctcagaaatttaagtgagaaaataagtgcaatgcatggggcatatagcacatagcatagatactaattccttccctactgacttggaagcaaacactgaccatcacctccacctccacctccacccggggcacagagcacagcactcgcgcaaacccccaacagagggtagagggtcatctcggttgggcttgggcttctgtagcggggggctcactgctccgccgagtgccctaaccactgatggacacctccagcccctctgagggttcttcctcctactgacccaatggtcgactccccccaggactgcttctctgaggcaacactgagcaaactgactgctctttcctagtgacagtgccactaataactgaagacagtcagttggtgtcccctggtctttctttctctaaattaaacatgtccacttcagtcagaagtccctctgatcacaatttccgaacaacacagtatcctaattttcctctgctgggaaaactctagtttttctgtgtcctttaatgccaggaccagggccaaaaattgagattgacatattaagccaagaatatgattggactattacataggctaatctagaaaactcaccttgataatcccaggcttcttggctaatcttagcgccttggcccagagcagtcacatcggcaaaaaattcccgcccacttctcctcccagttccacccctcacagcagctgctcacatctttcctcctcccttttttccctccgaggccctccctcagcctctgtttcatctcttcaggaatctcctcttcccagcccaatcctaaacccaggtagcctttgttctaaatttgtataagtgtgttctaagttcctcgcctccccagtcagccagtcagctcggcaaaacaaaaggaccttcccccaaaccagctctccttattaagtagaggaggagagagttctgtaatacttgtaattactcagaccctgtcacactttaagtaactcagcctaagaccattattatacctgtacttcataccgctggctgaccctgagcttgtggtcaaccctgagtcctagagctttcatcatcttaactcctgcccaggccaatagatagcctcaatcctgttattgcatacagtcatgttttggaaagctaaacaaacaaaaaaacatggcaaggtgcaggcccagcaaaggggccaatgagaagagagccgtcctaggccctggaccctctgaaaggtttctgactatgaaacctttactttcatcccaggtaagtccaattttggtttagcaaaatcaaaattcttcttgcagcttattgcaatcatttcatttttgcttctgttatctcttgtactctactagctctccttttcggatttgtaccttctgtgaatgtggtatgactttatgaggatcatggacaaaaatgttgagaagaaactaaccaaggaaaacttttgttgcatggataaatacatagatgcatataaaacaggcagtacataatggatacataagcatataagatgctcataaaataacacaaccctgaggacacacagagatgccaggtaacatcactgcactgagtctaatagtctttagcactcccacacgagcaaacctggctgcaaaatcatgttacacagcaacagaggaatgctcatagcacagaattaaatagagattctaagtcatgtgagggggcagccaggaaaaagggatgtttatgttatttaagtgacaatgaaagttaattatacagcacaggagactagaaaagctttatttgacgttgcagacttttagtgaccacagaagcagttgtaggtattaaaatttcatccatctcagtgtcatttatttactttgccagataatcagtgatcttgcatttttatcttctcactttaaatgtatgcacagaatgttctctcctatgcgatctcacatttattttattttttatttactttattgttgatttttttttttttttttttttttgagacagagtctcgctctgtcacccaagctggagagcagtggcgcgatgtcgactcacggcaacctccgcctcccgggttgaagccattctcctgcctcggcctcctgagtagctgggattacaggcatgtgccaccacgcctggatatttttgtatttttagtatagacagggtttcaccaggttggccaggctggtctccaactcctgacctcaggtgatccacccacctcagcctcccaaagcgctgggattacaggtgtgagccaccgcgcccggcctcaagttcattttaaaatctgaattgtcagctgggcatggtggctcacacctgtaatcccagcactttgggaggctgaggtggacgaatcgtgaggtcaggagttggagaccagcttggccaacatggtgaaaccctgtctctactaaaaatacaaaaaaaatgagctgggtgtagaggcaggagcctgtaatcccagctacttgggaggctgaggcaggaaaatcacttgaacccaggaggcggaggttgcagtgagccaagatcacgccactgcactccagcctgggcaacagagtgagactccgtctgagaaaataaaaataaaaaaatttaaaaaatatctgaattgtcctggtattccatccagtatcaggcttaagttgtcaagaagagataccagtcttgatttctgtgaactgccagaattacacagaaatttgctccacttcccggaaaaggcaaataaaacataccaggattttaggtggtgcaagtaagttgcttgccagagcagccatggctacatataatttgcccaattcccatcaggcatttggttatttaaattttaagcatgcttgatacagcggtcatattaaccttccttatatatgaggaaaacatttcaagttataattatgttaatggtattctaatagtatttttaaaaaattatataacatttattactccgaggaaattaatgtcagatgacactaaaataattaagtttgaattaatcacagattatatcactttgttctcttcaacttttaaacatgtttgataattataatctaacaaaggaaaaattaatagagaaaataagtctaaaaattttctcctccgaattggtaattgggggaacaaaagatgtgggcaattagcaaatgaatatggtgcttcaagactgaagaatttaggatatgtaacaggtgacttagttcagggttgttcctagaggtaagaagtatcaatagaatttaagagtctacactgttcattctatcagtatatcttctatggcacacaagaagcaatggttattcagttatcttaatttcttaagttataaaagttaaatttgagccaaaagcaattaccatgtaaaagtgtatgcagtttttttttttttttttttttgagacagagtctcactctgttgctcaggctggagtgcagtggcgtgatctcagctcactgcaacctctgtttcctgggttcaagcgatgctcctgccccagtctcccaagtacctggcattataggcgtgcgccaccaggcccagctaaatttgtatttttagtagaaacagggttttaccatgttggccaggctggtctcgaactcttgacctcaagtgatccgcctgcctcggtctcccaaagtgctgggattacaggcatgagctacagcaccaggtcggtgtgcagttttgaccttgttatttgaccaaggaaaatttagccatttgaaacaaactcttttttttttttaagactgagtttcactcttgacaccctggtgcgatctcggctcactgcaacctccccctcttgggttcaagctattctcctgcctcatcttcccaagtagctgggattacaggagtgtgccaccacgcccggctaatttttgtatttttagttgagatggggtttcaccatgctggccaggatggtctcgaactcctgacctcaggtgatccaccctcctcggcctcccaaaatactgggattacaggcgtgagccaccgcgcctggcccaacacacactatttcttacattaacttgatgtctcctttcacctaacagaagcaaaatacacgcctaattgaaagacagtcagtgtgtcagactgaaacaaccaccaccaaacaaccaaggcactgatcaggaaaacagcacttttcccttgattctgactttttttctcacatacctttatttgcattattcataggttttatcagaggtttatttccttgggttaataatgaaacatttttcatttgtttccaccaaggggcttgctattctactattgcttagagcttcgggtgtctccatatgacaaatgccaaacatatgccaatcacaacattcaactggtagcatatgctgaatttcccagacgccagatccagtcaggaactttctggtttaatgagtcttgcctattatgtttctggtacacatcattacagaatttttccccatctacttccaagaactagaataaaccagaagaacaaaacaaactacaacaaaaccataataaatcctctcttcgtttatcatctatatgtcacatacgaaattagttacactagcagcatttactgagggcatggcaagatttactaagtcttgtttctcatgttacagccaaattttatcaaagttgaaaataacaatattttacatccatatagttctttgtattatttatttcaaaggactttcagaacttttacctaattggatatttacaaaaacccgtcgattgaagtaggcagcaattctttctcccacttaatagaggagataaatgaagcccagataaattaagcagcgctcccaatgtcacagttagttattattattatattattttttgagaaggagtttcactcttgttgcccaggctggagtgcaatggcacaatctcagctcactgcaacctctgcctcctgggttcaggcgattctcctgcctcagcctcccaagtagctgggattacaggcacacaccaccacaatgggctaatttttgtatttttagtagagacgggggtttcaacatgttggccagggtggtcttgaactcctgacctcaggagatacatccactttagcctcccaaactgctgggattataggcatgagccaccgtgcctggccaacagttattaacagggccaagatccgataagaagttgccttgaacctcacatccactggtctcccactattcctcattaggctgtgccaaggacacaaagtcagcagggatcgagacaccattaacctccctcctgacactggaaggtggcccctacttcctctctgagttttttgtttttgtttttgtttttgttgagacggagtctcgctctgtcaccaggctcgtgtgcagtggcgcaattttggctcactgcaacctccacctcccaggttcaagtgattctcctgcctcagcctcctgagtagctaggactacaggtgcacgccactacgcccagctaatttttgtatttttagtagagatgggtttcaccatgttggccaggatgatctcaatctcttgacctcatgatccgcctgcctcagcctcccaaagcgctgaaattacaggcgtgagccaccgtgcctggtcctctctctgatagttttttaaacattcagaaaaatgtgaatgcatacttaggtttctgcctatatttcctgagagaaaatcatgcctcaacatcaaacgcaaagatcagtcttaaatctggacccaggaacaggaattctcctaattaagcacataatcccatttatctctctagaaacaactgacattcaaataatgcttcatttcgtttgtaaatactagttagatggattgtaatacaaaccaaagagacattaatacaattgtccatttcctttggaaggatggctatccttcctatttaagctaaaagacattttcatttgaaagccatttgagcttgagctgcaatgagctcaggtgcaaatttcttgatgaacgagtctaataatgacacaaaatttcaaaaagaccaagagctatttcatggattatttcctgtggcaatcatctcaagttaaataacttgacattttagaaatggcattgggtaaataactctcgggtgcttttttcactggtccgctcactccccttatcttcctgctgactaaggaaggtaaagggtatcctccacaggaggtgggaattcttggtcctttgaggtaaagggatttcccatcatatcgttccatctgaggctgttatggactcaatcttcccctcacatttatatgttgaaatcctgcccccccaagatgatggtattaggaggtagggcattcggagggttattagggcacaagggtagaaccctcatgagtgggattagagatcccagaagctagctctgcctccttcctcagtgtgaggacacccccagaagacggccatcttcaacccagaagacggccctccttcaaacccagaacttgcggacacctgacttccagcctgacttccagcctccagcagtgtgagaaatacagttctgctgtttataagccgtctatggtaatttgttacagaagcccaaactgaccaaaacacaggtttctatgaagtttgttttgagaaacagaaaaatgcttggtagttctgctattggttatcatttctcagacattataaaaattatgtcaacagcaccctcgacatgttatctctggacaaactgatgtgcttctagaattttgaatttatttacttaacttttattattagcgattagtttctacacacgtttgcaaagacggataaaatcagagccctaccattgagtagataacagcctagcaggggaggtagaaagacaaaactaatagtaatagaatgcgataatctttttttttttttttttttgaccgagtcttgctctgtggcccaggctgaagtgcagtggtgcaatctcgactcactgcaaccgctgcctcctgagttcaagtgattctcctgcctcagcctcccaagtagctgggactacaggcatatgacaccatgcctggctaatttttgtacttttagtagagacgaggtttcaccacgttggccaggctgtctccaactcctgccctcaggtgatcatctgcctcggcctcccaaagtgctgggattgcaggcgtgagccaccgcacccagccaataatctctttaatagggattaatgtaaaacaaaaagaaaaagccacacagtggatgatgaagctaaatatgtctcaccgtttgtctggtgttttatagaggtggtaaaatttcagttggtggttcctaataatatcaccttcacaatagaaaataaagatctatgtgcagataggttaaggttactccagtgatcaaggtagtgtaaaggataaagtaagaatgataataataatgagtatgtagctaaaagtcaaggattgtaaaatatcacagtagcttcggcctttaggtggaacgaagcctgtcttaggtaggatttcctagaagcagacactaagtggaagtgaattattaggaagggctgtcccaagggagaaagaaatagagcgtctgggggctagacagggaaaggaaggaagcccaacaagggtgtgtcattaggtaaattcttatgaagggttattttggctcattgctacaagagaactctagagacacttctcagagttgtcccgtttgggggatgggcagatgatgagagttgggagaaggaggagctgaagtaaacacccccatccttgtcagtctttggttaaagactctcctaggggtatgtaagtcaccaggcgaggctgggctctacagctacttggtaaagtttctgagcagtacagcatctgttacaggcccatttcagaggagttggttctagagtctattttattaatatctaagcatatgttaggttttaaacagaaagcgtcaagtctctggtggatgtgcaataacatcacaccatatttaagttcttacaaagatgtagaaggaagatgtgggtttcagaaatgttctggaaactagaaacacttccctgtgtgtcatgctgcgacggtgccatgtcacgcagcccactggagtggcgtgtgaggtaatgacattgacttcaggtcctggtgagaagactattgctaggaggcatctggctggctggtggctgctcatatcctacgcatacccacctgacagatctctaggattgaaacagagaatgtatgtatgactaagcataacagcaaattttcttctgtatgtaatttcaagacccttcttatcatctctcttagtgatctagtgatctgatgcttgtaataggccttcgtgaatattcctcacttcaaagtagtctgtgagacacacatacaaacgagattctattaacaggtctgccagtgaaacagcccaagtagcaaatttgatagagaacacgtacttgggcatacaaatcccaaaactatgtactaattccaccaggtataaatctcacccaccagaccaacgtctgaaaactatacccaatttccagtccataacaagttaaatggaatttaaggaggttcgttaaagtgttataaacttacaatataagagctacaaaagaatatcataaacaaataatgagaataactccttttctctaaatatacagttattcagagatttcttttgttcttagagaattgttgtcagtcttcctgattataaaaataaagtcttgttgcagaaaattaggcaagtacttcttagcatttttcccttttcctttttcttttggatatgccgttttattgaggtgcaaccatatataaaaacatacacaactcctaagtacatggttgagtttttataaagcaaagaaacctgtgtaagaaccacccagaagatggtttggtttctgttgagggcagagtaagttcatacagaagctccggcctcatcgttgtaacatgtatttgtgagctacttgaagaaacagaccatttcttctcttgtcctccacaatccttgaatatttcatttgttttggagattgacagatcaagttattcattcattaacaattattaatccctactatgtgctcagcagtcagtgtgtgatgatgagacttggagtctagtggaagacacaggtaatacagaagcaaatatacaaagtgttcactataaaatacaaaatgctagggaggaaataaaactgatactgtggtcaagaataactaggtatcctacctagaaaaaatggttagagaaataaatcagagatgagatttagatagaaacttgaataaaaagaacacagccatgagaagagagaaggaaaacacattccaaacaaagggaacactgtgaacaaagtacacaaatccggcttgttgcacaaatggaaaatcaggtgactaggcgttggtggccataggtgtgagtcggacagcaaagacagagaccaggccagtcatggctatactggccaggagagtgacttaaagtgctaagtgcaatgtagggggaaaaaacggggttttagcaggaaagtgaagggaccgatctacgttttaataagagtaccttgaacactgtatgagcgggtggcgagagacaaagcaaggtgccggcaggttatcgcggtggcaatggaagatgtactctggaggtatatcaaccatttctgtggatggattggatgtgggagtgtgggaggtgcagaatcaaaatccatcaagtctttttacttcggcaattatgtggaatgagttgtcattcactgagatggagaagattcatggagaaataagtttccatgaaaaaaagcaagagtttagttttgaacatattacatttcagatgtttgagaaacatccgcgtggagttgtcaggtaagtaatttggataaatgagacgggagtgctgagaggagagctgagctggagatataaatttgggagtcattagcatatagatggtttctaaagccatgggaatataactcaaggagaagatagagaggacgtggggccaagctctgaggaccttcaaccttcagaagttgttcaggttcaagccagaaaaggctcaaaacgctaagcagaaagaatcgtagatgtaggagaaaaaccaggtctcagaagccacgaaagcagagtttcaaccagagggggtggtccacagtgcccagtgctggagagaggctgcgtaagaacaaacgagaggagcatctaactgggcttggcattgcccaaagctgttggtgatgctgtctcaggggaggaaagattaaatgggaagggaaaatggggcaagaagtgaagtgagtggggtccaggtaagttctttaagaggcagacgctcttacaacacaatgtgcattggggaaatgagagaagacaataaaggagagaggggaccagccaaaggaacaacctctttgatgaggcagaggtgggtgtccagcacaagtggaggcctttgcatctaagaggagaaaggacgctttttctcaagaaatggaagacaagaaagtgagtgctcttggtgtcaccttcttaaattgcagtaacatataaggcaaagtgagcagccggaaagaaagaggcaggggagggtgggaggagtgggaggtcttattagaagcaagggatagatatagggggggtgctgtagagagtgggagctcatacctcaggaaaccgggtactgacaaggagggaagagccatctgctgatgtgaacttacagtgtcctcggtttacccaaatgtttactaccaaaaaaaaaaaaaaacaccctaaagcttcaagggaaagaaactaaaacacagaccaccacagtcatttaaagctatgcatttgctcaggaagtgcaataaaaagcgtgtgggtaactgggcgtggtggtgggcacctgtaatctcagctactcagaaggctgaggcaggagaatctcttgaacttggaggcggaggttgcagtgagacgagattgcatcactgtactccagtatgggcaacagagcaagaatccatctcaaaaaaaaaaaaaaaaaaaaaaaaaaaaaaaaaaaaaaaaaaaaaaagggtaaaagtgagtggggaaaaggcagctgaaagaacatgagtgaaatgatgaactttggaatctcaggtggataaagacaggagtcatggcaggagggctggggaaggagagaaagcggcgagggactcccgtggaggttaacacagcaagggctctgcaagcaccgcagctgtcgctggagacgcgaatgcttcattttgttattttggaggtgaagtaacatctagttcgactctgttacactgagagtgttcgatgagaatagagtagaagaaaatgtcactgaagatgagcagatcaatgaatgaagatacaggatactgaggggaccattcatgtaaataatgagttgccaagaaaacggacagaatggccaggcgcagtggctcacgcctgtaatcccagcactttgggaggctgaggcgggcggatcacctgaggtcgggagttcatgaccagcctgaccaacatcgagaaaccccatttctactaaaaatacaaaattagccgggcgtggtggtaatgcctgtaatcccagctacttgggaggctgaggcaggagaatcacttgaactcgggaggcagagtttgcagtgagccgagatcgccccattgcattccagcctgggcagcaagagcaaaactccatctctaaataaataaataaaaaagaaaagaaaacggacagaatttggagaactgggggtggcagacaggacagataaacatcctcagtgaggtggcggggggcaggaggttaacagatgacagtggcaacacggggtggggggagcacagcgcagcgcaatggcatgaagatcaggggcttttactagagccatgggaatggcagcttggctggtgttgaggaggaagcatctcatggccttgccggagccaggcgtacattgggacggcctccagagaaggcgaaagacccagccaaggccaggtcaccacagaaatgttctaaaatgagactgagaatttaacaatggggtttgtgattgtgggaaaaattccaaaagcagagtgtatcaactatcaagaaaaatgatgaaatatacttatttggggggctttatagaaaggaggaattctgtgctacacctattatatatctaactcaaaagtcacttattcagttccttttatacgcaatggactatgcttctaacagacttttcagccacatgcaacaaaaaaccaagtaggaagggcccataggttggtgcacaggtcagtatgtgataccccaacgcaaacacatggtaaatgactggcaaaagtcaataatggctatatatattatatatggaggcatttatacaaagaggaatatatagaaggaggaatttaaaatcatgtctagagtaatataatagatgttaacaatcatgataatagtatttcaaagtatattaaacaaaatggattcatttctaacccaaccagtaaaatattctttgaaccaagattttactaggatgccaaatttaaaagttaaaaaaattccagctttttgagtaatgagcaatttcagtcatcaataaaattaatgaaaatgagagagcaaattacactaatccattgggtaaagaaaaacttaaaacattacccaaatagaagctttcttttctattgcttttcatcagtaataggtatcaactacatttaacaaaaacactgttgctgagataactcaccctcttggtttttaaatacactcaagatatgtcatgtttcaataaatgatgtcagcgttacactgtgtgaaaaaaatacaaaaaaaaaatttaagtttcatctataaatattattccattgacatttcataattaaagtttctaaagaatgaattcaaggccggtggctcacggctgtaatcccagcactttgggaggccgaggcaggtggatcacctgaggtcagaagcttgaggccagcctggccaacatgataaaacccagtctctactaaaaatacaaaaactagctgggtgtggtggtgtatgcctgtaatcccagttacttgggaaggcgaggcaggagaatcgcttgaacctgggaggtggaggttgcggtgtgccgaaatggctccagcctgggcaacaagagcgaaactccatctcaaaaaaaaaaaaaaaaaagtgagaaaacattggagaacataacttgattgagtgagaaggaaatggcagcttagagcagaccctgaaagcagggaggcagctagctgggcctgatctcctgctgcagaaacaggcaatacatccgtactgtgtgaagcccctaagtttgtcactatttgtcatgcagaaacaggtaagtaagacatattataactcggaaaaaatctcaaacctgttgcacaagaagttatttaccattgtaagctctctgcgaaatgttttggaaacccaagttgagaacagctttgatcagaggcaactgaaggcgggcagaagaaaccaagcagtaactactcagctggtgtgtgtgtgtgtgtgtgtgtgtgtgtgtgtgtgtgtgtgtgtgtgtgtgtgtgtgtgtgtcagtttggcagacgccttctttttttttcccctctagtgcatcatgttgaaactgtagctaatgccgggcgcagtggttcacacctgtaatcccagcactttgggaggccgaggcggggggatcacgaaatcaggagatcgagatcatcctaaccaacacagtgaaaccccttctctactaaaaatacagaaattagccagatgcagtggcgtgcacctgtagtcccagctactcaggaggctgaggcaggagaatcgcctgaacccgggaagcagaggttgctgtgagccgagattgcaccactgcactccaaccaggtgacagagcgagactccatctcaaaaaaaaaaaaaaaaaagagaaaaggaagctgtagcttagaacaggagaatgcaagtgattattatcaggaattgcatctgtgagggaacctgaggactcaagccagcccagcagagggcaaggcagcacagggcatgagtcattctcctgatgctaccttcacaggatatcagacaaaggaaactgagcacctgccccatttgatgaaataaagcagataaaagataatacatttaaacaattagatgtgtatcttttatatccaagcaatattgtacagaaaggcaccacctctaccttatgacaagtgttactacccatactcaggaaaccccgatgttgccagcacagaagccaggacaacagaaagctgaacaattccttttgcccaatgtgaacatctccaataaggctccagtttggaagacttctgaaggcctttcaaattcataataaatgctatgaactgccacacttaatcccctgtattctggctgggccagctgttataatacaccaccccacagtcattgctgcttggtagtcgaacaaacacgctggagtcagaggccagagtccttcctcatgccaccagcttccctgagcctagtcccaacaccattccccccagggcactttgctgtggcctcactgggtgtgcccacgtggtcttgccctgaaccccaatctgtaatcagcaccagctcttcaggcgttgaccataaaaggcactgaatgatggtggtgtttttttgttttctgttttctgtttgtttgtttttttgagatagagtcttgctctgtctcccaggctggaatgcagtggcatgatctcactacaacctccacttcccaggttcaagtaattcttatgcctcagcctcccgagtagctgggattatcaggcgcccgccatcacacccagctaatttttgtatttttagtagagatgaggtttcaccatgttggcctggctggtctcgaactcctgacctcaagtgatccacctgcctcggcctcccagagtgctgggattacaggcgtgagccactatgctcggcggatggtgctgttaacaacagtatctatccttgacaatatagggcttcttctgaccacctcaaagatgctactgcatcaggctttaccaaattcttctcttgttacatgagtttcagctcaagaatcagatcatgggggaagcttcaagagcagcaaaacttgtaatttttgcccagttgccctacaagaaaataaagttttgactcttaggcataatcaccatggtgagaacctatatattaatatctacacacaagtatctatatctctccttttaaatatactctttagatggctgctccttacgacaaaggttttatttggtgatttgatgataaaaaaaatcacttttctttatggtgactattatgccatcatctttactaacaagtatattatcaggaatctcaaagaaagtggcattcatgttatagccttcattacttcaaactattccggattccccatattattttacatattttcactgacttttaagcaaatgctttaattttccctttttttttttttttttctgagacggagtttcgctcttcttgcccaggctggagtgcaatggcgccatctcggctcactgcaacctccgcctcctgggttcaagcgattctcctgcctcagcctcccaggtagctgggattacaggcatgcgccaccacacctggctaattttgtatttttagtagagatggggtttctccatgttggtcaggctggtcttgaactcccgatttcaggtgatctgcctgcctcagcctcccaaagtgctgggattacaggcatgagccactgtgcccagcaattttctacttttttttttttaatttcttagatggggtctcattctatcactcaggctggagtgcagtggagtgatcttagcccatcacagtctctgcctccaaggctcaagcgattcttctgcctcagcctcctctgtacctgggatgtgccacaggtatgtgccacacacccagctaatttttgtatttgtggtagagatggagttttgccatgttgcccaggctggtctcaagttccggagctcaagtgatctgcccacctcagcctcccgaagtgctaggattacagcatgagccaccgcgcccagccaacttttctactttaaaaaggcaattggtgaaacctcttctctactaaaaaatacaaaaaattagctgggcatggtgccaggtgcctgtagtcccagctacttgggaggctgaggcaggagaatggcgtgaacccaggaggcggagcttgtagtgagccaagatcgtgccactgcactcctgcctgggcgacagagcaagattccgtctcaaaaaaaaaaaaaaaaaggcaattggtaagttgtatgaacattttgaaactcaaacatttttgtgttaccaggaaattcactatagagagaatgaaaactacgactatttgtaaataatactatgacacagactgcgacaggccactaggctgatttgcaggtaaaatttttgttctatcaaaaccttaaaaaccacatggacacacacacagccttccccagcccctgccatcccatcacacacccttccccagcccctaacatcccatttgtggatgtaactgacatataggaagacagcccatagttatcatttaggttcaccttgtccctggaattgtgctacataaagaaactgagaagcatttctacaagaaagctacgggtcacttgtgaaaagccccaattcatcccagctgaggcatttatcttgttggaatcactggtaaaagggaaagccttgtctcttaaagactttcagttatagaggctacataaaaagcaatggccaccacaaagcttaaacagataaactatccattttgtgtcttctcctatacattagtaattacttttaaaaacatctccacctgtaccttagcctcttattcctcaccagtattccttaccaataagcaacacatatcctactgatattttgttgatggagatagaaattaaataggtggctaattcttcttcacatacgagaaaggaaagttatggaatgaaaatgatgtctctaaggtcctaaatttttcaaactagtgccacctaatctgtgaccatggctaaattctcttgtctcagctttcttccatataaaatgagttgtctaacaaacagtaagctcaattaacatctgataccattattattaaactttttctatttatatgtatttcattctcagttaatatgatgacagaaggggataaacataacttatcaacgacattaatatgacttctttcccctactacattcgttaataaagaggttataattaggtttcaaagacagcatttcattaaggtgatttcattcagatacaactatttgcatataagtgcaataaaaaccttagaagtttctatttgactatgttagcttcataagtagaaataatacacatgctttatgcttaggttaaaaatcagcctaacaatatattcatgattagttcaaaagagcagacatcaattacctataagtttataactgtcaacacataacaattacaaattagaaacagagtaatcaaagtcaggtcataatcaatgtccagaaggtcaaagacatgcagaggccaaatgcatcttctaagtgttgcctggatcaatgtcttatattttacaagtgtaaacatggaaaaatcaagttatttttaatacacttaagaaatgaagtgatttttaatacatcccatatagtaaaaacataaatttgaactaatgtcataacacccttctggtgtccttttcattaaaatgcactaccctaatcatgtttacaattgatatttctctgaagtataaattacagattgtgttaacaaatttgcaaaatgtggcaaaaatatccattgccaacatatattcattcaagtcaatcagtgtatacttaatgagtgtcttctttctccagaaactttactaagatggaaagaaggctttcaattaaagcccagagagagagaggcaaaaaaaaaaaaaacccaggtcattataaaacatgaaaatctgtgaagttataaagatgcccactgggtatgagggtgataacagagatcatttccaggtaacagaaaagactttataaaagggtcatgtctgagttgagccgtaactgaggagtatttgaccagatgggactgaggaaggaaagacgatttgcagcctaggcgatcaaaggagcagggcgacggggagaaatccatggagcgtgtccaactacagtcagtctggtgtgagatgctgcagtcccaagcgcatggagtgatgaagataaagctgaggtctccaggttgcggagagccttaagtattaaggggcttgggctttattctttgggcaatgatatttactaaacagtttcaagcacaggaatgccatggtcacatttttcattgtaaaagaacatgcttatagcagtggagtagatattgaagagaaagactgagcgaaagaagaaagccaatgactatctagtttttaaaagataatctagtgagatgcagacaagatggtagaatagaaagctccaccgttcgtcccccgaccccgcaaggacaccaagttaacagctaatctacataggaaaaacaccttcttaagaaccaaaaatcaggtgagcactcatggtacttgatttccacttcatatccctgaaagaggcactgaagtgatttaaaaaaacaaaaacaaaaacaaaaaaaacccgtcctgaatctgctgacaccacgcctcccttactgggggcgaagagcatctctgggcactaggggagggagaacacagcaattgtgaggcattaaattcagtgttgtcctgttacagcagaaaggaaaaccagaccaaactcagctgatgcctgcccatgccagggggaatgcagatccctgtggtcggaacttgagtgcctgcaaaccttgccacagagggctacagcactctgagtctccaggtcaatgtgaaaggcagtctaggccataaggactacaactattaggaaagtcctagtgctgaactaggcccagagacagtgaactgggggtgggagggcacgtgacatactgagacactagctgggacagacaagggagtgctggcatcactgctcccctaatcccaggctgcacagttctcagctccagaaaagaccccttccttccacttgaggagaggagatggaggagtagggaggactttgttttgtatcttggatactagcttagccacagcaggaaagggcaacagactgaattgtgaggcctctgttctaggccccagctaccagacaacatttctagacacactctggcccacaagggaacccactgccttgaaagaaaggagctggtgccagcagcattcatcacctgttaactgatgagcccttgggtcacgaataaccagcagcaatatccaggtaccacgtcgagggccttgggtgaggctctgggacatgctggcttcaggtaccagcacagctactggggtccaaaatgccaagtgtgctcttggggtccccagttccaggacttgacccttggatggcatttctggacctgccctgggccagtgggaagtccactgctctgaagggtgagtcccagaccaggtggcattcactacaagctgacttaagagcctttgggccttaagggaacatcagggctagtctggcagtactcctcatggtctggggtagtggtgattacagggtgaggctcctctgcctttggaaaggggagagaaaactgggaaggactgtattttgtgttttgagtgtcagctcagcagcaataccaggttgatgtctaagacttttgactctagttcctgacccccagatggcacctctggacctacccagagagcctggcagacctcactgccctgaaggggaaaaaacaggcctttatcacctactgattataaaaccccagggccttgagtgaacataggcagtagccagggagtggttacagcaggacttgggtgagactcagccctttgttggcttcatgtctgactcaacaaagtcatagtggtggtggccacaggggtgcttgtgtcactccacctcaagctttaggtggctcagaacagagagagagaaactctttgtttaagagaaagcaagagagccgggcgcagtggctcacgcctgtaatcccagcactctgggaggccgaggcgggcggatcatgaagtcaggagatcaagaccatcttggctaaagcagtgaaaccctgtctttactaaggaatacaaaaaaattagccagacgtagtggtgggcgcctgtagtcccagctactcgggaggctgaggcaggagaatggcgtgaacccaggaggcggagcttgcagtgagctgagatcgcgccactgcactccagcttcggcgacagagcgagactccatcttaaaaaacaaaaaacaaaaaaaaaaaaacaaaaaaagagaaagcaagagaagagaacaagactctctgtctggtaatcaagagaattatcacagatcttgtccaagaccatcaaagcagcacctctatgagtctgcaagaaccacagcattactgggcttggggttccccctaaagtagatacagcttagatcacaatacccaagtcctgttaaatatctagaaagcctttctgagaaagatggctacaaataagcccagacagtgaagactaaaataagtacccaactcttcaatgcccagacaccaaagaacatctgctagcatcaacaccatccaggaaaacatgatctcatcaaatgaactaaataaggcaccagggaccaatcctggataaatagagctatgtgacctttcagacagagaattcaaaatagctgtgctaagaaaacacaaagaaaattcatgataacacagagaagcaactcataatcctatcagatacatttaacaaagagaatgaaataattaaaaagaatcaagcagaaattctggagctgaaaaacacaattggcatactgaagaatgtatcagagtcttttaatagctgaactgatcaaggagaagtaagaattagtaagcttgaatacagactatttgaaaatacagagtctgaggagacaaaaaaaaaaaccacaataaattatgccttgcctacaggatctataaaatagccttaaaagggtaaatctaagagtaattgggctgggtgcggtggctcatgcctgtaatcccagcactttgggaggccgaggtgggtggatcacagagtcaggagatcgagaccatcctggccaacatggtgaaaccccgtctctacaaaaaatacaaaaattagccaggtgtggtggtgggtgcctgtaatcccagctagttgggaggctaaggcagaagaatcgcttgaatcagggaggcagaggttgcagtgagctgagataacaccactgcactccagcctggcaatagagcaagactccatctcaaaaaaaaaagaacaaaaacaaaaaaaacagtaattggcctattggccttaaagagaaaataaaggacaagataggggtagaaaatgtatttaaagggataataacagagaacttcccaaacctagagaaagatatcaatatacaactacaacaaggttacagaacaccaaggagatttaatgcaaagaaaactacatcaaggcatttaataatcaaactcccaaaggtcaaggataaagaaaggatcctaaaggcagcaaaaggaaagaaataaataacatacaatggagctccaaaacatctggcagcagacttttcagtggaaaccttacaggctaggagagaatggcatgacatatttaaagtgctgaaggaaaaatcttttatcttataatagtgtatctggcaaaactatcctttaaacatgaaggagaaataaagactttcccagacaaacaaaagctggagaatttcaccaatagcagacctgtcctacaggaaatgctaaaaggagtacttcaatcagaaaaaaaaaaaaaaaaattaatgagcaataaataatcacctgaaggtacaaaactcactggtaatagtaagtacacaggaaaacctagaatattataacagtgtaactgtggtgtgtaaactactcttaccctaagtaaaaagactaaacaatgaacgaatcaaaaataataactgaaataacttttcaaggcatagtgagtacaataagatataaatagacacaataaaaagttaaaatgccaggggataaagttaaggtatagagtttttattagttttctttttgtctctttgtttatgcaattggtgttaagttgttatgaggttaaaatgataatatcaaaccaaaacaacacacagtggagacacaaaaaagaaaaagcaagaaactaaaacgtatcaccagagaaaatcacctctgctagaggaagataggaagaaaagaaagaaggaagagaagacaacaaaacaacgagaaaacaaataacaaaatggaggagtaagtccttacttataaataataacattggccgggagcggtggctcaatgtgtataatcccggcactttggaaggctgaggtgggcgggtcacctgcctgggaggtcaggagttggagacaagcctggcaaacatggtgaaaccctatctctactaaaaatacaaaaattaaccaggcgtggtggtgtgtgcctgtaatcccagccactccaaaggctgaggcaagataattgcttgaacctgacaggcagaggttgcagtgagctgagatcgtgccattgcactccagcctgggtgacaagagtgaaactcagtctcaaaataaatacatacatacatacatacatacatacatacatacatacatataatgaatgtaaagggactaaactctgcaacaaaaagacacagactgggtgaatggatgaaaaaaacaagactcatttatatgttgcctacaagaaacacacttcactataaagatccacatagattgaaaataaagggatggaagaagatattctatgctaatggaaaacaaaaaatggcaggagttgctatacttatatcagaaaaaatagatttcaagacaaaaactataagaagatataaaaaggtcactatataatgataaaggggtcaattcagcaagacgatataagaactttaaatatatatgcacccaacactggagcacccagatatattaagataaagcacatggtattagagccaaagagagagataagcctcaatacaataataactagagacttcagtaccccactttcagaactggacaggtcttcaaatagaaaatcaacaaagaaacatcagacttaatcttcatgatagcccaaaaatcagcagcatttctatatgccaagaattagtagaagaaaataataataaagatcagagcagaaataaataaattgaaatgaaaaaaatacaaaagatcaataaaacaaaaagttggtttcttgaaaagtcaaacaaaatagacaaatctttagccaggctaacaaagaaaaaaagagagaagatccaaataaaaccataaatgaaaaacgaaacattgcaactgatactgcaaaagttcaaaggatcattagtggctactatgagcaactatatgtcaatatattggaaagtctagaagaagtggacaaattcctagatacatacaacctaccattattgaaccaggcaaaaaaatccaaaacccaaacagaccaataacaagtaacaagattaaagccataataaaaaatcttccagtaaagaaaagcccaggacctgatggcttcactgctgaattctaccaaacatttaaagaagaactaataccaaccctactcaaactattccaaaagacagaggaggagggaatacttccaaacttgttctacaaggccagtattactctgataccaaaaccacagacacatcaaaaaaagaaaactacaggccaatatttctgatgaatattgatgcaaaaatcctcaacaaaatactagcaaactgaattcaacattacatcagaaagtgggatttatccctgggatgcaaggatgattcaaaatattcaagtcaatcaatgtgatacatcatatcaacagaatgaaagataaaaatcatatgatgatttcaattgatgctgaaaaagcatttaataaaattcaacatccttcatgataaaaattctcaaaatactggggataaaaggaacacatctcaacatatggcttttattaaaagccataaatgacagacccacaggtagtatcatactacatggggaaaaactgaaagcctttcttctaagatcgggaacatgacaaggatgcctgatgtcaccactgttattcaacatagtactggaagtcctagctagagcaatcagaaaagagaaagaaataaaaggcatccaaattgtaaaggaagaagtcaaattatccttgtctgcagatgatatgatcttatatttggaaaaaccttaagattccacaagaaaccattagaactgatacccaaattcagtagagttgcaggacacaaaatctacatacaaaaatcagtagcatttctaaatgccaacagagaacaatgtgaaataaataaaagaaatttttaaaaattccatttacaatagccacacataaaattaaattcttaggaattacccaaagaagcaaaagatctctataatgaaaactataaaacactaatgaaataaatcaaagagaatgccaaaaaaggaaaaatattccatgttcatggataaaatccaatattgttaaaatgtccatactacacaaagcaatctacagtttcagtgcaatctctatcaaaatgccaatgacattcttctgggaaatagaaaaaagaatcctaaaagttacatggcaccacaaaagacccagaatagccaaagttatcctaagcaaaaggaacaaaactgaaggaatcacattacttgacttcaaattatactacagagctattgtaagcaaaacagcatggtactggcataaaaacagacacacagagcaatgaaacagaacagagagccaagaaacaaatccacacacctacagcaaactcatttttgacaaaagtgccaagaacatacactgggaaaaagagtttcttcagtaagtggtgctgagaagacaggatatcaataggcagaagaatgaaactagacttctatctctcaccatatataaaaatcaaagcaaaatcgatttaaaaattaaatagaaaacctcaaactatgaaattacttcaagaaaacattggggaaactctccaggacactggtctgtctgggtaaaaatttcttgagcaataccccacaagcacaagcaaccaaagcaaaaatggacaaaggggatcatatcaagtcaaaaagcttctgcacagtgaccaagaagcagcttctctgctccttctggaatctctgcctggttcaatccacttgcctctactcctgcctccaccatgtccatcagggtgacccagaagtcctataaggtgtccacctctatgggcagcagcagcttccgggggtggcctgggtggaggctctggtggggccggcggcatgggaggcatcaccgccgttgtggtcaaccagagactgctgagcctccttaacctggaggtggaccccaacatccaggccgtgcaggagcaggagaaggagaaggagcagatcaggaccctcaacaacaagtttgcctccttcataggcaaggtacggttcctggagcagcagaacaacatgctagagaccaagtggagcctcctgcagcagcagaagatggcttggagcaacatgggcaacatgttcaagagctacatcaacaaccctagggggcagccggacactctggtccaggagaagctgaagctagaggcagagcttggcaacatgcaggggctggtggaggactttaagaacaagtacaaggatgagatcaataagtgtacagagatggagaatgaatttatcctcatcaggaaggacatggatgatgcttacgtgaacaaggtagagctgtagtctcagctggaagggctggctgacgagatcaatttcctcaggcagctgtatgaagaggagaccttggagctgcagtcccagatctcggacacatctatggtgctgtccaggacaacagccacttcctggacatggacagcatcattgctgaggtcaaggcgtagtatgaggagatcacccaacctcagccgggctgaggctaagagcatgtaccagatcaagtataaggagctgcagatgcaaagactgagatctccaagatgaactggaacatcagccagccccaggctgagactgagggcctcaaaagccagagggcttccctggaggccaccatcgcagatgtcaagcagcgtggggagctggccattaaggatgccaacaccaagctgtccaagctggaggctgccctgcaacaggccatgcaggacatggcgtggcagctgcatgagtaccagaagctgaagaacatgaagctggccctggacatcgagattgccacctacaggaagctgctggagagtgaggagagccacctggagtctgggatgcagaacatgagtatccatacaaagaccaccagcgcctatgcagatggtctgagcttggcctatgggggtctcacaagccctggcctcagctatggcctgggctccagctttggctctgacatgggctccagctccttcagctgcaccagctccaccagggccatggttgtgaagaagatcaagacctgcgatgggaagctggtatccgagtcctctgatgtccttcctaagtgaacagctgcgacagcccctcccagcctgcccctctggtggctgccccagagcctgggagggaggctgctgtgcagcggagcacagggaatgggagacccacctgaggctcagccctagccctcagcccacccacgggggagtttactgcctggggaccaccttgcccatgccttcagctacaaaacaactcaactgcttttatttttttccccccaaaataaaacctcagctagccctgaaaaaaaggcttctgcacagtaaaaggatacaatcaacaaagtgaagagacaaccaaaataatgggagaacatatttgcaaaccctgccaggggattaataatcagaatatacaaggagctcaaacaatgctataggaaaaaaatatataataatctgatcattttaaataggcaaaagatttgaacagacatttctcaaaagaagacatacaaatggcaaacaggcatatgaaaaggtggtcaacatcactcatcatcagagaaaggcgaatcaaaactacaatgagctattatctcaccccaggtaaaatggcttgtatcccaaaagacaggcaataacaaatgctgtcaaggttgtggagaaaagggaaccctcatatactgttggtgaaaatgtaaattactacaaccactatggagaagattattttttagttttgaggttcctcaaaaactaaaaattaagctactatttgatcctgcaataccactgctgggtatatatccaaaagaaaggaaatcagtgtatacaagatatatctgcactcctatgtttgctaaagctctgtatataatagttaagatttggaagcaacctaagcatccatcaacagatgaataatgcataaggaaaacgtggtacacatgtacaatggagtactattcagccataaaaaagagtgagagccagtcatttgcaacaacctggatagaattggaaactattaaataagccaggcagagaaagacaaacatcacatgttctcacttatttgtggaatctagtaatcaaaacagttgaacccatggacatagagagtaggagaatagttatcagaggttgggaaggtagagggaggatgggagggaaaaaaatagaatgaataagacctactatttgatagcataacagggtgaccacagtcaataataacttaattgtgtattttaaaataacttaaagagtgtaattggattgtttgtaactcaaaggataaatgcttgaggggatggatactccattttccatgttgtgattatttcacattgcatgcctgtatcaaaatatctcatggctgggcacagtggctcatgcctataatgctagtactttaggaggctgaggcaggtggatcacctgaggtcaggagttcaaggccagcctagccaacatagtgaaacccctgtctctactaaaaatacaaaaattagatgggcgtggtggtggatacctgtaatctcagctacttgggaggctgagacaggagaatcgcttgaactcaggaggcagaggttgcagtgagccgagatcgtgccattgcactccagcctgggcaacagagaaaaactcatttcaaaaaaaaaaaaaaaagcaaaacaaatgaaaaaaagcaccttatgtatcctataaatatacacgcatactatgtacccacaaaaataataattaaaaaagataatctagtgaaaagatgattcaggactgatcagaggcaatagttaggcaaaaaaattaaaactgctttgacaaacttttggcagataaaatttgtgattggttgaatgtaggcactcagtgagaagggataaaacagaaaactctagtatggaggactgggtagatgtgacttccccacacgagaaaacagccattgatttaggggcagcaatgaagattttagctggatgtaaagtacccgtgggatgtccaagttgagggagccaggagcaaggtgcctgagctggcacttcagggagaagcctggcatggagctaggaggcaggcaacatatgctcaacgaggaaagagcccagaggtggcatacaggataaacagcaagagaaatatgaagagaactaggaaaatgcagataagtaactgcactatcaataaaatattaaaccacaaatgtgagactcattgccctgtcatgttatctgagaccaatacattcaaaagcaagtataataaaggtacagatgacctgagagcacagaaatgcttagacaaatttggaaaaaaaaacaaacagacattccagatgcaaacctaggattgaacaattagtgtatctttgactatcccccatctcattacccatccagcctgcatcctggcacctagacttgagctctggccctctattaccccctttaggtactgtctcacctgtcccaaatgtgtctttgaatgtccacgtaggttctgaaggtggccttcagtctgtcatgctgaatgagttaaattttccaggaaaatccatatcccaaattattgcttactatgatctcctgcataatgttaagtaacttgggttttactctacatgcttccatactgctacagaataaacactcagcactcgtgaaaaagaatttatggctacagaaaacatatccaagacttacacaagaagatttacagctaagccctgacattaattggctttgtaatccagcttagctcctcttgctccagctgtcatctgcagaatgaagataatggagcagtgaagttgtcacagcatccgaattactatcctgatgggccaggtgtagacagacatccttaagtctgtcactagagagagcaaaacgtcttcatgggggcaatatcattttacagtatttggggcactgaaatattcctttcagagtgtccttactttactacaaaatgtcctaccagggaaagaaaaatattatcaattctattgaaagaaagcattaaaggaatctcactagctctttcagtaaaatcaatcaggaaatcatgaatgataacacttattatgcagacatacattatccatccactcctttaaaaatatttatagaaaatttaggttcctgtggctgtgaaactattctcaaaaaactctgcgtaacctaaaaacaaacaaaaccccctggggctcttccctttgctccccagtaattctcctctgcatttttaatatctgtgtgtcaccccctgtcattaataaagctatcaacagtcagtaaaaggcaacagaagtgtttcattgaaatcttaattgccagacatacagaatatcttaaaaactgtcctttaaatgcccacatttctcaaaatcatctcttaattttatttacaattacatttttcactttctgggtgctccattttccatttttagaatgtcttatatatttgggtagattccaaacagaaaatgagttccaagccttggactgaatcactcattccaatgggtgatcctaaaactgaaatgcaggcttacctcaaaaactaagacctcccagccctcactctgtgcatgcaagcttccaccttttttcatgcaagctccccaaggaggacactgcctctcgtgcacaggcaggcccaggagctgatttggagatctttctggctctctgtcgtctgcagactttcagtgctcccatgcatagatattggtccccttcctgaggatcataacaccttcgagttcttccatcctttgaaacctcctcgttgtgacaacgttccagctagacccagcttgcttctactaagtctgttctgtttactgtctcttttgttataaaattatttactcattttattttagtgatgtgaattaaatgggtcatatatgcttttgctagtaatccaagtgatattgaggtttctacattttaataatgagtcacatcctctggtctaccaatgccacttccatcacccaccccttcctagttaaaaatttggctagcatctttccgtacttttctcttatttgtacaaacgtgaaatacatttacataagttcatttaaagggaatgtataacttattctgaattatgatttatatattctgaattgtgatcatttatgtaacacaaagctcgctgcttgcagagtagaattaacaagcgtgaggcctgttagaaagaaagtgactttattaaccaaaactagtcgtggggaagtggttggattcccatccaaagcaactacttcaaattttggtggggaaggaaagagtttaaaaagggagaacttgatacgaaaggcatgccagaactgtgctgaggacgatgcctgtgcatcttgttccagtggctatcttgggtcccagtccacctggtacatggtctggcatcatctcaacagtggcggggctgctgattagccctctgaggccatctctggaactctgcagctgggtctccaggcttggtctgtctgtctcaagattagcccccaaatcttcaaagaaggcacataattagatgctagcgtacagttagataaataagaagggagtatatctggagaaaaacggagggacgtggagtctattttaaggctaaaggaaacaggcttctgtagtttgcttcaaggttacatcttgaaacccaagagaaagaggaaaaaaaaaagttttaaaatgcattttgaggttatgctgcccagttacatttacatcatgatattcttaagccaaccatctttttaacgtctctttcatagtatggatattccggtttttattctaccatttcattactgatggatcttcacattgaatatttcgtcactagaagcaatactgctacttatttcaacgtgtatcttggacattcctgtagttttatttctgaaggctaaattctcaaaataggatggccgtttcataggaaatgcatatgtacattttgaagagatcataagattgctatcccccaaaatgttgaagtaatttattcctctatcaataagacatatagcccctatttcttcaacagcagtgaatgatactaagttgttttttttttttgctgatttgatagacaaaaagaggtattttgttgttttaatatgaacttgcttgattccagtgaggtcaaatggattggttgttttattttccattatgtacactagttgttctgagtggacttggcaacagtgtagttgagttttcccctttcacattttatagattagggatgttaatcctttgttttatgcttttcaaatattctctcccagtttatggtccatcttttatttctatttgttatttctttcaccatacataacatttcagtttttatgtaatcaaactcatcagtgttcttggtaatggctactaggtctcctctcctccttcagaaggcctcttctatgccatggagaaaatgaggctcgacgtccctcaaattccaggccatgcacctggatctgcatctatcttcatcttctgtcagtcttggagaaagcgatgtcttctggtagaaacagaactacctactgtgttcttcacctcttcattgcttcagacaaaagactgcaaaatgacctctgcatggtcacacccagtaaaccatttttaaccctgacctttattgctcattctacacaggtgacccctctgatgatttcataggctctcacttgtgaattcctgaagacatcctggctgtcctcctctccctccagcaattgtatctcagcttcctgagagcacatgccgcttttcctccgtattttcccttggtcttttttcatttaatgcagtcttacttgttgaccccctagctcccaggacttacagtttagtctctatgctgatacatgcagacttgacctccatgcttgcctctctagcacattcccagatttctcagctccagacccatttttatacagactacacatccacaactgagcctgtcatcaccatcagatatttggtgtctaaaagaatggccagggctacatcccagtcacacaggctataggtctcactgtctccatggactcctcaacactatttgtattataaataaacaccataggatttgtgccctctagacccatgacaccctatattccagaacaagagaacaatcggcctggaggttttgcttggatctcttgtacactcttgcaacagtcccccagcagcaactctccagtcattctccattcagttttgcattctgtagccataaaacctgggtcttgactgtgcctcttcccttggaaaaatcctatcttggttctattggtttataatgaagttcaatctccctgtaaggtttaggagaccacgcatggcttgaatcttacttctttcttcaaccttggttctcactctgcttccttctgcctcctcactctgaccatgtcctctcttcagaaaccatatcctgatttccagtttcctgtctactatgttctctctcacctatgtaccattgaacatgcagttccctctgctgactcagtcttaaagtatgatgggaaggctagagcatcacaaaaatgcctggacagttagacacaattattaataaaagtcaaatctcaaaaggcatgctgtctattaatacaaacactaaatgtaaacaagaaaatttcatattaggaagatgaaatcaacgctgcattaccactaacttgaacaaggggtgggcaatagacacagaaatgaaattacccagtgttgaacattcagattgactttggaatctcacaggctttcctaaaaaaacacttcttccctttaaaaaggtactactggcttggtgcagtggctcacgcctgtaattccagcactttgggaggccaaggtgggtggagtatttgaggtcaggagttcgagaccagcctgaccaacatggtgaaaccctgtctctactaaaaatacaaaaattagctgggcgtggtggcgcatgcctgtagtcccagctactcaggaggctgaggcaggataattacttgaacccagagaggcggaggttgcagtgagacaagatggtgctactgcactccagcatgggtgacagagtgagactccgtcaaaaaaaaaaaaaaaaaaaaaagggactacttattgtacattttgaataaaagacgaattgagagcgaggatttgatgcccctcacggcatcttagtgactaaagatttaccatcagggtgggctcagtttctttcaggtaaatgaaaaatggcaaaaataatgcctttcatttctaaacacgaccataaagataaaacataaaaaatgatgacagatttgacgaactaaatctttaaaatgtctgtatgccaaaacatacacaaaaacacacatatgcaaattaaaagataagtgagtaggtggagaaataatcataaccaaagagagttatatcttcaatctataaaaagctctgataaatatgaaaaagataaatacccccaataaataagcaaagatataaacagataacttaaaaaaagatgatcaataataggaaaaaaatcaatcaaatcacatggaaaagaataagataacagtttgaattctaaaactggcaaaaatgggccaggcacggtggctcgtgcctgtaatcccagcactttgggaggccgaggcacgtggatcacctaaggtcaggagttcgagaccagcctggccgacatggtgaaaccccgtctctactaaaaatacaaaaattattcaggtctgatggcaggcacctgtaatcccagctactcaggaggctgaggcaggagaattgcttgaacccgggaggcggggggtgcagtaagcggagatcacaccatggcactccagcctaggcaacagagcaagactctgtctcaaaataaataaataaaataaaataaaataaaatataattggcaaaaatgggccaggcacagtggctcacctataatcccagcactttgggaagccaagagagaaggattactcgagaccaggggtttgagatcagcctcagtaacatagtgaggatctgtctccactaaaactaaaaaatttagccaggcaagatggtgcatgcctgtagtcccagctacttgagaagctcaggtgagaggatcactggagcccaggaggtcaaggtttcagtgagctgggatcacaccagtgcagtccagcccaggcaatagagtgagactctgtctcaaaaacctataattaatttaaaaaattttgaaaactaaataaatacaattggcaaaaatgattgaaaggaagctaacttcaatattgatgagggtgtgcaaacatatgcactcgcaaccactgatgacgggaacataaaaacccattcaaaggctgatatatggatattctctcaaccagcaattcaactcataggggtttatcaagaggaaatatttggacaaattaaaataatatttagccactaaaaatagtaatccacaaccaaaatattaatggtactgagtgaaaaacatgtacaaaactatgtgatatatacaaacatatatatagtataagcctctgttttaattaaaaatatgaaaattaaatgtattaaatataatgtattaaaaatatgttataaaaggttatgtgtgtgcatatatgcgcatgcctaaaatggcctcagaggactttgcaacaaaagtttaacagtctggggccgggcatgtgaaattaattatcgtttttaaatgtttctagatctcatacatatttaaacaaacagcataaatatttcttataataaaacagcaatactattttaaatgtctgttttgaggacaatgtatttaggaaaattgtatatagaacaggaaaggagtacaagcatggaaaagagggaagtcagtgttaaattataaaacctgatcacacactctatttgttcatcatttagaatatacttttcaaatggtttcaatacaataaagccttaaatgttttgctctaagcattcttgatttgatttttcacacatagtatattttaagggctgttcatttgactgcatttggttcatttaaattcatctcatcaaaatgcaaaatttctaagagctattttatcttcaaaaaaatcccatttaagtctaacttatgtcatattttttcttagaaaaaggaaaacaaattttactaaaagtaaatgaacttaagttccaaaagttcaaggttgacacaaaagtaacttaaacaccataagacagaaaaacatactggccttcaattcttattcaaaaagtttatttacccacatatgtttctttagtcatcagtctacaaaacaatttgaaccaatttttcctatcttttaaaatcttatgttacatattcttctttgacatagcaaatgaatgttgagccttttcctggaaaaagaaatcaaagcctgtcattgccatgtgcccctctcctccaatcctgcgactcccagtccattgaatctatctgtcacttagtttcaagaatatgacattaaacatgctgattcctctacttagaatgacttttcaaatcttttatcttccatgcccagcaaatactcagacccaatactccttcaagacccaatctaatcaccttatctctagagactcctaatcactgtagtggagggtgcctcaacttccttcagtggacaaaatctacatgcaacaagttcatgcacacacacacacacacattcacacacagaaattgacacacccactttcacacacatatccagactcacacagatttacacacaaagttcacacacacagattcacacagattctcatacacactttcacacacatatccagattcacacacagatttacatacacaagttcacacgtgcacagattcacacacacagatacacacatacacacaaattcacacagatttacacaaattcacacacacagatacacacagattcacacacacatacataaacacacaaatttcacacacacaaaatcacacagattgaaacacacacattcacacacatttacaaacatataaaaattcaacacagatttatacacacgttcacacacacaattattgggcttatattgtaactatctgttgacatgtctttcttctctagcagactcagcttcttatggaatgccctgtttgcatgccgacatatacacagaacctccccagatgggtgataccccacaacacattccccacaagagtttgctgaattgattaaacatgacctatcatgaacgttatcattattttagattattttctcagtataatacaactccttttaagatccagtcccatagatgtgaagtgggctgaagagtttggagttcatatgacacaagacactggactttcggtgacaaggaaccatggtatcagatggtgctttgaaagtaacattggctgcacacagtggctcatgcctgcaatcccagcactttgggaggctgaggcaagcagacggcttgagcccaggagtttgagaccagcctgggtaacattgcggaaccctatctctaccaaaaaatacaaagattagccaggtgtggtggtgcatgcctgcagtcccggctacttggaaggctgaggtaggaggatcacatgagcccaggaaggtggagatttctttgaggagtgattgcaccactgcactccagcctgggctacaaagcaagaccctgtctcagaaaaaaaaaaaaaaaagtaaagaaaataacttcaaggagggactgagaattgggagcaatttaggtgtgaccaatctagcatggggtgacagggacctgtattaggaggataacaatggcaaacagagaaaaaaaaaaaaatctgtacgatgccccccagcaagtgtcaggaacaggcaagaaaatattttatgaaattcatctggatgtgagaaggtccatgaactgtgttggacaatacatcaagggaggcaattaggcaaggcccctttcccacagaaaccttgagctacactgtttatatgtggaagcacacaaacagcaaggagctgggcacaggttctcagcaggctgatcaatctgaggctccatcagtgctccctctgctgtagaatcctgagcgcttgctgagtatataacgcctttgccacttcttcagagattcctcccctcgccccaaagtgtaagacagacatcattcagtggcatgtactaaaaatacaatggaatgtctagcatacttgctgaattgagaaaacattaatatcccaggctcctcgggtaccagaatggagtcaatgctagaaaccactcttctgagaaagagtcaaaagtgccacagcaggttcaatgagggtgtcaccactaagttaagatgctgtcacaaggctaataaaaagattaaacgtattaaaaggagaactgatactaagacaaatttgatttcctttccccaaaagaataccaagcatctgagatataggaggttaagtgaaggtcaaaagagacagttagattcattcataagcaatttacttttcaggagagattttgaaagattatttaacttagaatgaatagtaaaatattcaaggtagttatatggcaattaatgaaaaagtggaaatgaatattaaattcctagctcaccagtgtcatggtctaacaagaaaaggaaaccaatttctaattttcccatggaatgacttacataaagaatttgtagatcttcatatacaaagacaaatatttaacttaggccaggtgcggtggctcacgcctgtaatcccggcactttgggagggaaaggcgggcggatcacctgaggtcaggagttcgggaccagcctggccaacatggcaaaatcccgtctctactaaaaatacaaaaattaaccaggcgtagtgacaggcgactgtaatcccagctacttgaggctgaggcaggagaatcacttgaacccaggaggcagagggtgcagtgagccaagatcacgccactgcactccagcctgggcaacaagagtgaaactctgtctcaaaatatatatatacttaacttagattttaagagtttttctcaactaatagagttaggtaaagtaaattacttaactgaactatctgcacattttcccctaatttatctttggaatatagttatgagaaggctggtcaaaaccaagacacaaaggtagaccccaaaaacccaacagggagagggggaatcatgttttccctcacatgacctctctcacaaagggctataaaagccaaaaatttaaacagacttagataaaaatttgaattatttccaaatgcagagtgctaaccactatagtcaagtcatttaaattccctgtggttaagtctcttatctgcaaaacatgaacatataaatctctttgatgacattattaagcatttcacacattacatatccatctgagaagacagcactgaagcagagaagtccaatattatgtatgcaaaggatgccttgcaggaggaaatcctgtcctccttcagttctcactgatttatagatcctaaaatgtataaaaacaagcattaagtatttttaaaatggaaaacaaaatacactggaatgagaatgtttatccatgtgactttgcacatatgaaagctgaataaatgttctgtatcatccagttatttcagtttcaggagttaaggatactgaggataaaatatcctgattatggtgcctgcatttttgtgttcacggagttatcctgtcatatagatagcctaagggtctctgaaagaaaagatggagttacgaatagaaatttatttctaggaccaaattcaagttcaaatttgcatgataatatctgcagtgctttattcctcttaaaacccaagttaccaagctcttaaactcagctctctttgcattttaatgaacagagtccaagtctgatgcttaaatggtttgtttttattttaagcttttgaatcccgcataagacctaccacagtgctaggtactcagtgggtctctaaaaaacttattggctgtttttaaactgtaccttacatgtctctgaattataacacatgatattaaattcagcagcaaggaaaataagcctttaagttcttactttgctatgcttccttgctatatggaaagacagtgtttatgaaaatgtgattgctatggcttacatgtctgtccccttcaaaactcatcttgaaatttggctgccattgtgacagtgataggaggtaggacttttaggaggagatagggcgataatccccaagcggatgggattaataccattataaaagggtaagttgtgtgcctttttatctcttggcccctttgcccctgccatttgaagcctctttgatcccctcgctcaggaggacaggacggcatacaaggtgccaccttggaagaagagaacgaccttaccagacacaaaacctgctggcaccttgaccttagacttcccagcctccagaagagtgggtcaatacatttctgttctttgcacattacctagtctgtgatattctgttatagcagcataaatgcactaagacaatgaccattctatgtggcaaaggctagaaagaggtatagggtttagagttagcttctgaagtgaccagctaggacagaaacactgcgagaaattctttgtgaatcatggctttttcattcctggagtcacttttccttcgataaacaaacaaaactccacctgtgaatataatagtctcatatccaaaagggctggctggtgctgggagaacaggatatatactcctgaagcctttccttaagtggtagaatcattcttcactgatgaatccaacaattattcctgagattgatgtgttgatttagcaatgctctatcactcagcatctctctgtttatgcttttcctctcccagagggcagccattctaaagagttatccctctctgcaagtagcgagactcataaactctacatgagcatatttaaggacttccaccattcaaatgaaaaaaattaccaaatagcaaatgatcctataaagaaaaaattttcaaatgaaaataaaacaaccctcagaaaagccatacaaaaatataacccaccactatcctctgaaacctttggaaatctctgctgtcttactgaagtacttggagttttaaatgcagtttactggctaagactgaaaatagctgggcgcggtggctcacgcctgtaatcccagcactttgggaggctgaggcgagcggatcacaaggtcaggagatcaagaccatcctggctaacacggtgaaaccccctctctactaaaaatacaaaaaattagccgggcgtggtggcagatgcctgtggtcccagctactggggaggctgaggcaggagaatggtgtgaacccaggaggcggagcttgcagtaagctgagattgcgtcactgcactccagcctgggcgacagagtgagactccgtctcaaaaaaaaaaaacaaaaaacaaaaaacaaaaaacaaaaaaaaaaaaaacactgactatatttacatatgcctggacagagaacatagaacactgtacacaaaacattatctgatatacctttaaagttattcttaaccaacatgagggaaaatctgtcattagtcaataaacaaagtcaattgctgagaggaacactctgtacattcagaaaaattagaattcctgccttgcccctaaaaagaatttaaacatagctgctactgattagagacagggtatttcaaagtccagccaggaaaaaataatcagaataattccccttgctcctagatccaggagtcagaaggtgaatcacaagcaaaaaattcattaatttatgcttgtatatcatgattttccagctctctaaattaagggaaaaaagccagccatacaatgaattgtgggcatatcctataaatggattttcagaaatattgtcaaagttcttcaaattaacttttcaagaccaattcaacaaatacctttctgggtttctttcttttctttctcttttcttttcctctcctctcctctcccctcccctcccctcccctcccctcccctcccctcccctgtcccatcccctcccctcccctgtcccatctcctcccctcccctcccctcccctcccctcccctcccctctcctcttctcttttcttttctttttgagatggagtctcactctgtcgcccaggctggagtgcaatggcttggctcactgcaacctccacctcctgggttcaagtgattctcctgcctcagcctcccgagtagctgagattacaggtgcctgccaccgtgccaagctaatttttgtatttttagtagagactgggtttcaccatcttggccaggctggtcttgaactcctgatctcatgatccacccacctcagcctcccaaagtgctggggttacaggcatgagccactgcacctggcctataaatacctttcttggactatattagaaattaactttcatttttatcgtaagtacttttaactctaaaataaaattaatatcaaatcacagtaaacatttaagcatatctaaaaatgagtggttatgggggccatgtcctccgacagcaaactaacttcccttacacaccacatttgtcccgttacccattggctgcatttagttcttctaactgcacccaattcctatattctggaaaattctctggctccattcatttattccatagatatttactccaattatctcaagggtaatgcagggcattagtgtttacaaacattcttcaaacctgtcataattctattcttctcttatttcctgttagcagttatttacatgcgtacatatgaatgattaaaagatataaaaaatgctcagtaaatgttggtaattatttttgattccacatttcagggcaaatatactgagtatttcatagacttacattattattattattattaatttatttatttgatatggagttttgctcttgtcgcccaagctggagtgcaatggtgtgatctcggctcactgcaacctccacctcctgggtcgaagccatctcctgcctcagcctcctgaatagctgggattacaggcgcgtgccaccatgcccggctaattttttttgtgtttttagtagaaacagggtttcaccatgttagccaggctggtcttgaactcctgacctcaagtgatccacccgcctcggcctcccaaagtgatgggattacaggcatgagccaccacgcccagccaatttacattatttaacacatcaacctgattaataacatctccaatattacaaaagcaaaagctgggtttccataggataagtaactacctcagtgtcaccaaggcacccaatagaggagccaggattcacccccatttagcctgaccctatgtgctgggtaataaggggaaagttgtatataagttcagtagacaaaattaaaaggaggtacctttgggaatgtcataataatgcaacgtacctccttctaactacgtgataaagcattataagtatctagatttgataatatcctgatattggcatctccgaagttattgtgtttcaatagttagcattaattcgaaactaaaatgtactctgctaatgctatctgtgagaaaccactaaaatgttctgctatgattgtcagaaatatgtctttatatgttcatggagagggcaaaggtacactatgaacactactgactgagacacattatcaccccattaccatgttctggttggtgagtaagtgtcctgggaatctcagaagagaaagaggtcctgtgccatcctctccaatatgactatgagttaaggtcatagcaatcaggacttgaaatctaccacgaggggctataagccggttcgtaatttgacagctgctgcatattaaatctaatatcaagagccaaacagtatttctaatcaagtaaatggatgactttttcccttgaaacagaaaaagaagttctgtaaacatgtgtttgaaggacacagaaaaagagagagagagacagaataaattaggccaaaagatatatgaactgttaaagcttgcaattaagacacttgttcttgattatttaaagaaatgagttcagttccatcaacactgaccgagtgccttacatgcccgtgataggcactgtggcaggtcctactaatgcagacacaatgcaggcatcagtgctctattagtccaatggtcatgtgaaaggtaagctatatagttaaaatcaccagatccaagtggaagaaggctgtgacttattcacctcgctattttaataaagaactacattttaacaaacatttaattaaaatgtttttataagaacataacataagcacacagtagcatttattcttatttttgcttttttgagatggagtctcactctgttacccacgctggagtacagtggcgcaatctcggctcattcaacctctgcctcctgggttcaggcaattctcctgcctcagcctcccaagtagctgggattacaggcatgcaccaccacattcagctaatttttgtgtttttagtagagacagggtttcactatgttggccaggctggtctcgaactcccaaccccaggtgatctgcccacctaggcctcccaaagcactgggattacaggtgtgagccaccacgcccagcccacagtagcatttattaaaacctggggttacagttgtcactgacataaagactagtctcacttcttgacctggtagcaactatcaaaaataaaacatagagtctcgggaacaaatggtagtccttcccccttacagaacaatggcaataaatatatttatgataatataatagtcataatgaaaataaacattactgtgttgttatgcaaagaataggttaatctgatgattatacatgcataatatgtgattaaatataagcataatagactatcagttaggttgcagtgatttacctttaagaatatcaaaataaacctccttgatgattacaaaatgactttcctcataaagaagcacagaaagaaagtaatcttgactagcaaaatgaaagctttactcatttgaattatcatgcagaataaagggagagaaaaatgtatctatgttgcaaggagattatacatctttcataacttggctctcaataatacaaataactagaaattttcatattttctttgggaaaaaagttacatatcaacataaccatacttgaactaagtgagtttttgagttttttttttttttttagatggagtctcaatctgtcacccaagctagagtgcagtggcactatcttggctcactgcaacctccgcttcctgggttcaagcaattctcctacctcagcctcccaagtatctgggattataggtgcatgccgccatccctaactaatttttgtatttttagtaaagacagggtttcaccatgttggccaggctggtcttgaactcctgacctcaagtgatctgcctgcctcagcctcccagagtgctgggattagaggtgtgcaccgcggcgcccaccggaacaaagtgagttttgctgtgagaaaggccaaatttcagtaagaaataggatgatcagaatgtaatattcctcacattaacaaaaaaaaaaagcaaacaatattaaactaggatttctaaaaaacaactgagtttcccaggaaatgggaacttcataacactgtccagccaggtgggcactatgtccaggcagtgtccctgtgctttgtgcggtcctgctttgctttattagagcagagctcatttttcttttttttggagacggagtctggctcagtcgcccaggctggagtgcagtggcgccatctcggctcactgcaacctccacctcccaggttcacaccattctcttgcctcagcctcccgagtagctgggactacaggcgcccgccaccacgcccgggtaattttttgtatttttagtagagactgggtttcaccgtgttagccaggatggtctcgatctcctgacctcgtgatccacctgcctcagcctcccaaagtgctgggattacaggcgtgagccaccgcgcccggcccagagctcatttttcatcaccattaacgtacagtgccataaagaaagcttctgggtggcacctggcacacggtgggtgcgcagtaagttgcagctgtcattaccgtcactatgagtgtggaccggatgaaagctgaggtcaccatcctctcactctcttccactcccaccagctctcctccccctgcaaagcaccccacctttgggcaccatggctcatcaatcttgtactgttatgctccagctgaaattctgggatttctgacaaactgtatgactgtgatgttttatcttattacaaattttagtgttctttacatagtcccttatgccataaagcaacacaaacacatacccttgagatagttcacatggggtcatacctacgcagattttaaaaataccaccactagacttttttgcctttttctcctttgtttcattgtaaatatcttcaatctctctctctctctcaaaaatacaaaaatgttacaagaaatttaaaaaaaataacactgatagctcctaccatccataaacagatatattcgtattttgctttctttcttcccagtatttttcttcctcattcacacttctgggaaaagaaaggatagtgactgtatgtttaaacagctgtactcataagtacactttttttttgtcttccctttttaaacatttaactttaaatttaacttttaaaatttaatatgtgttttttctgtgtttcagattatttgcaacgcattcaaaacacatcttttcatggtgtaaccgaataataatgaatgtggctctaagccttcccagatactcataacagcaacatttatattaaaagtagagatacacttaggcttattgttgatatttgcatttgtattctcaatactttcgaccattactagaaatctggtcttgcaactctgtttgttttctcactttaaaacctccctggccattataaacatatattcacatattgctttatgtttttgtttctgtcatggtaatactgtacttgacatttgtatctccaacagcatctggcacagtattgtgcacacagtaggcattaagtaagcactttaaaaactgaactcacttaagggatttcaataaaagggctaactcgttggaaattaaataatttgtgaatgagacaccaagtaaatgtattagtcactttctgacttgatataattttcacgtaagatgtgtgtgtgtgcatgtaaacacatgtgagcttatctccaaaagtgccagatgtctttatctttcttctcctttcctttaaaataaaatttatatgtttttaatagcaaagtaataaatgctcattatggaatttttcatatatatggacaaaaaaggacttttcattgttcatgtctaatagtaatatattttaggaataatactaaccttctgagaccataaaatttccattcagattatttttccaaatgaaaagaaagtatctgagagaaaaattttaaatacctgctgataaacatactaaacgaaaagcaaaagtaatgaccttaattccaactttgtatcaaccttaatctatctgcaaagttagccatctttcttttttttattaagatagtgaaccaataaagcagaaaacaagtggctagtacaacatatttcaaagcatccattgatcttgcggctttcttgccactttccatctgaatcttctgtccaccagtcttgaatgggattgcaacctaaatcagtttcactaaagcccacatcacacatagacagctggctctagtcttaatgaagactaatgaaaacaatgaaagccacaatgaaacccgtaagaaacactgacataacctacagactcatcaagctttcatcagtactctggaatacttttttattatgagtgaattggtgaaaaaacaaaacaaaaacaaaacaccgccatgacccggcacagacgcaacgtgtcacttaggagcacatactctgggcacacaacagcctcatgatgatcattctggcaacgtgggaatggctggccccacagactatcctctccaggcctcgtatcaactagcctctcagcttgggagctactctagttcaaagtcaccaggtctgatgatatcatagacacaggtggtcactgtctcatggggggccctcctctgaaggaacaggagccagattcctgaatggcgcactccttcccatcaggctgtgctcaagatgcatcaggctgagattaggctacaagccccagatggttgttaggaaaccattacaaatggctccaaatttaaggatagaggcaagggacagaggtaggcaaacacagctaggaatacacaggcagaatgatactttcttttttttttgtaagtgtcacatcagaactttgtttttctttataggtacatttttgttagtatcatctaaactggccacatgtcgtgttctgctttgctaagtgctgagtatcctcttcttaatttttttaaattaaatttaaaaaatttttcacggatacataatagttgtacatatttatggtgcccatgtgatatgttgttacgtgcattgaatgtgtaatgatgaagtcagggtatttaggacatctatcacatcaagtattcttaaacgatgcaattgtaagattattcttgtgaagaaaaaaatgactaaaaggaacatttaaatggactcatgttcatctcttctgtgtactctgaaaattttaataccaaatatcacctaatatataagcttttttttccacaatcaatacaatgggtgggagggggttcaccttgaggtattgaatacattaagaatttaggttaaacttcagttaagctaactcagcagtaatttaaaatgtttctacaatgaaggataacaattttgacaattatacagcaagtgtgaaataagtaagtaataataatcctttgtaataataataatcctttgtaataataatcaaaattagtgatattctgacccacattcaaattcctatgtactgaactgctagaaaaaaaaaaaaaggcatgttaggaaaaagaagagattccaataatagcagttagtatacagcttcacagtttacaaagagtcttcaaaaccagaacctcatttttttgtttgtttgtttgttttgagatgttgtctcaccctgtctctcaggctagagtgcaatggcaccatcctggctcactgcaacctccacctcccgggttcaagagattctcctgccttggcctcccgaatagctgggattacagacactcatcaccacgcccgggtaattttgtatttgcagtagagacgaggtttcaccatgttagccagctggtctcgaactcctgacctcaagtgatttgcccgccttggcctcccaaagattacaggtgtgagccactgcagctggcccaggacctcattcttgtaacagctctgtggaataggtaggctatttataatccaattagatgtatttatctttgaactcattaaacacaatttatgaatacttgtttcagggatgcattttctggcaacctcttcagattcagctttatgatgaatatctggttacttgtccccatttgggttctgtggggatttgtacagtccagcattgtgccgatcagtattggaactgctcatcatgtacctactgacttatcacctgcctgcttccaaacaccactgcttcagaatctgcaaagagtaaaacagacacaaccaaaagaggtgtgttcactttttgccctgtacattagataaccacagactggatatatggttatttgatggagaaataaaaccaagtaggtaccctagttctcttcaaccttgacacaacagctttatgtagatgtcaacaaaaattttaaaagattcagaaggatcaaaagagtgggacatagaaaaggatcaacattaattttaaaaatatactttattataagaaaaaaataatgtgtggtgtacaagctgtaaaaggatgaaatgtaatgcgatctcagaatgtatgtcaaagatacttccaaagtcagctaacacatcacgattacaaagcccacaggacataacctttaaatcctctgaacaatcacagacatgcaaggcagggaccatttacagaaggacactacgcgaaatgatgacaaccagaccaaggagagacaagtgctgctggatacgatgtcagctaaagcattaactcttctactgtctgaatgtggaaagcaattatatacgaaacagaattaggggttaattaggaagtataagagcacagcccaggaatatagaagtaaagtcagaaagacccagaggcaagtacaatcagcaaagctatcgagggcaattgggcatctttctagaacaactggttgcatatgaaagaaacagaaaaatttaggttcactaatcaatgacaggtgaaataaactgatcatatgcaactggatggcacgtctattttgtgcttttgaaaagaacctgagaagcccttggtggaatgctacatatctggaaaacaatctatcaatatcaataatgaaagccattccatcaaacttataaactttatttatatattcctcatgtgaaactatggcatcatctctctggactttacacagtacggtttatcactgaaatctcacaatacggttccactgggttcagcaaacaaagggcctattttgtttctggaccagatctcttgccttcaagttgcttgctgggggctagatgtatgaagataatgaggctatgaaagggtgtgtaccaggagccagcgggcccagaggaagggcaactggctcaaactcaagggcagtcacacccaaaggagagtcaggatagggcagggacaggaacagcttttagcagagaaaggaaaattttggtagatattaaaaaaggctaatgtcgcttttgttaagtgtgtttctagataatttattctagaataatctaaccattaaaacactcctttgggccaggcacggtggctcacgcctggcctaacactttgggaggccaaggcagtggatcacttgaggtcaggagttcgagcccagcctggccaacatggcaaaagcccgcctctactaaaaatacgaaaaattagcctagcgtggtggcgtgcgcctgtaatcccagctactaaggaggctgaggcaggagaatcacttgaacctaggaggtggaagttgcggtcagcagagattgtaccactgcactccagcctgggcaacagggcaagactctctcaaaaacaaacaaaaaaaaaactacccctttggaagagtagtcttaaacctttttgctcaaattcttcatgaaacaattctgagaaaatcacatgccctttgcatactttaagtacaattaacagtattttatcttacatataaataattacaaaaatgtagtttagatgtaaagactgcaaattctaaataaacattttagaatctcctaaatatatccaatggatctcaattcatgatatgatatccactattattaattttaaaaatacatgaacaagttccttttaaaagtctggacattttacagccttccccttcctcttttctgtttgaagtctacttctattggattttattgtaatatattttgattcttcaaaatctttcattgttcactccatatacatttctgcaacaaaaaaatatgtatgacttgcatggtaactgaattacataggctagtttattagctagaccacttagaggaatttagtatgaatgaaatgaatatgtcatccaagttcactgttagttacagaatgttcacatgctcaaattgttcctatgatgttaattctaaaaagtacagtggtcaaagcctgaaatacttcctgatgtgactgaacatgatattttttggatattatgtagaaatacttcctttgcttttcctgtgctatagttaagctcttcctttcttagagcttattttctctctgaataatctttcagaaaatcacctgagctgggcgcggtggctcacgcctgtaatcccagcactttgggaggctgaggtgagtagatcacgaggtcaggagatcaagaccatcctggctaacacggtgaaaccccatctctactaaaaatacaaaaaattagctgggcactgtggcgggtgcctgtagtcccagctacttgggaggctgaggcaggagaatggcgtgaacctgagaggcagagcttgcagggagctgagatcgtgccactgcactccagcctgggtaacagagcgagattctgtctcaaaaaagaaaatcacctgaaacataactatgatatccctcatggcaacaaaaaattgttcctgagttttctttttttctttttcttttttctttatttttttttgagactgagtttctatcacccaacctggagtgcagtggtgcaatcttggctcactgcaacctccgcctcccgggttcaagcaatcctcctgcctcagcctcccaagtagctgggactacagatatgtgccaccacacccggctagtttttgtatttttagtagagacgggttttctccatgttggccaagctggtcttgaacccttgacctcaggtgatccacctgccgcagcctcccaaagtgctgggattacaggcgtgagccactgcgcctggcttgttcctgatttttcttgaggtttggctctaacaattacagttattgtttttttttaaatatctttagtgttgctctatttgaataattttagtgttatttttaaatagaaataataatttcactgctaatccaaaagtaaataaaaatcacttttccaaagataaaaagtaaaggagttaaggttgaacatgtgttcctctctgaactagagttctaataacacctatattatcaagtctacttacttttaacaggctccatttgagttactaatgctaatgttaatgaataaataaaaagtttacaaatagattcatacttcatagcaaagaaaataagctcattgaatattaatgtcataatcaagttgtacaatgtatacttttaacttaatccaaaatgccttcacaatttctaacaagtttgctgtagaaactcagatacatctggtgaaaaaaaaaaattccaaatttaattgcctaacactgcttgtaataataagactgtaacaagatacaaagatatcaagaagtcaagactgtagacatctcaaagcaggtcaaataacaacatattaaaacccccttttaaaaatatgtggaattctaaataacttataggcataaaaccacttattatctgcccccttcccgtgaaatttttgaaatcataagacaatggtttatcaatttttctttttcttttttgtatttccacaagtgacaactcagcaacttgtaaatgtttcacaattatgcttcaatactttaaaggtaggctgcaaatacgaaatatttctttattattttctcgctaatcatgtccattgagtgaaaggaataattgttaccatgtgatgtttcttacttcatatttactataatttgataagtagatcaatattatatttcaagtatttccattaagtgtgcaacacagatgctcaaaaggtgaaaggcaataacttcctaggcattgaaataaagcaattgtcttctctgtgactcattctttatagaaactaaagcagaaagcatatgatcaatgttcctgtagtgtgaattttctaccataaaagaaaatgcacacattttatattaatggtggaaatcaggtatctgactatcctagaatagctacccaaatctacccttttcatagaacccaataggcatttaatcttaactacagtcatattgagaggcatggttttaaaattaggacagcagagaaagcttagattctcctggcgctaaagggtgaattatttctaccaggggcccagagaaagggactgacttcccaaggaaaggaagcttcatgcatggggaatccgatccccgccacctcctacatacaagagggtcacagaatattggtgcagaaagacactatactagttccgggtttcagacacacgtgaccttcaagaaatgcagggctcctcccaagtctaaatagttatcaaaaatctaactttaggaaatgttagtgaactagttctagtaactaaaaataaacgaaccattaaagcatgctttcttttatgctactacagtatttgtgttaatttaaacttgattttttctcttaacctctatggaaatggacaaaagatacaatgttaccttatatttatatgaaatgtacgaaagttaggcaatgcttccttatttttttagaatatgtggaaaaaaataaacagggctactaggcattttctcctaggccaaacctggcaagtcgtctattttcctattctccaggataatttaacagactttaaacttttctactattttagatgtattttacgaggtggaattaaaaatgaacattgaaaatggcataactgtttcatatccttaaatatttttcccaactcttctttgaaatggttaattatgcacataaagaatagttttgattcacagatttgactctgctgtgattatatatttgaagacctttcttattatgtgtctatattgtatgaattttgcttgtaatacagtaaatacagttttgtctaattgtttcatgcctaatgtttctgacacgctatttatctgttttgaaatgcaccctccaatcttgattcttactcccaacagacatagattgaacttttatcatatacaattttactctgcacaatcttgatcactattcagtaatatgtggcaatgttaaactccataataacaaaccagggcctggtcccccacagggtgacttccactaagtcctttcaggttacaaaggaactgtcattattcctgtgattataggtaaaaataacctgcaatagaattcattcctagataatgactagtattattttacaactgtctcttttcatccagacataattttcatctagaattataatatattgagcattttcaatggtattttacaaaaaacaagtttttatctgaattaaaattaacgagcctttatctgagttaaaatagaatcacgatggaaatgaattcatttcactgtgaattaaccaacatccactgagatcaaaatcaccatctgtgttgccaaaggaagtgtaatatttgtgcatcagcattttcattttaaattttaactttcttataaatttctgagaaattgttttaatcatatcatggaagtctactatttgaagtaacaaatatatgggccccttcaggaaaaaataggctcctatgcaatcgtttttatttcttaatctactgaaagaaaaaatcttgagtttccagatttttattcatttatatactatttcaaccagccattcaacaatatttgatctgagggtctagtacatgccaggcactcacaactgtgaatacagaagtgaaaaacacagaaaaattgctcctcatggagcttacattttagaggagcttttggaagatgaaaaagataataatagcaagtaaataataattagttctataaataacagaaaatatgaagcctaagaagttcatgaaatagaaagaagttgttgcaaggctgggcacggtggctcaagcctgtaaacccagaactttgggaggtcgaggcgggcggataacctgaggccaggagtttgagaccagcctggccaacatggtgaagccctgtctctactaaaaatacaaaaattagctgggtgtggtagtgcatgcctgtaatcccagttactcgggaggctgaggcatgagaattgcttgacccgtggagacggaagttgcagtgagctgacatcacgccactgcactccaacctgggtgaaagagtgagattctgtcaccaaaaaaaaaaaaaaaaagcaattgcagaataattaaatgattaaatattaaatgattaaatgcaggccaaaggactaatcatgtgcccttccctccagacaaattacagtacgttcaagaatgtaggtatcactccttccctttctactcctatactgaaagagctttgcaagtttcacatattattttatgaggtcccagtatacatcctaaaaatgtaaaaatcttttccagtttccatttctggacatatgatcaattaaactgtaatccttcctgctacaaaacaccagaaaagctggctcggtgataagaagcattttcaaatgttgaagtcatttataaaaagaaatccccaggcagttaagaaacaatgagtggacacaaaataagagctaacccagaagataatgacacttcccctaaattggctagtcccggcaaccagtaggcttgaaagctgtgccctcaaaaggctgtggccttgatggtggaccaggaaagtccacccgacctcacaagcaggacaggttgaatttgcgtgtcttttgtccagaatctgggcaagaaaaatgtctttccagataacagaatggggttcaaattgacatactttcaggtccagacatccttaaacagaaaaaataacaacaacaacaacaacaacaaaaagcagtctcaaccaaataatacgcccggcagaggcaaactcgaaagcatgctggagaaagatcctgtcaaggcaggctgcgtgggttattcagtgacagagcccaggtgaagatgggctcacaagtgaaaacgtcagggtacacgacagcacacgtggccattcttcccgaagatgtcaatcagaatatgggcagaactctgtcagcgtaaatatgaagcagaattcacgctcactgttttatgcttgatgcctaatttcaaccatcaacaacaatagtaacaacaaaacagaaatgatgaaaagtcttctagaatatttacaaagcatatacttcactagtttctaaaggtggaaatcctaagagtcctaaaattattaattcagttaataaattcatccttgaagaaaccatgtatccaaataccaggccaggtaacaaccaatttttaaaatctatttttaattgatgtttcatttatgtacagcaaaatgtacaattcctaagtgttcagcctaataatcttttatacatttatatacccatctcatcccaacacagatcaagatgaatgctttcatcaccccaatagcttccttgtgcctctttccagtaacagcgttccctaactctcagcagtaacccctttcctgacttctatcaccaaaacgtggtgtggcctattccttaacttcatgccatcacgtggtatactcgtgttcagttcctttcaaccagcatagggttttgagttcaaccatattattgtacatatcagtagtttattttttaattacagactaataacccatgatttgattgtgccacaaattgtttattctttcttttgttaatggacatatgagatgtttccaatttggggctattatgaataaagaagatgtgaacatttttgtacaagtctttttgtggacatacacacttacatctcttaagtgtatacgtaagagtactaagtcagatcccataccccaaaacgctgttctgatttattttaatcacagatggtgatgtggtttggatccgtgtgatttggatcacccaaatctcatgttgaaatgtaatccccaattttggaagtggggccagatgggaggtgcatagatcatgggggcagtttctaatggtttagcaccatcctctcagtgttgttctcatgacagtgagtgagttatcgtgagatctcattgtttaaaagtgtgtagcccctcccccttctcactcttcctcctgctatggccatttaagatgcacctgcttccccttcgccttccaccataattgtaagtttcctgaggcctcccaagaaagagaagcctctatgcttcctgtacaacttgcagaaccataagccaattaaacttcttttctttataaattacccagtatcagacatttctttatagtagcgtaagaatggataacatagctagtatcttagtacattttctgttgccataacacaataccgcagactgggtaaattataaattacagaagtttattgggatcccagttctagaagctgagaagtccaagaacaaggcaacggcacctggtgagggcctttttgctgcatcataagatggtgaagggcacacatgtcaagagggcaaaagcatgcgcgtcagcttgggcctctcttcttctaaagccgccagtcccatcatagtggccccaccccgatgaccttatctaatcctaattaccctcccaaaggtcccacctacagtcaatatatgaatttggggatttggtttccaaaacatgaacttttgggggacacattcaaaccacggtaaatgggttttgttttagaaattcatatgtataaaagtataaagtatgtaatatttgtttaaggcttctcttactccgcatgatgatttctgaggttcatccattgttgtgtgtataattagttcgttcctctatcttgctgctgatgggcagtcttgcacaagtacttccgtggacatatgttttcgtttcttttaggttagagaggggccatgtttccctttcctcgaaccctcttcccaactttctctcataagacaatgaatttaaaatgttttctgaagtatagctaggatcttatataaaaaacaattgtacttttcatatatgagcagtacatttttatatatgaggagtacatttttatatatgaggagtacatttttatatatgaggagtatatttaaagggtgaatgctcagaaaatattaataagacacccctagattttactatacatattgcatatttatcagattttcagggaagaattgtgattccatcagtgtcatttatgaatttatcgtatctttaacaaactgcaagttttgacaaggcagtgttccaatctatcatgtgttttctcacctgaagactcatttattcaacaaatatttatcaaacatctattttgtgccaaggattgggagtacaggaacacacaaactattcactccgtagttgaagagcagagggtgtggtacagctaatacagcaggcagtcacatacatccccatgtcataaatgctaggacgggtatccccgcatggtgcccagggagcgtgcaggagagagcacctccgcgtagtcccaaagagtcagaaaagaatccagggagaaacaacctctgggagcaccctgggtcctaaaggctttagccagatgaggtggcgttgagagggagagaagagagaagagaaggcaggtaagggttgtgggatggacaaggcagaatgtttcaggcaaacagagtgtcatgaattaaaagctgggaagcaaggggaggcatcaagtcagtaggagtggagagcagcattgaaggtgagggtaatgaggggaggccacagaggtgggtgaagccagaacactgtgtcttgcatgtggttttggagaattaagagtttgttgtgaaggctccaaagagccactgaggagttggggcagcccaaatgtgtgatttggaatcatcattctcactgcagtggggacacagagcggtgtgggacaaagcaggaacaaaaagacacaaagacacattaagagtccattgtaggtatctgggttagagaagttgttggtcctgagctatcatagaagtgggctagaaagtgaaaacccatgtctattcctttacctgtcttctacaacattttcacatgcaaacaaactaaaatgtatttaatcataagaaaatcaggtaagctcttttcaaaattaaaatataagcctcaaagcaccaatgggtctcaaaagcagagagtggccttttagaaagcaatgggggaacaaagttcgcagctaaattggtgttcttggcttggcgatgcagaaagtaagaggctgcaggacggcaaccatactaagtgtgtcacatcctctccgcctggggttcttggctgacattacccatcacaaggaccgcacagggttggtccaactcccaaaccccagaagctccaggatgcattgctattatgccaacttttagttttcacacaaaacaaaggattttttcttttggttcgtggggtgtttcttatgaatgaattgtgtataactcagggaagagttccctatctgagtatattactgttgagtgacagatttctcagttgtgaattattaaggttgcagagatacctctaaaagtggcaggtaacaactaaaaaacaacagtctgcgaattcctacatattttgctactaaatgacatcagctggagccatagtcctcaggccttaactaccaaaaaagttgaggaaatacatactcgctttctcttcagcttttcccctaagccagaggttggcaaactacagcctacaaaccagatgcagcctgctattggtttctgtagagctgtgctggaacccagtcccacccgttcatttacatgttgtctttgactgcctttgcatgagagcatctgacctgagtagatgggacaaagaaccttacggcccccaaagctgaaaatatttaccacgtatcccttaccaaaacacatgcaggtccctgctctaagcgatgctgaaaaataacatctaaagtatcctgttttctaaatttactgaaacgaataacaatgatcaaacattgaaattgcaaaagaaaagttttaaattccccaaagcaacttcccatatcttctttttactgagatgtataaaattcatgagctgcttgagagagtagagcacgctggaaaccacccgcacgtgccatccacagatgggaagggctgtcacatttctgaaagggatcctgcggaagctgattaaactgttagaaaaccatttaagggagatctgccagaccccaccaacagactcagattttagaggacagatatttcagaggagtttcatgaggcatttaaaagaagttcagatccttaacactgcgaggatggataccaagcagaggctcacgaacacttttcagcagagttattaaccaagtcaacacctccctctgttgcctgacttgaatgcagagacaggtgtgtgagttcgacctgaggaccacactgcaccgcagcaattgcacctgtctgaccacagcaacctttcctctcttaacagtaaagcttcatgtactccttgtacatggcaagtacctgctttcataaatcagggcaagaaatggcaaatctatcttaatttccacctcaaaaagaatcactgagcaccgttttaaagggtctcagcactgatccccttgggtattctctgaggcacctgtggtaatccttatttgtttcgcagcctgtgctgaatgaaaaccatccaagtcaaataccttgctttcccctgtagcttcccccactcagtttgccttccagggctaagacagcatgaagcacagaatattgattggaaaagcactgcagactcttcgtaaagccagccaaattatcatctaccatatatgttcccacatgtaataagaaacctgattgattcataaattttagagcatatttctagaaattaacaaaataaaatcttttctgggtccatgtttttcccccacactcatcccctacatatgaagtctctggtgtgtcagctcgtgtgtgacagacaaacaatagccttttccccacaggccctgtttctttctctctcctttttttttttttttttaacttagaccctgccattcattttcacctctgacagtaaaaccccaggacaagattgtcacaaaaaggattatctttcagatcaatggtgaaattgatttgaaaccccactatttatcagcctccagcaaaagtgcaactggttaggaaatatgtcctttcacactcatgttatgctcagttcacccaggcagcacttcacttcatttcacataaatgcaataacctggccttttacttaaaattaagtcattttccacatagatttctatttttttgttagaatatatgcaaaatgaggattcatactccaaaattacttgcatgtatttctaatcataaagtatatatcacttgccaaaagtgatcttttcattatccttttataggtgatagagaatcctttacttctagcttaatataatagaccaggtatagatgattttttcagttaaattttctaaccctgaatatgaaggctaaaatatagactaaatggaaagctccagtaagaatagagaagattaactaactactttcatcctacttctcaatatatttttggtctcccacattgattcccatattaattcccttaccccaaaacccaagagaaaatttattcaaattaccgacaatgttacttgcctaagagttattttaaccacagagtccaatagcagtgaaattttatcaatatcaactaggtaaaataaacccagaaaacccagggtatcaattccttggtataatttaaataaattaatttaaaactaaaattctagtctgtctattcagtaattcaaaacaccctaagaactcaaaatactaaagacaactgtgtaagtgatttttaataggttgatataattcattaagaaaccaattaccacaggtaaaagttaaagaaacagtgtaagagctcttttagcaagaaatgtttacctgtatacttatatagacatatatgtgaagtactagggtaatgatttattatacccaaacagcaaataaacagctaaaaagaaaacaaatatgtcaaaatgatatattcatatcacgtggccttgtacaaacattttacaatgtctagtgtacaaattttaagttccttaagccagaaataaaagtagacaaaaatttgccaatggcttctattttaagtattcatatttaagccaactatttagactaatatgtattttctcataaaatttgactatattcagtgacaaaaattttatgtaaccaaaatgccactgaattcaaatgcagagattcaaagtttattgttaatcttagattccaaggccatacagcaaaacctttcatccaagattagatttgcatttaaaaagatcaatgtgcctacaatgaacagaatgtttgaagaagaagcaaaatagatgtgaacaaacaaattcgtagattaaccactctatcatcttttgcctctcactgaattacagatgctccttaacctatgatagggttacatcccaataaacccaataaacaaatttaaaataccctaagttgaaagtgaatttaatacacataacttacaaaatattatagcttagcacagcctaccttaaacatgcttagagcgcttagattatagcccacagttggtcaaaattatctcacacaaatcctatcttataataaagtattgaatatcttatgtaatttattgaatacgatattgaaagtgaaaaacaggatggctgtatgggtacttgaagtaacgtttgaactgaaagtgtattgctttcacaccattgagaggtcataaacttgttaagtcaaaccattgtaaaagccagggactgtctgtagttcagtcaagaaaagatgattgattggactagggatagtgatggggaagatggagagtcacagatgggaggaaaaactgacaggacttggtgatagatttgatattgacatgaggaagagagaagttgcaaggcagattcccaggtgaacagttgagcagtatagttatttattattttttgagacagtctcactctgtcaccaaggctggggtgcagtggtgcaaccttgcttcactgcaacctctgcctcctgggttcaagtgattctcctgcctcagcctcccaagtagctgggattgcatatgtcatcacggctggctattttttgtatttttagtagagccaggttttcaccatataggccaggctggtctcaaactcctggcctcaagtgattcacctaccctggcctaccaaagtgctgagattataggtgtgagccatggtgcccagcccggttatttattgaaacaaaaacactggaagaagacccagcttgggagtgggtgggtgggagaagagatcctgattttaattttacacgggtggggtttgaggtgccttttgagacatccaaatgtagaagtcacagacacaaagagatctctgggtctagactagagattgattcatgaatcatttggatactgctagttatgaatgccatggacataaatgacattggtgagagaccatctagtgagcttccaaaaaagacaggaaaacacatggccagaaaagtagaagagcttgtgtcaccaaagcctgaagaaggatgatgctggtgctggatgttgctcaggtggcactggtaaacttggtagaagtgaatactgtggagataagaggttagacaacatactaatattaggtggagacaaagcaagtgagaccagaagcacaactttacccattccagaggtgttactgccaaggtgggaagagagtcagggttgtttccaaagagagagagaaattaaatgagtttttttttttaatgggggaaacctgggtctgtttaaaaacacatggaaaacatcccactgataagatgaggctgaatataaaagaaaagggaggataatcaatagagttaactttcttaataaactagaagtgatgggatacaaagcaaagcaccagtgggagatttgccttaggatgcaaggaagcttggatgggtttaggtaggtttatttgcttggtatcaggaagatgagggagtttccatatgttacttttcatttcccatgtaaagtaggagaagagttcatctgccaagactgagcaggagtctggaaaagagaagggaagaggtatgaaactgttgttgtgaagactgggaagaaaagctgatcagagatgcctagcaagagatgggacaagcagtgctgagagctcatttgaagctggtgttcaaacattaacatagagccaatttgtcctcttgggcgtctttctccaacatcttgtggctgcacaggttgaaaggccaaatagttgggttcttccaagttttgtgtttttacagaagacagcaatgcaaagattgaaaagcaaaggtagattctaggcctactctaacacagagcataaacaatggtgttattgaagttatggaccagggagtcaggtggagaaaagaaaaagggaagactgacgtatcgggagaaaatacaggagtcaatagactggaggtcctaatgtagtcccaaaacagtcccagtgacaggggttgaaagcgtaagctggagtatgttcactggaacaggtgaatataccgacaaagtcaggacgttaatgtaggaccctgtggctcaaggacaggaaaggaagcagtgagaagatgggaggtcaaggtgtcggatgctaaatctcccaggataatgggagaggttcgagtatagacagagattacaaacaaggtgtcaactcttctgtgagcaagaaagaatgtggtgatgacacaggagactaaaacttgaatgacataaacctcaaatgatcatgttttgcaaaaggttaaaggacaaatagtcaagaagcagaaattcagagtaaaaatgtcaccaatcccaattcttggccctgggttagttggatgagaatgtaaacattcatgacttgaagggacacttccaggaaatgggaaacctcagatgtgagccaggatccagctaagaataagagaggaagttaagaacatagggaggcatgctggttatggagtggaagtctcagtagaaaaatcatgcaaaacatgtgtgggtggtcagaagagagtacacagccctttaggactgaagggacaggagggtatctactggggcatgggacaggagggtatctactggggcatgggtcagtagcacaggggagaaagtctccacgtttcctgggagtggatgagcaaaggcctcgcctctctgccagtgaggctctcttcctgagaagagacagtgtgctggcagcaagcactggttctgcaccaccatctcagcttcttcacaaagaggaccaacttccagatagaagagaaaaagaagctagaaagaaacataaaggcaacctcatcaaacccctttcatgtacagaagataaagtgcaggcccagggagcttaactgaccttctcagggtcatgcatttaggaaaggggcaggactaacttgagctcaagtcttttggtacccagaccacaaaggtttctgatattccatctcttcctgacctcgccttagactgattcactgcagacctgaagaagtaacccacgaaagtgggaattaaactggacatttgactcaaaaatatttttataaattagaaattaaacagaaaagaatagcaacttcatatagtttataatcagaagaggagtttgtggcttttaaaaggtaaaaagagtttattttacttacgatgctaaatttactcctatagttatgattcttcattgtcctgaaagtcaaatatcactaacactgatatcaaattgactgtgcattggcctcaaactgcctttttaggtaatctctcattattgtaggatcaaaatcaacattttagccaagcttcaacacaaactttggatatttaaattcttatttttaaatttacattattctttatgaaaattgactactatatttaaaacacataaaatacattaaacaaaataaaactaatgctctacaatgattttattgccacagaaatcttatttatctttgtgtaatctatttcactaggttagtaccagtgattctggcaataccctaagacagaataaatggtaggcagctgtgacatatcacaactaagcgttcttaaacgcataacacagacattaagtaaaaaacaacattagggcgattatacattaattacatggatacgttttggaacaaaagtaatttaaattgcattttccatagtgatactttgaaaattcttaccatttcatgtatgttttgaaatcatttgagatggatgaaatgtaagagaaagaacgctcttacaacaacaacaaagctcatatttacatagcatgtactctgtcaggtactgttataaatgctctgcaaatatgaactcaacccttcttcacaacaaccctgtgtgctaagcactgttgtccccatttagtgacgacaaaactgagacccagagagggtatgtaaatcatccaaggtcacacagttggttagtggtagaggcaggatcagacctcaggaggactgcctccaaaatctaggctcttcaccacatgctatggttctgtcctaagcaggattttatttgtaaaaatagctctagaaatcttactcgctaataagtttataacgaatgtgctgctacgctgttagaggtcactattccaacatggaagcaaccatgtcctgctacgattcctcaccaggctcacatattgtataatattaacaagtaacgttaaactataaaaccatttatacacaaatgaaggatttcttgtggtataatagtaaccatagcaacaaagtaagatgggtttgcaaagtgaaaagtatcctaaggcatttgatgccctcacaaaaagctttctctcaatttacaagaagatgtaaccagtaacagcaaaataatagtaaattttcaaaacagattatattgctatctagattagcaatatttcatgttagcatttttatttctaaaagaacaaggggctatattcaaattgctcccatttacatctctatagcaggaatccttaattcattcgagattttatgataaattttgactaaggtaacattttttaaaaatcatgatatgtacataggttcaatgacaaaaatatgcaattagaataaagttgtaacaatatcacatgcatcctacataagtataatgagtagaaatatatacttagcatacaggagaatcataattatctttagatttatttccctaagaaatagattttattttttgtatatcagaactgattgtgaagaataggcctcactggagaaataatgtgttgaatccttttgtaatatctattggcaaaggaactatacaattgcttaagtaaataaatattaaagactgctagtaccatatatagaattaataaagaaagaaatattaagggagggctctgcttttgctacaggggtttctcgagccttgttctcttcaatgtatatcaatgaatggataaattaaagtagcttattgcttttcaaatatttggatgatagaataagaatacaaaattcagattgctacaatgtgctgatcttattaagctgaagtttaatagaagtaactgtgctagagtttcgaaaaacaacatacaactagcagaactaaggagatttggtattaactgacaacagcttccatacaaatcaacagcttataaccattcacagagtaaatattatcacaggtgtatcaagggtgcattacactcagaaggaaggagccgctaacctaccctacactatcacatcacacctccagtacaagggcattgtatttcaagaaggacacacacactgagggacatttacaagaaaagtgccaggatgatggtggattgttaaaataatttcatgtgaggtgtgtgtcacactgagaaaggtccagttccacttgagaagtttcctgaggtcagggactgaccacatcttagttttgtcatcaataccaagtatgcagtagactcaaggtaaatgtttgttgtacaagtgaagcgattaataaatctaaatgtgcagaaaaagatacttagttatgacaagagtgtgaaaatcttcaaatacttgaaggagtgtatataaagaaatgatacagcggggcgtggtggctcacgcctgtaatcccagcactttgggaggccaaggcgggcgtatcataaggtcaggagatcgagaccatcctggctaacacggtgaaaccccgtctctactaaaaatacgaaaaaaaaaaaaattagctgggcgtggtggcgggcgcctgtagtcccagctactcgggaggctgaggcaggagaatggcgtgaacccgggaggcggagcttgcagtgagctgagatcgcgccactgcactccagcctcggagacagagtgagactccatctcaaaaaaaaaaaaaaaaaaaaaagaaatgatacaaattatttataataatagaacttaaacagaacctccataatagaaccaggaccaaagtgtggaagccacgggaaaacaaatttcaattcaaaagaccatctagtcagggctgtcctaggatggaatgttgaggttcctcatcttggaagggatcaggccggacgaaggtttagacatgttaacactggggaaaatagctttctagcgcagtggaaaccaggggcagagacatcgcggtattgaaccagatttctctcgacaagttaagatgctgacttgctgaggctctgtttggtcctagggaccagatgcagtgagccgagatcgcgccattgcactccagcctgagcaacaagagtgaaactccatctcaaaaaaaaaaaaaaaaaaaaacagcaaaaaacaaaaccaaaccaaaacgttgccttaaactgaagcatacacatcaacagcataagttcttccaggatgatgatgaaaggacaaggcataaaatggttacagtgtccccagagttacgctttccagacgcagccctaagtggtgaaaaatcgtgctcctggagctccctagggagggtgcagcttccaggagagaggctgcacctgcttctggcccacagagggcaccttgctgctcacacatttttatactactggatcattcaattgtaggtttgcaactagtctcttcccaccaacctataaccccttggaagtaaaatgtttaaaatttccactaaccctgaaattttgttactatcaaatattggtttaaaagactaaaattaataccaacaagacataccaattaatcctgacatgttgcctatgagggagatactatcattattatttccactttacagattaataaaatgcaatttagaaatataaaataacttccccatggtctctcagtttgtagcatttggactaaagctgcaggatatccaactccaaaactcaaggttcagccatgatgataagatattccttgcacttagaagcactgacattaaattaagagagagaatgaataacagcagctttaaccaaccaaccaaagtaaacctgttttttagggaatagagaataagtcttgattttttaatttaagggaatttgtgtaatacccaatgagataaatttcaatcctgtattacaatcagtttgactcatattatcttgttgacaaaccatagatttgtaataattctagaaaaatgcctctgttgtgtttcaaactcactacgtcactttacaggcagccacaggtgcagttgtttaacggtgagctgcctgtagagtataaccaagacagctgaactctcattgcagtttactgtaagcttgaagataaataactcattttgcagcaaatgcttctacctcttcaccaacaattacaatcctttagtttttcaatgtacataaagagaactcccctaagaaaaaaatgaaaaaatatacacaaattttgaaagtcatccttcctgagtaggtatccattgtaaacagaatggctgataaaatgccttacagactgaaacgcaagatgaccaagcatgaagatttaagaaataggagtaacaaaaataaaaacaccatataactaatacagtcattatctcagaaataaatgtgtattgcttagcttgaagagtcactaccaaaaaggtcaagatcttaaaagaacaggtactgttgcaatcactgagagggttccaggaaatatacagctaatatgaagaaacaaaaagaagagaaaagtcctgaggttagcaggactagtggaataaatgacaattatttaagaattctgattatgtattctgtaaattatttcttgcatttataaatactgtatttgtaggagtcaaatgattctgacaatattacttttgtcttctcctatagtaatattttaatcataaactaacacctcctaaacatgtaagagatatctgaactttttaattaattaaatcacccagttagttactaggtgagttacctgagtgcctctagggactcaggagatggcggtggcaatggcataaatgagaagggtaagtcatgagggggaagttttgtgccataaacctgtaagtgcaaaatcaggcaaagggccacattgtctgctttacatgccattttagtgtctctctaaaaaatattttcattgcccttgtaaaataatttatatatgttaacttatacatacacttcaatatatttgtgcatcaaatttcaaaagctctagaaccctgaatatatttaatgtgtgcctttaaatttgcattacacctcaaatatataaatgtcaaatatgtacatgaatttttaaaacataaaaatatttttaaggatgccctgtggtctaaatcaaataaatgttcacgaagggaaaggaaggttaggcactagactctactaggccacaacacgtatctgagctttgcctatgaagttttgaatctacaaaaacaacttatctattttccagatttgtgaactctaattgatgaaaactcaagtctgtatttttttaaaaaagaaactgaaagataactagcatagaaagagccatatacacagtttagttggttttgctactgtttatattttgaaaagcaaagattataggcaatgctccacactgtaaataacaattactctatgtctaatccatttctatgcattgagaatagaacacacagtcaagatgtgtccatggtggctttttgctttattctcaccaattaacaggtgattggatatgacagtaattagacacctcagctggaagaagatcattatgtcttaatgagaggattaaaaacaataaaaatgtgcttattgcaaaatatgagcacataccttaagtagcaatagtacaatttattttgtctccaagtttattgtgctttgtcagcccatatcaaaaaaaatttcccaccaacatgtgacttagaaaattacgcaacctaagcatacaattaacaatttttggtgagtcagttctatgttttggcttattttttttgataatgttcactagtgcttctctgacaagttacagttgccacataatattataaatgttatactggtacatttcacattcacccaaaatttcagctatatactcagcagtatacctgctatgtagttcaagataccatctcaaatttaacttcctcaatttccatgagatggattttttttttagacctgcacacagacctatgtacacccttggcaggcactcacagatgcagagtgactggaaggagcacagaaggtctctgatgcaatgcacatgccaccccagcaaggtcaaaagtctcctagcaactcttcttcgggttagagttttgtttccctaaaactgatgtttaattgcatgtgccatctgtaaaggacagtattaatagctaacacctcctcttattccaccattaattaattatcaaatgtgccagcattgagatctgctttacaggaactgaaaaatacagtgtaaaatcaggacaggatagaagagagggacgaagaacgacttgcaaaaccctacttgtcaggggacatgtgggtaaaaagttttgttcattcactcacacactctttcagtcactcattcagaaggacttactgatcacctgttatccacattggcagagtatataaattaatatttaaccaaggtaatcattctttagtcctaaaccaagaagatgctctcataaacattatgtattattgccaatttggaagtaaaacaattctatacccgtatattcaaaaccatgagctgtcacccaggaacctcctaactcatggctcttaaacctataaatattagggtatccaaatgtatccttctctccttcatttaagagacagaatagggtttccctcttttatttaaggcccatttacccatatcctctggacactacccctgaccccactgccttctgaagactttgtgcattatcccatagtagttcatggtagagtatttatttgcttgatagtaagcccgctggggacaagggagcttgcctactttattcttatttctatctctagcatctaacacaccttggcacacaatattaagtcaatcaatccttgctgaataaatagacttagcaatgtgcacaacttctgccccaccccgttgctatcactgtaattaccccattaaatgccataaatattatttataaaaagaataaaacttacactgccttccagtggtaagcatataattgttgcatgacactctatacaatgatacccccccgtaatataactcactacacagtttttacactgaaactgtatccttcttgtattataaaggtgaaatggtatatagccaagcatatctgagcaatggtatggctttttcttgctatcttctatcaatcaatttatttgtacagcacaaaattgctactcctctgaattgaagcaggagaaagccttacataatataacactattctgatacatcttgacatatacattatgtaacagtacttttcctttgctatacttcgcaatataatcgagaaatgctcttttaaagtcagcaacatcagcaggaataagacttttaaatgaagctcctaggaagacagaattctcacacttaaaaacaaagtatttattccacaggaataaatattacatgttttctgaaattgatcaactgcagtgatcaggtaacacttgcattgttaagcagtaagaatgatttcttaaaaattattatttaatgtcatggcattttaagttagatcttaaaatttttaattgataataattgtacataattatgggtacaatgtgatattttgatatatgtatacattgtagaaagattaaatcaagctaattagcatatgcatcacctcaccctacttaccattttttgttgtgagaatatttaaaatctattcttttagcagtttagaaatatataatacattatgattaatattattttttgagacggagtcacactctgtcacccagcctgaagtgcagtggtgtgatctgggctcactgcaacaaacacttcccaggttcaagctattctcccacctcagccgcccaagtagctgggattacaggcacctgccagcacacctggctaatttttgtatttttggtagagacagggtttcaccatgttggccaggctggtcttgaactcccgacctcaagtgatctgcctgctttggcctcccacagtgctgggattacaggcatgagtcaccatgcctggccatataatacattattaactatgatcagcatcccatgcaattattccttctgtctagctagctagaactttgtaccctttgaccaacatctccctatttccttccactccagcctctgcttctatgatttcagcatttttagattccacatacaagtgaaattatgcagttatctgtctttctgtgcctgacttatttcacttagtataatttttatctgaaaaataatttttttttgttatggtcctatgatgaaatataaaaccatagtaataactaacaagtaatagtactaccaggagtactaatactacttaaagtttattgagcacttactatattcaggcactttcctaaggggtttcaatgtattagtgcatttaaaactcagagcagccccagtaacacaagaataatcattatcagtatttattcttccctaggaacctgaggtgcagagatttgaaggaattttcccaggacggcagctgataagtggtagactgagggtttaaacccatgctgttagtgttaaacattattctttctttagtgtctttatactttcatgtgaataaaaataaattactattacatgcctctttctgtctgaaactgaagtcattttttaaaactgtttggagcacatttcagaataggaatgatattcaggatcagccactcaaatttcaatattttaaggaaagggtcttatgaagtgtgtattcaatcttatcaatgcatggataatggtgagctatctggcaactgccaaaatcctactactgtatgacttagaaataaacaactattttaagcgctacttggtaactatgctgccaaccagtttctacactgcctttataggaaataatgtactgtgatcaccaatgactctgtttataataaatcaaatattttataaatttatacaattatatggaaatcccagacacatttctcctttagaaaggcaagcagaaacaaatctatcccgtgttcaggaaagtaaaggttttcttcgtgagtacgctctgaatctaaataagcctcagtccaaaaagagttttactgcagactgataatcccctaggtttataataaaaatgctgacagagctttagctacagcataacaaatgaaaggccataatgttcttctgtcagaaattcctatttatttccagtgtcctaacagatgggctttactgccttgaaactcccccccaaaagttaattgcttgtctatcaaaaagataaacatcttgttttaggctttggggatattacatgtgtagagaaaaaccaatactcgagcaacacattgtgtccgaaatgcattcgcagtaagagagccatactctctcagggcatcagagtaaggaacagctggatgactccaacttcttaaaaagtacaggattctctgcatagtgacactagcatctataatacctagattttagtataccaataaggattgatttactgccacataaatgactataataactttacaaaacaaacttcaaaatgaaggtgaaactcttttagactcttgaaatagtgcctcaagcaaaatgaaccttaaacatatctaatccagtatttttcctttttttttttttttttgagatggagtctctctctgtcgccaggctggagtgcagtggtgagatctctgctcactgcaacctctgcctcccaggttcaagcgattctcctgcctcggcctcccgagtagctgggactacaggcatgcaccaccacacccggctaatttttaatttttttttttagtagagatggggtttcaccatgttggctaggacggtctccatctcttgacctcgcaatccgcccgcctcggcctcccaaagtgctggaaaactatgcgtttactactttagctagtgtacaatagcatggggatctcattctccaaagagctggtttaaatggaaaatatgtagacagcctcttaactaatgattcgcattaaaaaggaaaattatgactttaacacatgcgtattggtgccactaccagattgcacgggaaatgaacctgactgaatctggacatttttgtgttcttagaatattttacttacaaatataacagttgtataaaaagtaataatacagaagtgttggtatctatcctttcactttttccactcacacacacacacacacacacactaccgcagataggcaagcaggccgactgaagcatgttgaataaatcatacttctattcttactgttctgctgcttttttcactaagcaatgtatgatggacatctttgataaaggcctcattcattctgacgaatggacagtttccattttatacatattctacaatgcactttattagttaatgagggtatcttctctctcacaatattttttataaacagaaaggtaatatttgcacatgcattaacatacatgacattgcaatctgatatgcttaaatacatattagacataccaaaatatatcaaatacatattatttcttaactgctttgcacgtgcattctgcttgtcttctatggaagataaagaattgagggatgttatacccattccctccttctttcctattctacctcctgacttctggcatttgtattttacttttatctcctcaacaggttatcatttataacttcaagtaatatatatttaagctgtcttgttgacttatcaaccttaagtcaacatctttttcagtgaaaatgaggaactgctgcgtagacacttgattccactttttccgtgttctgccaccttctggttattgttaattacattattttttttctaacatcaagagaataatttagtctccaatgctttgtgtaaaatttgattctaaaaattaaaactcaacataagcaacatttctagcattatgactactgaatactattcattgcaaaatgtagtagtgtaattagatccttagggaagggattttcatccaacactaatgtgctgctgcataagaaagagttttgaaagtttcaggccttcatgtattatctttttattcccttttagttctccatttagtttcagttttccctttaatttatattcagctatcacttctcctgtatatcatccttttactcattttttttgggttaacacccaacacatttgcatatagatattctttttaatttttaataaagatggggtctttctatgttgttcaggctggcctccaactcctggcattaagcaatcctcctgccttagccttccaaagtgttgggatgacaggcatgagccactgtgcccagatatatattttttaccaatctttgtatttccggtgtgtatgattaaaagttgggaatagaattctatatttaaattaattttctctcaggtctttgaagacactgctttgatagcttctcggatccagtgttgttgatggaaaacataatgttagcctggttttcattcctttgcagacaatctattttagtctcattggaagcttgtggcatcttctttattttgaaatttcatcaagatatctccacatatccagctttgatccagcccgcttgccagacttttacatctgtctattgatgcctatggtaaattgagagcagcaatggccccaatttgtgcctagctttggaagagcccttcccgggttctctgggtttggccacataatttgctttggcccatgggacagtactaaaggaaagtaagtagcgacttgaaaatgcccctgccttggaaattgcactcctgctgctcttaggaatcctgctgccaagagaacaagtcgaggttagcagggtgatgaaagacacatggctcagctcctcccatcaccacaaagatcacagataacggcatgtgagttcaccttctatgagctaatcccagccaatcttccactgaccagagaaacatgagtcagttcaggtggaaacagccacactgcccacatcagaagaatcaaccagccgaatcagacacaagctaaatgaatggtctttgttttaaatcactaagttttgaagtcatgtgttacataacaaatgttaattgacatagactatttcttgagcttataaaatgttgtcatgaaactttattttctgcctttcattgtcttattattttgtattaatcagatgttggacctactgactctattcactattgcccctaactctttaatgttccatttccttatctttctgttttaagtgttcagagttaatcttcaatttatttatttattttttatttactgagacagagtcttgctctgtggcccaggctggagggcagtggcaccatctcggcttactgcagcctccatctccgggttcaattgattctcctgtctcagccttccaaggagctgggactacaggtatatgccaccacgcctagctaattgtattttttagtagagacggggcttcaccatgttggccaggcttgtcttgaactcctaacctcaagtgattcgccctcctcagcctcacaaagtgctgggattacaggcttgagccaccgcacccagcctaatcttcactttaagttgaagaaaaaaacatgtttaggcatcaacagttccctttccattatttggtttaatacatttttactgtgataatcatacttttaatttcctggaaatttcttgttttgattgttcctttttcataacagcctttacagctattatttcctttcaaattctgtttttttttttgttttgtttttttttggtagcagagtctcgctctgctccccaggcgaatttttgcatttttagtagagacggggttttgcaatgttggccaggttggtctccaacacctcgcctcaggtcatctgcccaccttggcctttcaaagtgctaggattataggggtgagccaccgtgcctggccttcctctcaaattctgctgagggtattaattagacacctttttaaaagtttctggtaatccctgaattgtacatgaatcttctggtatcggttgcccttttcattcttctaaatacagtttttccctaaatatctgattgatgattcttggatctgataatcctagttacttttctaagtgaaaaatgacattgatttgtatgggtaattcatattgtttcatctgcactgtgaaatacatgatcccaaaaggcttcttcctggaatgaaagacatgtcaacactcagaacattctgtgggtttcatgagcggaaaagcaggcaggcaggctggtgacacccatgcctgccaagacagacaagttttattttacacgtgaaatgctttatgaacctcccttttttacacgtgaaatgctttatgaaccgccctcctgaacacctttcccacttttccccaatgctcaatgtaggatttcacttcagagaaacaaaacaaaacagaaaacaaaaacaaacaaaaaaaaccttttccattgttttaatgctaccatatgagaaaagagaattaagctagtgtgttgaacctgctgacttaaactggaaacccagtcattaggcttcagcctcaacctcttttttttggatcttgttcgttagcttcttcgggtcataaatgcctcatgctgataacagaattcactcggttttatttttgagagaatacattttgagaatgattcatgtagggaataatttatgtgtgaagaataaagtttccaatatagagatcttattttaaaaattggctttttttcttaatttcagagaattgatgacactttttaaaggatttctgaaatcagtgatcacttagatgaatgttgctattatctgcacacattgctacattaaacgctccagaatttaaagttcgtttgagctttctgacactaaataatatttcgttttatttccaaacttatgaaagcaacataggcccaaaaggacagcagtatattaaaataaaataaggttattttccaatgagaatagagataaatcattttcccaaggagagttcaccaaagctagagactggccgaagaaaagtagccctcagcttcaaagatcaagctaattttaaaacacaacctatctcctgcttcatttgtcttaaatcttaaggctgttgtccaacaggtcatggcagtcaaaagaactgtcatataaaatgtacatctagtaaggccctctctatttttattttaaaacagtgattttaaaaattttggtagaataacctaattatcaaataaaagcttatagaaacccacatacctacacatatataaaaaaactgaagtacagttgttttgcttgagaaggctgaaggtgggggcagagatgcttcacagcctagcttcattcagggtcctgagataccacaaagacaccgtttttctcaaacaaaactgaaatctgccaggcatggtgtctcacacctgtaatcccagcactttgggaggccgaggtgggcggatcacctgaggtcgggaggtcgagatcagcctggctaacatggtgaaaccctgtctctactaaatatacaaaattaactgggcatggtgccgcatccctgtagtcccagctactcgggaggctgaggcaggagaatcgcttgaacccaggaggcggaggttgcagtgagctgggatcatgccactgcactccagcctgggcaacagagtgagactctgtctccacaaaaaaaaaaaaacaaaaaccaaaaactgaaatctactcttctgttacgtgaggagaacaatctgtgtctcatatttaaaatttacaagtatagatacatttttcatgaatatttattaaaaacaattaaataaaaattattccattaactcatttgtttaacatttccatgtaaccacagcaatgcaaagcactttgagagctgcatgggaggtctaagacatggtttctaatatcggagttcaaatagaaatcacatcggaagctgaagccacattgtgtggtgctcacttccacagcagacttgtacagcttgaagtatttaagcagattaactgtaaaggaaaaggaaaaatgttacttagctgcatcttaaaagactcttgggattcaaacaatctataggaggaagacagctaacacaccagcggtagagaaaacacaaacatttttgtttgttcggttttttgtagagacagggtctcctcttgaactcctggcctcaagggctcctcctgccttagcctcccaaagtgctgggattacaggtgtgagacaccatgcccagcaaggacagattttcaagaagagaacacagcagggatgtggtaacaagaggacatctgtgtaactgaagtggaaaataacatatattggagcttgaagggaaataaaattaaatacctaagtgaggaaaatacaattagtgtttcaaccatctgctaccacttcctactatgcccttccttctgggaaggctctatttcccttcttcactcaggtaaggctcttgcataagtgacttgctttggccaatgaaatggaattagatgaaatcactgtgatgtctcttctctctgtcataaggctgaacgtgctccagatagaaccagctccatcagcttctgtcgtggagtgagggcaacttcagccgtgccactgcaaactcacgatgagcgtgtaactgagcgaggaataaatcagtgttgttgaagcccctggatcaattatcactgcagctcagacaatcctcactgatacaatgcttagtaccagatgaaggatgacgttaaagtgaggactgatgtctatctagtgtaggtttataaacagttttcatttccaaacatgccttttcactcagtgactttaacatggggatgggtgatgctgaacttggtcttgtctagccttagtttacatggcggcatggcagccagtgctcatgttcaggaacctaagatgagaaggcaagtgtcttcagggtttactcaatgtcactttctcattaagacttaaccatccatttcaaattgtaaatgagtcccttcctctttttttctactctgtatctccctcccttattgtctttctccacactacttcaccaccatttgcatgtgtgtgtgtatatgtatttatgtatgtgtgtgtatcatgtatatatatgtgtgtgtgtgtgtatatatatataaacttatgtttgcaaaaacatatctaaaacttatataaaatttatctagttgcaaaaacctgaaaattaatacacatctcatagttcctttctgaaaaattatgatctctacatccccatgaagaaagtaagacaaataaacaaagcactaggaaagttactccagttacttcattagcatgaatttgcaagaaagacttcagtctgctttctttaacagataaaatatatcacagttcaggcagaccttgacttacgctaactcgacatatcttgactaatgaatgacttatttacaactgggtagagactaggaaaatccccacatatgctgccaaatacaataggtatcgctggcaaccaaatcagaaccattcccctgcctcacaaaatgatacttaggttaagtgcaatcattgattagtgcaatatttctggtagatttggggttaatctggtttttgcatgctggatggggaatttaccactgttatgttctttcatgacaaaacaaatgtgatgttttaaacaaaaacattttctaatgcatttgtgtaatgtttccatttgaaaggtagagaatgactgtgctatatttgcaaaacacaagacctctcagggacagcataatacttgcacttccaaaaagcttttcccctcaaaggaagacactgtgcccttgagaatgactctcgaattaatcatagaggaagaactttcatttataaattactactcttacatttcacagatgaaagaaacagaatactttataatatttaaaaaaactatctggatatggtggctcaggccgggtatggtggctcaggcctgtaatctagcactttggaaagccgcggagggtggatcacttgaggtcaggagttcaaaatcagcctggccaacgtggtgaagccctctctactaaaaatacaaaaaaatagctgggcctggtagtgggcgcctgtaatcccagctactttggaggctgaggcaggagaattgcttgaaagcgggaggtggaggttgcagtgagccaagatcatgccactgcactccagcctggacaacacagcgagactctgtctccaaaaaaaaaaaaaaaatttaactgagcataagatgattaaaatatagtcccttcacatgtctttaactgcattatattcaataaaatattcattttaaaatgaaaacttgaaagtaactgaccattcaaattttgaacaagctgaagaagcttcaaatagcagataattaccaatgttttaaacgtagtatgtcctggagggaatccaacatcaggataaacaaggcaaagtctctgttctacagaattcaatgcagtgctggagactgagatgcaaccacataatcctatcatctcaaactgaacttcaaggagggagtaactaactatgccctgaaaatgatggacaatttctaagagggcttgatacttgggctctgtcttgaaggatgcaaggtccttccttatgaagaatctaccatacataatagtgcagaggtgaaaagaaagcacattcaggaaacagtctgtgatggcttcacccagaatagagggcattcaatgacctggaagatgttttaagaggttattcaaaaatatttactatcaactcaatgtttgtcataggaaatgattttgtatagaaattatttccccagattgtgaagagctctacgctgcctactttggagtttattttataggtaatgaggagttatcagtggcttgtaaacaggagactggtaggatcaatttctttttctttatttaaggaaggtaactggagttggaggcgagggagactggtgaccaagagattagttaataagcaactataatgactgaggtgagagatgatgaagggtaaaatggggcagttaggcagggtgaacgcaggtgaagaaattatcaccatacacaatggtgtggcgaaacaaataggtggagagacacaagaatctgcaataacttttaagaatttataacttaaggaactgtttgggcatattaaccaataacaatggagcaactagagatgatcagtgggcagttttgaatactaggagagatgtcaagagtcatcacaggacaggttgtagttgaggccaggtcaagagtctaagatgccactgtataggatatagcagtaaaagaaagaacaggaaaacaagagacctaagcagaggaaagggagacatcaaaccactcggtatcactcgagtgatagagccaatgaacatgggctacagggagtaggacacaatgtcatgaggtcgacagaagaaaatacataaggactataacagtctttagaggtagcaataaggaagtcattggaggaaaatttgagagtttgtggggttagaagccagactgtcatgaaatcaggaatgggaaataaggcagagaaaaaaggtcgtttctgaaagttttgatgatgaagacgcagaggaaacaaggacagttggttgagggtaaggtagagttgaaaattaaggtaaagggaacttaaacataactgtatgacctaaagatggatccagttaagaaatcaatgatagaagctataattgtgaggcaaagtaagacagaaataacctcggagatgaagaaaggaggccacccttttttgagcattcaatgtgtaccagatgttttgctgtacactttcagatgcatttcctaaattagctaaatattaccaataagtaggtatcagtatccctaatccatagtcaggaaatgatggagtagaaaggtttattaaaattggaatatctcagaagtgaagatctctatgtgaaataggagacaaatcatatgttccaacagcattaggaatcaagtagtgaaaatggcagagctcccatattgaatgagaaagtgattcttggcagataagacaagaaaaaaaatattcagagtgcatggtaattattgaataataacaaaaagttaacctggaatgattgcattattttcaagcactagctcaaccataagtgtattcttatatataaggtctaatgaatgctttaatgaacaatagcttttcattttgccaaagatacaggaatatggttcaaagtaatgttacctacattaatcctcactagagtttaaccttaacccagtgaaggttaataaggttccctatttctataaggaaactgtactaaaataatgtctcgtactattttacaattattttattatgtgaaaactccatgctgggaatcactaccaaagactaatttaaaactaattatttcagcattaatctggataatgatccataatgaatgaaaaatgaataatctgacatttcaggggttccctactgccccaattcatatacaagaaaatgcttttgctatgcctttcatacatagattaaaccacaatctaaaatatcccaaagtgttgagatacttacaaattatattttagttatttatagactagaatgcataaatctaagtttcaatgctgagttaattaaggaaagtccaattttataacattatttttgcatgtggaaaaataactaatacataatgcttgaccatatggtctgttagtccttttgctaattacctacaaatcactacacaggttttacagctgctatatattattaactgtagcatgttttccccaaagattttattcctctcttcatacatttttgttttaactatgtacaaaacaagttcgtatttttaaaagagtcaattgcagaagactgaatacacaacatatatatatttaaaggaatgatgctttacatttaaattaatgttaattaattgataaaagtttcagcagaccaaaatattgaataattttcttttagtcaacattttaaaattcttcattaaagtctggtagcctacgacacgcaatgctgcagtcaggcattaaaatgttgtaataacagtttctgatatagaaagcaattagctgtttaaaaaaatgatgtatttcatataagccatatctaatttgggacatgtgctttaaacaatgttagaattaaatctgaattttgtcacagaatctagaataattattatgttttaaaagtataatgactgaatagcatgtcagagaaaatggcagaaaattaaaattgaaattgaagtatataattcccaataaaatgcttgcttctatcctcctcagaatactttcattacattctacttctttatccaattggataaactacctagctgcagtgtaaaatcctactgggccaggattatgactgattcatcacatgcgtcaactgtgcacgatggtctgcacaagtaggtgctaaaggtgtttgctgaaataaaagatccatacttttcgaatcaaacaagttcttactcttacggtgcacacattgatttaccaccttagtcatacagtaatagtgtataaaagccaaaaagattactgagtatataaaataattggtatctgaaaggcccttttaactaccaactataaattcttccctaagctttatactgtcctgccaagctaacaggttttcttcgtactaatgctgcacagatcttcagaaaagctgctatcaattactttgatttcccaggctgcccaaactgctaatggaatttagtaattagagttcttttgaaacaatcccaaatctgagcattctgcctgattacaagcagccatcgacattaacatcaatcgttgacaacgtaatatacattggatgtgccagaggtaatcattatctaaaatcctgtttctagaacatgacttctatctagtgaagaacatgtaatggggatttaagattcttctacctccaataactgattctatcatgaatcttgtatacagcattcacaatcagaagcaaagatatctttatctgtaatatttccagtcaatttcatagaaaagagccttgaattctgtcaccattttaagaggccattttgtccacatcttccctttcaccaaaaatgtaatcagatatcaatacattgtaagcatgatactgtcttacacttgtatttggaagcaggttcccaagttgatgatgagcattcagaataataaactttgcaaccagaattgctaacttgtaaagccaaaaatcaacaggaagcaaaatgagtctgaaaagcacaaaaagtaaaaaattttatagaaccatttgcccacagatcaaaaggaattttgatcaaattgactagtataactcaggaaattacagttattagtccttaagcatttccggtagaattctcatcttttccaaagcttcactcaaatacaacaggtcataagacctcacaatcttctcggaacactaatggagctgccacagtatttgaaggacatggtcatctactgtgtacaatgtttctggaggaaaataaaacttttagagcagagtcatctgtattaggtatcaatgagatgtcaggccacctcaggaatgactgttccactacagtccatgtgcactcaaatatattaaatagtctataaattcaatgtcaaaattaaattgcaactgtcaataaacacaaatagaggactggtttattacttctgttatattaaccagcttttccaactaaaaactgcaatactaactctgcgttctgcctggaattccttataagaagggtgctttaagaattgatttttagtgatgctgagcattttttcataggtttgttggtagcttgcatgtattcttttgtgaagtgcctgttcatgtcctttgcccatttttaaattttttttattgtgttttgcttcttgatttgttagattccctataaattctggatattaggcctttgtcaaatgcatagtttgtaaatatcctctgccattctgtaggttgtctctttagtctgttgataatttcttttgctgtgcaagctcagtagtttaattcagtcccacttgtttatttttgttcttgttgcaattgcttttggggacttagccaaaaaatttttcccagagccaatgttgactagagtatttcctaagttgtctttcagaattatgatagtttgaggttttacatttaatctttggtccatttttagtttttttatatagggtgaaaggcatccaggttcagtcttctgcatacagccagttaatcaacagataaatgcaaatcaaaaccacaataagataccatcttataccagtcagaatggctattattaaaaagtaaaaaaaaaaaaaaaagatgtggcaaggctgcaaacaaaaggaaacgcttatacacttacacactgttggtgggaatgtaaattagtccagccactgtggaaagcagtctggagatttctcaaagaacttaaaacagagctatcatttaacccaacaatcccattactgggtatatactcacaggaaaacaaatcattctaccaaaaagacacatgcactcacctgttcatcgctacactattcacaatagcaaagacatggaataaactcaggtgtccatcaatagtagactggataaagaaaatgtggtacatatacaccatggaatactacatagccataagaaagaatgaaatcatgtcctttgcagcaacatggatgaagctagaggccataatcctaaatgaattaatacaggaacaaaaaaaagaaatactgcacgtttcacttataagtgggaactaaacattgaacacacctggacataacaatggacactggggactatgagaaggaggagggagggaggcatgggttgaaaaactacctatcggctactatgctcactacctgggtgataggatccataccctgaactatagcataacacaatattcccatgtaacaaacctacacatgtactcctgtatctaagataaaagctaaaattaaaaatataaattaaaaaaataaataaaaagaactcacttttgtgtaactgtaataagaaacagaagtaggtagaaaagacaaaaataaaacttgaaatgatacagaaaaatatgcccaagacaaaaatccagtttgttacaataatatagcaaatgtccttagatacaaatgtaattggtaattctaatataatacaaaataatcaggctaacttctccattacaagtatattttataatcattttcctgctggaaaacataagcaaagctgaaattcaaaggatttgttcagtacaatcccttgtgaaaatattttttcatttaaaatattaaatagtgttaagtttcaatacttgtcatatttaatttatactttatgcatgtattaattttgaatgtatctttagtacatatcttttaggattcattgctattccttacaacctagatgagctataaaatcaccaggctaaacctttaaaaaaaaaaatgtaggccgggtgcggtggctcatgccttaatcccagcactttgggaggccgaggtgggtggataacttgaggtaaggagttcgagaccagcctggccgacgtggtgaaaccccatctctactaaaaatacaaaaaattagccaggcatggtggtaggtgcctgtaagcccagttatttgggaggctgaggcaggagaatcagttgaatccaggaggcggaggttgcagtgagctgagatcacaccactgcattccagcctaggtgacagagcaagactgtctcaaaaaaaaaaaaaaaaaaaaaaaaaaggatccatttagtcactgggaagggaggacttataactcctaaaactccagtttctagagaaattcaattatgtataaaaccggatttccagaacttcacacatttggctgattttctagttgagaaatcatgtgaattcacacaaacctggaggttgcagattgcctgagttttgtcccacttgctgaatgcagaggcccagtgcaccccatgactggtgtccccagaacagtctctttccgtgggaccctgaatgtgcctgggatgacagaataacatgaggtgggggaggaagggaggagagtttgtgatgtgagggatggcaggatgaagcgagggagggaggaacgtgtgtagctagatgagctaaacaagagactaacgactggaaaactatttttcaacattgccctagacattctaggtgtgagggaatttaaataatgtttaaacattaatcacttctaaataattagaagtggaaaacagtaaaggagaaatgagacagttacagagactgctaagtacatgaaaaatataccacacggtcttgtgtcaacaaaactaaccagcattttacaaaagggctccagtggggatgccatttctttaaaatagtgactcccctgaaacaaaaaagccaaagttcccagaacagcctgtgcattcacctctccatacctgggctttggctgttctccagggttggaatgcatctgcaggtgtggacatctaccctcacaggcctccctgtctaacccaggggccagcaaacattgtctgcaaagggccaggtggtaaatgtttttggctctgtggcctcctgatgctgctggtttctccctcctcctcctcttccttccccacccttaaaaaatggaaaacccaggccaggcatggtagctcacacctgtaatcccagtgctttctccaaggcacaccctgaggactcaaaccacagctgctaggaagctccctgttctgctgtttctaccatagctgtgatcacttcccacagtaaggatacagtcccatacactctcctgcctctctcctccagcatgaatgcacacttcttcaggcagagctttgatgtcttatttagcttgtatcaccagccactagtgcaatggctgacacgagaagagtgatggacatttgctgttgttgctgttattgtttttaagacggagtctcgctctgtcaccaggctgagtgcagaggcgtgatctcagctcactgcaacctccgcctcccaggttcaagagagtctcctgcctcagtctcccaagtagctgggactaaaggcacacgccaccatggccagctaatttttctatttttagtagagacggggtttcaccatgttggccagcatggtctcgatctcttgacctcatgatccatcggccccggcctcccaaagtgctgggagacatatctttatttaattaaacattcttagactccagttttctcacctgtaatattaaacatttatgttccttttaatctctaaaattccctaatttcacttttgagaagttcaaatactgtatcttacctcaagtatttaaataatgagtttaattcttaattctgcctataccaaagaacaaagtatctttttacttgacttgatttcttcctttcatgcaggacagtcctgggtgctcacaagagtcaagtttcacacacaacagctcacggggtaacagccttttatatatttttcacatgtggaaaatgaacatagacatgggtcttgagaagggtaatcaactgcattctgagctaggcattcaatttccaaaataataaatttcctctatctttagtctctgttcccttcccctctttctcattctgggtattttaccagaaaattagaagtctttaaaatcaaatcagtgcaatgaaatgtttggcttttagggtgaaatcaccaatgtgattatatggcaggatcccacatactcaaaaggttcaaatttgactttgcttgattttatatgagactgttagtgtttctgatgccatttttaccctgaaattcaaatattctccaagagtagaccttatgtcgtagctttgttaacattatttcatcttgttattaagttttcttattttattataataatattattaattttcattactctaagaaattatttcttaatttggttgacatttaggtctttcaactgtcattatgatttaagagtttgttgattctcagtggtaatcatataaaaaacagttccaaggaaaacaatttggtgatgattaacagcctctgatgattccaccaataattgtacacaggcagatctgtcacttgacacaagtgagtgcctcagtcacatgattcgcttccggtttgggggcttggtagcctggtctattttgtgtgcactgctctcaaccataatggcacgaggcatgtttggagaaaaagcctcccaaatgaaaaccattatggcatgaggcacgtttggagaaaaaggcttccaaatgaaaataactacttacaaatcatccttgggttaaggaattctgtaaaaattaaaatggttctgttctcctgagtgctgtgactgaaaagtagtggaaattataaaaattaaatattctgaaggcacttgccaaatatcagcaacagctatatattacttacatagtaatataatttgcccacaaaaaagttaatgttaaattgctctaattttcatatactcttaatcttattattggacaatacatttgttttttcttttgcaacaagtcagtagaaaaaaaaaaaatcttagtgacataaatttttgctttaagcccaacatgaaataaatagcaccaaatgtttggctaaaaatagctttgaaatttttgagccatctccacctcctgtggagcaatgtgggggagaaataaaccaaccaataaataagatctagttctgtttctaaccttcccattttacaaatgaagaaacttggcacaaagagggtaaagagatgactgaaggtaacatgccttgttaagggcatcttaatggaatatattagatgaactcaggcaaatctatgttcctgctcaagatcactagagaagttttgtttctgttctccaagttttcacattaacaaccaagagacagtgacttgtgtaaacagtgacacaaaatgcagacatttggtgaatgaaacggaaatgaaataaacacccataaagaagcaaaacaactgggcatggtggctaacagctgtaatcccagaactttgggaggcggaggcagaaggatcccttgagtccaggagttcaagaccagcttgggcaacatacagagactcagtctcatctgggaatggtggcatgcacctgtagtaagtcgggaggccgaagtgggagggctgcttgagcccaggagctcaaggctgcagtgagccatgacagtgccactgcacatcagcctggcaacggagcgagattctgtcccaaaaaaaaaaagatgtggccaggcatggtggctcacgcctgtaatcccagcactttgggaggctgaggcgggcagatcacaatgtcaggagttcaagatgagcctgaccaacatagtgaaaccccatctctactaaaaaataaaaaaaaatagccgggcgtggtggcgggtgcctataatcccagctactcgggaggctgaggcaggagaattgcttgaacccgggaggcagaggttgcagtgggccgagatcacgccgctgcactccagccctggtgacagtgcaagactccgtctgccacctcctcccacccgcccccccccccaaaaaaaagcagcagcaaaataaagttagagacatccaccatcagattgagatttcaggaggtcaaacttgcaaatacacacactggtgcatacacacaactccagctgatgaggagcacaaccaaatattgcttaccattctaaaattctaaacagtagggagagatcaaagtcttacatgagaaacccctgagcacagctgacaggagctggacatacaggtcttcagccagtacggaagcagggctcgactttgaccttcactttgagtcccatggacattccttctatccacacagaatttctagcttgaaatcaggaagaagtaaaaactttgacctcatatttgacttctgtattctcttttccctattaactctgactatcataaaatacaattaaattaaaattatatcttaattaaaacaataattttaccaaatccttgtaaatttggatcattagatgaatgagaaacttgcttttcaccatttagtttcagaacttctttaaaagtcactatttcaaattacttattcctaaatttactttgttgatactgattttcatgcattcatttccaattatggttgaataacaggaaatacaaaaatttttctgcataaaactatggccctaaagcattgaacgccaatgaatgattgaagctccttgaagaaagcatctctaaaagccctcaactgtcaatcctacaatataacgaaggcagatgacattctcagattcctttatatagtttctttcatagtttcattttttaaaaaaataaaagaaatgctgaaatgtgaagttccttttcagcatgcaatttgttctaatgataatgtaattcctctatgtaaggagttccatattatttctttttctccacactgaactgtaagacaataatattatccctatgtttattactaccccttcaactttatgaagcacaaaatgcctcctttcctgttttcttgacgtacagaattttgcttcagtaagcctaagagtttttttccctagcctgtatacgcttgttctgtgccaactcattgtaaaggagccggtttgaaagcttatcaccattaattctgtgactttccaactctgtctccctggtaacagaagcctacaattacgagacaagaacacaaaggatttgccaaattatctaaattctaatactctaacattttatacccttccgcctcccatccatgcatctattgtttttcccaagtctaaagcaatggtcttcatgttagcttctctatcttcagttttcctctggccaagtcatctaaaacacgcattccagttgaatcttttggaaaccttaggactgtcattcttccataaaaaactttcactgcgccccaaaactctcagagcaaagtacaagtacttccgtttggtattctaggatctctatgactgctaactatcccttttttttttttttttttttttttggcagagttttgctcttgttgcccatgctggagtgcaatggcatgatctcggctcactgcaacctctgcctcccgggttcaagcgattctcctgcctcggcctcccaaatagttgggattacaggcacctgccaccacacccagctaattttttatatttttagtagagacggggtttcactatgttagccaggctggtctcaaactcctgacctcaggcgatccacccacccgcctttcatacatatctctatgcttctgtgactttggccactatacgagctaggtcaagtttgccagtcttcctgtgtcttgctacttcacattgctataaacattcttaagtaaacaaagctctgttttgaattaaacatttccaaagcaaagtatttcactagcttcctgattcaccgcatgcttatccctaacaagtatgcttattccttaggattctccacagtcaatggcgccatttccccagttgctcaggcctgttaaagtacgagtttcaacaaagcaaaatcatgattcctatgtaataaaaatcatgtctcttatgtaaataaaaaatgaatgtgtgtcaaagatcttatacacttagtaattaatgaggaagccagtaagatgttaaaaccagttgaaattaaaatttgaagaggtaggtgtttaaaggcaattttacaaagtaattttatggtaagatcacctggttagatatattaataaaatgggataatgtccaacagggcaataaactataatttttaaatcatcttttccaccagatagaaattatctgtatctctactagacaaaaatctgtacattcaccccttctcctacaaggttttacaacacccaaagcaacagaaaatcaaaggtaaaagcctacactgaacggaaaaacactcagtagttgctccatttttgtttcagaaaacttttctgatattctaccccttatgattataaataatcctcaaagattatctttaaagaaaaagtctagcctcattaggtttggtctaattattcacatggatgcaaggcaacaagagtcctaatcaaacacacaggcctcgagtttgatctgaaaatctagagccttatagtattgagcaactatgaaagattaagaattttctgggtagatttttcatcagaggtctcagatttgatttttattatagtcctcatatttttttatgctgagtgtaggagactcagcccaagacgttttctccagcagattttatatatacccataaatctgggtgaattcttctcttcttgatgacttccaaattctctaaggcctctgatctggtaagaaatcataccttctgtgaagctgatgctctgtaagccaagtaccaagtgccaagccagggttcttgggagactctgtaggcactgaatccatacataactagtcttgagaacaggcttccaactaagaacttgctctttaatagggggcttttcacagctgattaaatgagaatcattctcaaatgcgatattgcttgcacaattgatgtttccaattatgctctgataaaaagagagcaagattcttattgaatcttacccaaataactatattgccaagtcaagtcacaaatcttagtaacatagctgtttctgaattctaagggatgagtgagaatgagataccactaaaaatgtttcactgcagtttaccaaagcatagtctattaaactgaggcttagagacagcttgggaaaaaggagaaagggtttcctcatacaaccataaataagagagcattccaacaacagcaacatatctaaacaaataaccacaattaaattagtctcatcagttcatttagtccttagtaattaagttttattctgctggatactgctttcataaagtatgtctgctgctggactgaaagaagtcctggaaatccttagtcactgatacagtctgcaagttgtctaagcaatacctgtttgtaaggctgtgcttgacaattccctgaaggggcaatggttcataatgctggtacaggcctttccacaggttctgaactcccctttgctaaaggtataaactctagcctgaagcttatagcaaagtcaccaggcaaacatcagaagggaaaagagctcttgcttgatggtaagactcatggcgaaggtcatattccaggaacagtattatcacagcaggcaagagtaaatttcttttttgggatagaggacataactatttcataagggtttcccctgagagagaagacatatgatggatagcagaggcactgacaatttccagggtcttctcaaaatgtgtacactctataaaatatttaaaaaaatgaataacattttacttatacaaatttaacctagtgaaggttaagcatctttcctgatttgacaactatcttcatacagttctcacaatagtttgaggtaattaagacatatggaacccatgaaacaaacccaattatttctagtattcttttacttataaagtgaaagaataatctttatgaggccccctcaaaacacaaagatagcattagatgtaaaagacattttacactgaaattttttttttctaaatttgcaatcaaattgtagaaggcaaaaatcaaagtgttgtcagaggaaatttgctcactgaattaggatggaaccatgggggcatgagaaacagtatctggttacctatttaatcaacgtggcaaacagaagaaggcacacaagtaccaggaaacttcagttctttactagtgaggaactttggctcactgaacttcgtgtttgtttacatttatttatcttgttttgtttttgtaaataatcaaggacatgataaggtccacacaaagttgagatgcagaatccttgctacttaggcagattactctgcaggtaaagaatgatcttttgtcactccatccgccctctgttaactctaaggccaatttatcattttaacatagagaagtcattttctagttttgttttaatgtgaagtttggcagtaaagttttcatgagctccttttatttttttatatcttgtgaataattctatcaaaactgaacagaatttaccaaaaaattaacacgtttcattatttctttacagattcagatattataaaaacaaggcaaatacaatttgtttcctcaaacactctatagctagctctccacactcattattctcttcatatgctggaatacactaatacttttctttgggactagtcttgttttttatttgtttttgttttcttacacaaatgcacttacacagttgtgttccttgtcataattcctccttgtgataacagtagtcctaatttttagcagatattacaacttctatttcatagacaaagctgggtgggagataactgagaactgtcatagacagcattttagcagactagcaaagctcaaaaatacacaacacataccttcctaaagccacattcatcctttttgcacattcttaaagtgacaaaaaatgaacacgtttaatgatatgatccataaaataagaaccaaaaatattaaaaaattaacatttgcttaatgttagttcttataatgttctatcttagaaattattcagggatctaaaataatactgattaattagctcaatttaattttaatccaaattttgaagttactctgggccttgaaattatgtttaagctaacattctataaaacataatcactgttataaaatcattggtcaaaactgtaattcaatatatttgaaaacatttcataatctcaaacattatttagaagtaatattatctttttggttagcaaaccaatataagtatagtagtgtcgaaaactcagactaagtagttgcttcatgagaaaaatttaaatcttatgaagaatataatatagtatattatacttaaaattgaaatatcatagaaaagttatataacttttttcttaagaaaaatgattaaaccaatctaatcaaaaattcacctcatgtgaagtcttaaattgtttcttttttagtagtttctgtaagaatattttaagtctagtacaatattaggagatactctgaattttctaaatttcttatattgaacataatttaaatatgaatatttactgaattcattgtaagacatagtatgattgaagaatataggatatggtggattgcgacattttaaattatgggtttaaaagttttgtatatccttatctattttattttctaagacctaaatattaatgcactgacacaataactaatcagaaataaaagttgacatagacataaagacaccacgggtaataagaaagaacaagcagccgggcgcggtggctggcgcctgtaatcccagcactttgggaggctgaggtgggtggatcacctgaggtcaggagtttgagactagcctgggcaacatggtgaaaccccgtctctactaaaaatataaaaattaaccaggcatggtggcgcatgcctgtaatcccagctattcaggaggctgaggcaggagaattgcctgaacccaggaggtggaggttgcagtgagccaagatcatgccactgcattccagcctgggtgacagagcaagactctgcctcaaaaaaaaaaaaaaaaaagaaagaaagaacaacaagcatatttttcactatgtgtaattattttaaatgagctgtcacattttaaatttacctagaaattagaccatttgcaggcccatttcggcggggaggcagaacgacagaaaatcatacacattttccattaatggactcttgctgtgggaaagggtgagctgtcctgaagacctctatccagtgttcataagtttatcactcacctctaataaaaagcaatcactatgtgaatttatagaaaatattaatttcatgtttatttttagcctatgaatatagtggctttcattaatatacaatgtatttttatcatttctgaaaggtttttatccagtgttttgctgaagctttttgtcttctgaagtacactaaattttcaatttaataatttagttcagttaatactcattttacttcgtgtagtaataaattattcaacttattattaccttgtggacttccataatttttcaaattgtagtcagcaacactgtctgcagcagattattaagtaaaaccatatatagaaaacatacatttaatctttcttagatactgtttcatgtcttgctaaacagcagctttggggccaagcacagacggaaattctcccaagcccagctctacctcctctctgactccaagtaggttgaacgctcccactttcagcacattcagtcttttggcaatggagatgcacaagttgcctggaatcataaaaggctcctcggcttgcctatctttctagttcccaggaccctgcctgtgctcctcctcctcctgccacccagatatggctactaagccccaccctcacagtccacaccatcctccaggcagagtgcaccccccatggaaggctctgagctggagaagcacacaccaccagtccagaccacacttggcagtagcaatcagggtcaaaggttaacatgtacttgcaggataaaaatggattctgtcttatactcagtatctaaagatagggctggtgatcaccatcactggagccatcatcactgccagcccgcacagacctaatccctccctgggagaatatgtatctgcagcctaaagtctgaagccttttcccaaagccttaaccttccataaaaaataaccgttgaatattttcagaaaggcaggcactccccacaaaaaagaacaagattcccataaatacggtggtgtatcccctagctggccctaattatagagccccaattttcttagtaaacttgtagctagctaagtaccactaggcaatgctaacctgatgccatttatgaaaaataaatttcagagatttattctgtatgtgtgtatttaaaaatctgaaagcaatacggtatactgcaaagaatatggtttggaaatcctatagatttggttgaagtccctgcactgacactaaatagctgtatgttattggaaaactaccaaaagcttatctaagtaaggcttagaaaaaacagtcaagttattttcatgattaataagatgcatatagagaacttagcatagctcttagaatatagtaatagtcatagtttattgagcaattgctattaatattattgaataccatttcagtgtattcaacttttctttccgtggcttattaatagagtatctacttaactgcatattcaattccatgtctttatttttcatattataacattgtccatattaaaatggctttatttacaattttgttgactactattctattgaatactgacagcctaattttatgaaggtctgtgacctttgctatcttcctaacatgattctttacaggaaattacataaaatatcaaaaaaaaggaaaagaaatattgtaactattgcagcctcattcatggaaaagacagggtacccaaactaaaaatccaagggatgaaatcttcaaggacaccagctgatttttgtgcatcaagaagcaaacagtcactcagttatgcagctgagctatggcaaaccttacctgtcttacagaagacagctaagagctacaataaaagaggtcaattgcagctcttctttcatagagttttctctttcatagcatggaaaaaacaaagtcagggattccttaattatttctctgatcctataaattttttgctggcatagttgtttagctgtatgggccactacatgaaatgctaaggaagaaaaaaaaagtgctttttgaaatactcaaaaattgtcttttgaaaactaaattgtgctttcaaggaaaaagtattcacataaaagtaataatcaacaaatcggatataactgatgagattgtttgatagccaccttgcttctattcacgtactctacgtgtcttctcaaaagactcccaccaaaccccattcttgtcatttccagaatgaaaggagacaaattctgaccctgagccacagtgcataaactttctcttttttttttttttttttttttttgagacagagtcttgctctgtcgcccaggctggagtgcagtggcaagatctcagctcactgcaagctccacctcctgggttcatgccactctcctgcctcagcctccccagtagctgggacttcaggcgcctgccaccacgcctggctaattttttgtatttttagtagagacggtttcaccgtgttagccaggatggtctcgatctcctgacctcgtaaaccgcccgcctcggcctcccaaagtgctgggattacaggtgtgagccaccacacccggcctaaactttctaaagcagattccagttttcccaggtaaaatcacacaaagaaaccaaacatataaaataaataaaaggtttttaaaattaaaatacaaagtttttttttttattttttcatagacagagtctctctcttctgcccaggctagagtgcagtggtgtaatcatagctcactgtggccttgacaccctgggctccagggatcctcccacttcagcatcctgagtagctaggactacagatacatgtcaccatgcttggctaatttttttattataaaaatttttttgtagagatgcaggtctcgatatgttgcccaggctggtctcaaactcctggcctcaagcaattctcccactttggcctcccaaactgcttggattacaggcatgagccaccatgcccagctgaatttattgtttttaaatagaaagtacacttgtgtagcacttaacattgcagatacattctgagaaatgtgtcattaggtgatttcatcattgtgagtacgttatagagtgcacttgcacagacccagctggtatagcctactacacacctaggctgtatggtagagcctcctgctcctgggctacaagctgaacagcatgttactctactgcatactgtaggcaactgtaacacacggtaagtatttgtgtacctaaacatatctagacatggagaaggtacattaaaaacacagtcttataatctcacaggaccactgtcacatatgcagtctgtcattgaccaaaacattattatgtggcacatgattgtattataagaaagaaaacaaaaatggctcataagtccacagccaaggacaaaaaatacagaagtaaaacaaatttaactaggaagctgaaaccatacataaagatacaaaataaagagtaaaagcttcttccccttccctctgagccctctccacaaaggtaaacactgagcaatttctcatcattctctctcttctagagagaaagaataataatataaataataatgtaatataatataaagagagttctctttctagaataatgttgatatattaatccaaatacatgcatcttaaaggtagtattttgctaaataaatttataaattaaatttcaaaatatttatgtgcaataagtaaatcaatgagaacaaacaatctgtttttggagaaaaaacatattaggtcagatgtcatggagggctattttagacttaacaaatcttaacactcattttatttgggtattttaatttggttacttaatattacaaaattgtgattcaaacgcatgagcagatgcactatggaaaggtcttaacagccttaaaaatctaaaatccaggaatctaagtgagaggtagttaagaaagtttggctttaaagctgaattattaataatatatagaagctacctgaatcctttactcatacttatatgtcaaacaagaactattcagggctttctggaagtattaaggtcatgtttcaccttcactttttgtggtacaattaagaaagcatgccagagtttgtagtaattcctgccactcaccaaggaagcagaaagtttgtttctgagctcagtctgatcacaacctcacaattttccctactttatattccttttcttgtctctttcctctgtcaccactttatctatcactcctctattgcaaacaatgaagaagtactttctttctagctatataagatcatgttagagctcccagtgctaggtcctagaaccatctctatatgtccacagtgcaaaaaaaaaaaaaaaaaaaaaaaaaaaagtctacggggcaaaatttgttgagtactagaaaagttcctaaatattcccccacatcacccattcccaactaattacagaaaggtcacaatttattataaatcaacaaatatctgaggaaaggtgtaaaaagacgagcgatgtaaaatggcagtattatataactctactgtattaaatatcacatgtaactacttgacaaaggaaagacagacagccttctccagcaagcttcaaaatgctctgcctaaaaaatagattttataatcacgtttttgtaatatctctctgtactgtgattttacattatactaaatgggattccaatggtcactatgtgtttaaagcatggcagcattctttctatatgcaactcctctgaggtaattaaatccttggtgttctttctttttttatttttttaagatggagtcttgctctgtttcccaagctggagtgcagtggtgccatcttgactcactgcaacctccgcccgccgggttcaagtgattctcctgcctcagcctcccgagtagctgggattacaagcatgtgccaccacacctggctaatgtttgtatttttagtagagacggggtttcaccatgttggccaggttggtctcaaactcctgacctcaagtgatccacccgcctcagcctcccaaagtgctgggattacaggcgtgagccacgacagccggccagtgttctctcttttaaatgtcatcttgacagtttgtgagtaagctccttttaccaacaggcactgatctcatagagtgtgcacaaacatacagccttatatgttatgtgttaacttagctgggctctggtgctcagttaggtcaaacactcacctagatatggctgtggaggtattttgtagacataattaccatctgcaatcagttgactttaagtaaataagtttaccctaaaaaacttgggggtcctcatctaatcagttgaaggtcatatgagcaaaaaccacgtttcttgaagagaaggaattgtgcctcaagactgcaacacaggaaccctgtctgagcttccagtctgccagcctgccgcacaaatttcagccttgccagccgccacaaccatgagccaattccttaacatatatgtatataaacatttctttctctggagaaccttgacggatacacatactaaatctccgtcaatataataatcaacaagtatttattgagtgcatttacatgccaaacactgttctagatgcaggtaatataaccatcaatgaaacagacaaaaatctctattttcatggggcttatagtttagtggtactaagatgactagcaaattgttagttaaggtaaccatataattcatcatacaatccagagcacttttaagataagggtgaaataggatactggtaatgattttgccagggcagcatgtctaacccagagccatctcgacaaaccaggatggtacacatcatctaagtctctagtgaaactgaagcccatctcccccacacgaccatgcatctggctaactgtagaaagtcaaaggtgtatgtcattaatcaaagttgaggaacagacttgtagattcagagagatttgggttccaattctcggttacacattataaaaagtattaaacttttactccagcctgggcaacagtgcaatactctgtctcaaaaaaaaaaaagtattaaacttttatgagtctcaatcatgccatttagaaatccatctaatgtgagaactaatgatacacatatgtacagcatatacagaaagaactggaacctgccagcccttcagtaaagtgcatgtaaagtaagtgattaagccgagcagggctggggattaagtggtgcactgaaaactttggtacatgaatataagtctttctctactactttatttttttaacatatgtgaatgtatgtcattggttttaacatttttgaagaaaagacagaaatctgaacattctgcctgggaattagacagcaaagtgcaccagaaatgatgaaatgatggcaaggctataatttagagcacggacatacgtgactctcaagcggccatttatcactgttaagattgctaaaagtgactttaggtttacctttaaaaagtttcatattcattaaactgaattctacaccaatatataccgaagtagaagctgccttaaaagcaggtccaacaatccttctgccctgctggaaactgttgctaggagacgagagtgaagagaacacttcctctccagtgtgaccacaggagctgcaactgctgcacaccctccacaatgcttttgaagcaggtttgaaaactctctgccggccgggcgcggtggctcacgcctgtaatcccagcactttgggaggccgaggcgggcggatcacgaggtcaggagatcgagaccatcccggctaaaaacggtgaaaccccgtctctactaaaaatacaaaaaattagccgggcgtagtggcgggcgcctgtagtcccagctacttgggaggctgaggcaggagaatggcgtgaccccgggaggcggagcttgcagtgagccgagatcccgccactgcactccagcctgggcgacagagcgagactccgtctcaaaaaaaaaaaaaaaaaagaaaactctctgcctatggctgaaacctcagagagattttaacagtctacaaagtatacagatatccctaggtatgatctcaagagtgagaaaagcttccctttgtctcctaatgtttttctccattggcttatcctagagtccaataatctttgtccattctcttggagtcttcctaacaaagatataaaattaagggaactcacagtgaagatgatctattaattctgtgggaggaaggatgaggttactcacatgtaaggacagcatgggtgtgacaactgtttcagaaagcaaagtcccaaatgccccaaaattgtatttatgttcttttgtttgctggtggagagaatgtgagggaatgagaggtcgagaagatctaaggagaggaaagataagaaacacattgccttttctagataggataggccagagcaggagttcatactgaaatactttattatcctgtgagggttagtcaactgagagcaaccacaatatggctttgtttgtttgtttgtttgtttgtttaaactggaaagaaacactgtgtttccttctgattataaatgtaaggctcattacaaacctccattctcctggtacatttttcagaaaacagagaaagtgaaaatctctcaaatgacactgccactgactacattttgatgtacatcttcatcgatgttccctttgcatgatcacacatacacacgtgcacaccgtaacacacttacgtggaactctgtaagtctgaaaataagacaagttccctccatcactataactaatctatccttctgaaaaggagactccatctattcctgtcttcacttcaccagattaccaaatgctctctcaattattgcattttgaaggagaaagtagtttgaggagacacattaacctgaaacaacctcctccgtaccgaattggtaattatttcatactagttacacctcataaccacaaatattaactcctgtaaataagctttttaaggatcacttttagaaagttatactgtgctcacactgacaagatcctcaatatatgcccatgggaagaaggaaaaaagcaggcttctcaggttacgtaagtggatttagagagtgctctaactcaagcaactttaggcagtgctggtgctgacatatgtgaaaagtgtgaataaaattatttcatgataatgataaaaataatatttctaaattgctatcttttttgtatagttgattttcattcactaataaattaattgttataagtagatagttgacttttgcatctttatccctaaaatttcatatgcataatgtgggccacatacttttaaaaataatactcagatatttagcattaccttatgtcgagatttctcaccctcagtactactgacattttgggtcagacagttctttgtcattgaggtagtcctatgacttgtagaatgctcagcagcttaccagacttctgcccactggatgccagtagcacccctcaatgtaacagccccaaatttcttcagatatcatcaatgtccactggtggcaaaaccgccccagttgatctttatatttagggtcacctcatatttgggcatacgtggtgtctagcttgcctttacaaagctggatcctaaggacacaattttataacctgctcttccagctgactgatatgtcatagcgatcttctcagctcattatgtacatactttcagtgtgttcttaactgctgcactgtgcctcattaacaggttgtgtcacaagtgttgtatcagttaacaattgtttccaatttctcagtaccatagtctctatcatttcatatataaattcctttaaatatgttcaattagttccttatattttaagaccaatagtatccttagaattcattttaaatttagtttaaatatacctgaagtcaaaggattaaaaaaagcaatacaacacaatataaggtcaaaacaaatatattttagattgcttattatttatggtttctacccatgccactcttctattagaattgagaccagccaggtgtggtggctcatgcctataatcccagcactttgggaggctgaggtggaaagactgcttgagctcaggagttcaaaaccagcctgggcaacagctgactgacacttcctctttattaaaaaaaaataagaagaagaagaagaaaaaataaatacaaagaattgagaactaaccccccgataagatttattaaaaattccttctaaatgactaaaagctttgctttttcatcagtattctgagcatctttttcaaatacaaaagatataaaacaggcctttcagagatccatatgtaccaaaactgtatagcttctagcatcttttcctttagaaactctatgtgataattcaaaaccaaaaccaaaaatctagtcaatcaatgatttgaagatattttattactagctgtcataaacaattttaagtgaagtctttgggtttcttgctctagagaattctaactgagtttaaaagatttaaaaatcgatgattgcattgtttttggattcaggaaggatatacaaacagtttaatgagactggaaagaggtccaaagcagtttcaactgtacctatagaacttcttgaaagcatttgctaaagcaaatatgtcaagacatgaagactgattaattcagaatgggagtttgtgtttgtgtgtgtgtgtgtttgtgtgcgtgtctgtgtgtgtgtctctgtgtgtataagcacgttctttgaaatattttaaggatttttcataataattttttaaaaatcaactcataatttaataggatgttgcaaataatcttctcatagaaaatcttagaaaatttctctggaattagcgttaccttttcaatagacaaaatgggtaaataaacattattttggtaaattttgtgtatttggaatcttaggtgatagaatttgtttccagacaacctgggtctgatcctcaattccttacattcacattgaattatttatatggttatttaatttttttctgcctaagttttcccttgcataaaagacaaatcgttataatatctacttcacagtgctactgtgagaatagcagaggaaatgtttataaaaattaccttctaaaatataaagccacagtattctaactggttgccaacagtatctaaatattcttcatagtagttaaaacagattaagaattacagtgtattattcctcagtgttgagcatggccccttttttatcttagtatttataaaacaatttcaatgaataaccatttatacacatacaggcagaaacaaaaactgctttctttgttcaacaagtacctactcactggcactctttttgaaggcagagaggactttaggtacttcacataaagtaagtggttttgtatttcacattatttgagcctatcaaaaaccacatgctataggaaagaatgatcttactaaatctatttcagatataggaaaacagaagtgtcgaaagttaagagacttgtttaaagtagtgataggatcaagtctaacagtcgagcttccacatttgtgacaaactactttgctattattgtagctctccttctggcccactgtgaaaagccatgttcatacacatgtttttaacagttatcaagttatggattaagaaatatcatcctatgagatgcatattaccagtatccccatttcatacaaaggaaaactgagggatagagattaagttatttgcataaaatcacacagctgttaagtaacagtggcaggttttgaacccatgttacctgcctgaggagcccgagttcccaaccacgatttgtgccacacacattcaactggcattagataacaacaatctattttactgtatcagaatatgattaatttatctttcttcataatgataaaagattatccaatagcatcttctaaattgacatttatccttcaaaatttattttcaaatcttctgattcattcaagagaaaacaattttttaatgtttactgtattagtccattctcatgctgccagtggagacatacctgagactgggtaatttattaatgaaagatgtttgattgactcacagttccacatggctggggaggcctcaggaaacttacaatcatggcggaaggggaagcaaacacttctttctaaacaaggcggcacagcaaggagaagtgcagagtgaagtggggggggaaatccccctataaaaccataaggattatgggaactacaattcaagatgagatttggttcgggacacagccaaaccatatcatttacttaaaaaaaaaatcataatctttcaaacaaaaataatgctctagtctttttaattaaaccccaatatgattttctaacaattctgtatgcatagttataccaatgtcaattttaataattagaaaatgctattcatctttttcataaatttcatactttaattccacaaaaaataaaaatatacataatttattattacaatatattaatgattttggcattctgatctacaatatagttgttatgctttaaatatattatcacatttgtattgaataaaaccctgagctttatccgccatgaagtctataaaaaaggaaaatcacaattggattaacccatgagtatttaagaatttccttggtagttttttgattcgtaattgtattccaacactttcacaagtaaaccgtagggatttttgcctccagaaactttatctggcagcctagtataactgtgtggtcttccagaaacaatcgtgtctcctttatttttttaagcgtatatacaaagagagagtatatacaaattaacactaattagcaagtcagaaaagcatgtttttctccctagctcttatgagtgttcatatataatttgctccaaaagaaattttagtaagttacagtactgccagaattactttaatttgatggttttaacagggaaaaaaaggaattatggaaatcccctttggaattcaatcacagaaaggaaagattcaattacttggaaggtctttggcactgtgagatagatatacagaaaatgagagccacacttgggtcatcattaactgtaataccatatggcatttcctcctctgagcttctgctaccatctatttacataaaatatgagctgcaaaccaataattacaaacacacatacacacataaatgagagataactatgctgagtgaaatgtaaactgacttttaattattcattaatagtaatttagaatattaaggggcatgacacaatgttatcctcagggtccctatacaccaggaattcacctcatttcagattaacaacccagtataaaaaggcctattaggcccaaattatataaattattcttgaacagaataggtccaatatcaatctatatgattctaaatgctaatctacattcaaggactaaatggcacaaagtagagcgtacatttacaacagtaccaagcacataggtggcattcgctaacaagagcagttacagaaacattctctctactggcaacttttcagctacatatgtattaatttaagagcaagaactaattcgggatatagagaaacacaacccactctcagtacttttaagtcaaattgttgatcatcaaagattctacaatgagctttaagatccttctcaatctgtggccctacgcagccactaccaactgaatggagctggcaggcaagatggaagttatctgacattttatgatctgtgatctcatcttctcccagaaatcaggatgctagtgaatggcctcaccctccatcccattatttaagctaaaaggtgtatgtcatacttgaacctctctttcacatgtagtccacattcaatccgacaattgaattgcctttctaggcattgaatctatcccattagcactgtctctgccatagcacatgaatgcaagtctgtaattacctcctaccattctttcctgtcccctctaacccttgctcctcactgcaatgagagtattagttttgaagagcacatataatcttatgaccaccaccatcccaacacaatcctgaaacagctttacattcctcttgatcttgaacacagacctttatccttaacaagaccttccaacagctggccttccagatgtattccagcataagacatactccttccctctcccccttgacactccagccatactcctctcaatcccaggcacccaccctccaggtactctcctagcacaaagccttagttaggagctttcctcttctctctgctttgttaaacatctactttcagaactcagctacgctgtcccaggacttctactttacagatgcctgtcgtatcctgccaacttgccataagtttaattttactgacccttgaggacaggggctaaatatgtggtgggcttgttcatattatatgaacaccacctagtacatggcctagcaatggtagatgctaaacaaatcctgcttaaaagctagaatgaatgaatgaaaaaatgaatacattgatgcaattatccatagtagattattatatccttgacagagccagtgttacagaagagttggctcctaattaaacagacatattttgtatattatatatagtattctattcatttgatactattgcatttgttcagtattgcagataaattacaaattaactgcagtaataattacatgtgggtatgatcaaaatccccaaatctatattaacaaacttccttaaaatcaaagttgagtaaatttatatcaactttccatcaatatgtgttttattacattcatttaataattccaacaattactaaatttaaaaaaatacaggaaactaagcaacaaaaagttctcttaagagttttcaggacaaagaatacataatgtttcatctgctaaagtagcaccctggcatccaaaagttgtttttgccatattttcaatgataatttttaaaaattacacttggtaaattcaaatggctgaaagaaaacacctgtaataaatctttctcatggaaatccacactgaaaattagtggaagaccctccatattgtagtcagatgtgaacacccctgtcatgactcatgactgctgccatttcagtatggtctggtgtcagaatatagtagggacatgagggttccaggcctagcacaagcaccaaattactggcaaacactgtcactggaggcttgttggaggcttgtttctgcaactcaaaacctaaaatgacatctctgcctcagaggattataggaagaagatgacataggtattttagaattcttaaaaaatataatactataaaatgtcaccagaacaattctgagattttagagtcatttatgacaaggcatgcaaccagattgccaactcttgtggcaaaatcaaacctctgcatggtacaacatccccaaattccacataatttaaccagatgcacttaaaaatcactgcattgcattggtgccacagttttttgttcctatacatttcttacaatatattctactggtcttaaagaagtttgtactgagcaagcatcatatctattcaactttctttctgtagagtctagctctttatgcaaagacatacttaataaaatgcttgtgaagagtcatacaacgagataatatttactcaaaataagacaaataatattctgcactcatagccatagtaacctatgatataagaaagtgtgttagccgggcatggcggctcacgccagcactttgggagaccgacgcgggcagatcacctgaggtaaggagttcaagatcagcctagccaacatggtgaaaccccgtctctacaaatataaaaaaattagctgggcatgatggcgggtgactgtaatcccagctactagggaggctgaggcagaagaatcgcttgaacccgggaggcggaggttgcagtgagccgagacagtgccattgcactacagcctgggcgacagagtgagactctgtcaaaaaaaaaaaaaaagaaaaaaaaaagaaaaaagaaaaagaaaaagaaaacaaaagaaaaaaaaaagaaatagcctgaagatctgaacttaaatcatctacacatcccattctaagcactaactaggtacttacaatgccaatatcatataagtcatgtgaattgcaagtacaactcaagacaaactatattttaaagatatttaagaaggatttttaaatgggtgcatgtattttaaaatgttatgacatttaaaacaagtccacgtcttaccgattttttagtagtaaaaagaagaaataatacattctatcaatatatacctttggaaagaatcaagctgtaaaacactgaaaactcttcaattttcataggtaatagtggctttagggctttcaaagtataactttttatggattaatcatttgcaatctttcagactttgatcatatattatgaatgttaaatgttataatacctttcttagttacatgaattcaagcggctgttattctataattctaaatacaattcatttctggctatgcctaattttacactttatgccttttttcctttaacttaaatatgttgtttggccaacttccagctttggatttttaaggtttatattggaacaagtttcattccaatttgatttgtgacagataacattgtaagctacttttctatattgcctctgaaaaagagctatttccattcctacacagtatacagattaagaaagttaacataagtaatgtaccactataatttgaaaatattcatcttgttcacgttctctagctcttactaagagatttataatgccactgaaacaagaattgatgaattcatcactgtctgggacattttgatcataatcaataacataattttacccttaaataggatttcaattaatgcatatttttcaaagcaattttcctttaaaataaaatgggtttttgtaccatgagttattaacccattaggtgccaaaaagaaaattattctgtctctgaagttctacatcagaaaaaaaagaaatgaaaccaaactctgttctattatacatttcccacaggtacatttcataaaaaattacattattatattttcatcatggaaaatgaaaagtaatatactttcgtaaaatgatagaaccatgaaagttttattagataaaagtgaggacacccaaatgcattgctactgcttggacagagtatatttatcagcaaagaaaacattttcatctaaacaaaatttatttgtcatatcattatgaaacatcaagaacaatattaaaaaccctgtgaaacttatgccaggcatacaaaatacactctattttatgataatcctcctatcctagccatttcatccattattttcctgttctcactactagaatgttgaaagaacacagatttctctcacacacaatacaaaatagcttccttcaacaaaaataactcaaaattcaaaaattattttaaatgtatagtataatcattttattataaagaagtcaccctcatttttttaagcttcaaagcatgtcctctactttactactttctcagaaataagcctaagtattttaccccttgtttcaatcacaattagctggttcttgctaaatgattcagtccagctccttatgaaagcatgcaagaggctcacttctcacctttccttatgcagtgttctctagttctgcccactaaatctgtttcaccatcacactgtgtctttgtatgcaatttcctctgcatcttctccccttcccatgtagaaaatgtgaactgatccttcaaaataaaaaacacacactattttctcgtagagtcttctatgacccccttggataactgcttccttccctatgattccatagctatttatgcagacctctgagacagtgttcaatttgcattctaattatttatctacttgtttgtccttcctacaagagtaggaggctcctggaggtagaactcattggtccttctatcactagtaaccctcaagattcggtacctaagacattcaacaaagtaaagagatgggatgagtgattgctgtccacatggtctgttcattgatcttaaaaccgtcagccccaaagtagggacttgccaattatttagaaatgcctatctaatctttctactgtattcaacttgtgtaggagagttcaagttcctgggctgggtactcaagatgtttgattttcaaattaaagagatgaaatttatgacactaagaattctgggtgctgagcaacaacattcaactaagaaagaacaagggagggccgggtacggtgcctcacatctgtaatcctagcactttgggaggctgaggtgggcggatcacctgaggtcaggagttcaagataagcctgaccaacatggagaaaccccgtctctactaaaaatacaaaattagccaggagtggtggcgcatgcctgtagtcccagctactcaggaggctgaggcaggagaatggcttgaactcaggaggcaaaggttgcagtgagctgagatcacgccattgcactccagcctgggcaacaagaatgaaactctgtctaaaaaaaaaagaacaaggggtcagggagcaattggccaccactgacttcagtatctcaagttgagttaggaacttaaagaacaagtttctaatgtaatttctgtaaaaattctaatgcctaaaatgcagcaggaagatacagagattaaaatcaggttaaagcaaaactataaagacaagtagtaatgaggatatacaaggtgcaaagacatacagttcccacggacaatgaggttagtaggggttggtttgggagacctggcggtggccttattaggcagggtggggaaccctgagcacagaggtttctttactagaagtaaccaaacagattctaaactctgctctctaacacttgaaggttcctgtgtcctggaaatctttattcaccaaacgcagtttgttgctttgttaaatatgacagggttatggctgaagtaataatctacgcgtatctatgtatttaacatattctttagtccctcacacttttcttgaagcagaaaaaaaggcacagagaaacagttaaatgtgaggcagaaataattttttcttttaaaattaaattgtttattaaaatatatcgaggggatacaagtgcaggtttcttacatgcgtatactgtgtggcgctgaagtctgggcttttgatgtattcatcacttgaacagtgaccactgtacccagtaggtttttcaaccctcatcccctcccaccttttgtattccctaatatctattattccactatgtccatgtgtacatgtttagcccccatctgtgagaacatgcaagcttatatatatctgcaataaacatatgaatgaaggtatctttttttttttaataatttctttccctttgggtacatatccagtaatgggattgctggatcgaatgatagttctatttttagttcttacagaaatctccaaaaaggacaatctgaaacctgaaacggggcaacctgtttggaaaacagcatggagatttttttaatgaggttacttttttttttttttcttgttgagttgtttgagttccttgtagattctggatattagccctttgttggatgcatagcttgcaaattttttttccattctgtaagttgtctgtttacactgttgattgtttcttttgctgagaagaagctttttagtttaattaagttccatttatctatttttgtttatgttgcatttcattttgaagacatggtcataaattatttgcctaaacccatgtccagaagagtttttcccagtttttcttataggattttaatagtttcaggtcttacatttaaatcttcaatcaaccttgagttaatttttgcatatggtgaaaggtgtgagtccagttttcatccttctgcatatagctacccaattttcccagcaccatttattgaatagggtgtcctttctccaatgtatatctttgtcaactaggtcaaagatccattgcttataggtatgtggctttatttctggtttctctatcctgttccattaatctatgtgtgtatttttataccagtatgatgctgttttggttactatagctttgtggtataattgaaagtcaggtaatgtgatatgaggtaggaatgattctgttgcacactgtagagattttctgttccaaaggcttgggttgggggaaagggaggcagaagagcgattgaagctgaagggaaaggtgtgaaggaaccaagagccttgacaagatgaaggcagggggaagcatcttgcactgggagaacaagggagcagagtagaacccgacacccagctgctcccaaatatgcctccaccctacaaaacatcaacccattgcctgtgcacaacccaccagccgatggtcctacattccttatcagctaattcttagcagaaagccttttatatatcagggattgctcaaaaatagttcacatggattaattcttccaatgctcacaataaccctgtgaggcaggcaccattactatctcatttcacagaaaagtgtggcagggaagagttaatatcaaggccacagagactgacactcttctaagcaaggaggtgataacctgaccactgtatgtggggatgagcacgtaaggggagattttgtgctacccaggaagaaactgaacaggaaaaaaaaaaaaaggaaatttccctatgagttgggttagttgcagacatcactgtaaagtttagtaaaagccatcttgaaactgctgcatgtccagaggaaacaatcacaaaacgaagagcattttaaatattgttttaaaatgttttttaagacaggtgttaaaaattactatgattagattagaacttgcactggttccttgtagacagaaaataagtgtgtacttccaggaaaagagacgacaagaggagtaaagcaacaagttagattggggattaagtgggcttcagtttcctcacttataaaaaagagaagatagaattgaaacaaaaccaaaaacaacttctatctgaaacctacccccaactcccaagttacatgaaactaaaaagaaaagcccagactttggatggggagaatgtagctgaattcagttatttgctatactggtgaagccccacaatactttttttttcattttattttttgaatttttgaatattttatttcctctaaaaaaaaaaggtggggggatatgtgtgcagaacatgcaggtatacacgttctggtacataggtatatgtgtgccatggtggtttgctgcacctattgacctgtcctcgaagttccttcccctcaccctccaccctgcaacaggccctggtgtgtgttgttaccctgtgtccaggtgttctcaatgttcaactcccacctatgagtgggaacatgcagtgtttggttttctcttcctgtgttagtttgctgaggatgatggcttccagcttcatccatgtccctgcaaaggacacgatttcattcttttttatggctgcatagtattccatggtgtatacgtaccgcattttctttatccagtctatcactgataggtatttgggttggttccatgtctttgctattgtgaacagtgccgcaataaacatacgtgtacatatgtctttatagcagaatgatttatattcctttgggtatatacccagtaatgggattgctgggttaaatagtatttatggttctaggtccttgaggaatcaccatactgtcttccacaacggtcgaactaatttacattcctaccaccagtgtaaaagtgttcctatttctccatggcctggccagcatctattgtttcctgactttttaataattgccattctgactggcgtggcatggtatctcattgtggttttgatttgcatttctctggtgatcagtgatgttgagatttttttcatatgtttgttggctgtgaaaacttttgagaagtgtctgttcatatcctttgcccactttttgatgctgtttttttttcttgtaaatatgtttaagttccttgtaaattctgtatattagactttgtcagatgggtatactgcaaaaattttctcccattctctaggttgcctgtgcactctgatgatagtttcttttgctgtgcagaagctctttagtttaattagatcccatttgtcaatctggcttttgttgcaattgctaaaaccacatgattatctcaacagatgcagaaaaggcctttgataaaattcaacatcccctcatgttaaaaactctcaataaactagatatcgatggaacatatcttaaaataataagagctatttatgacaaacccacagccagcatcatattgaataggcaaaagctggaagcattccctttgacaaccagtacaagacaaggacgccccctctcaccactcctattcaacatagtattggaagttctggccagggcaatcaggcaagagaaagaaataaagggtattcaaatgggaagacaggaagtcaagttgtctctgtttgcagatgacatgattttatatttagaaaaccccattatctcagcccaaaaacttcttgaactgataagtaacttcagcaaagtctcaggatacaaaatcaatgtgcaaaaatcacaagaattcctttatactgacaacaggcaagcagagagacaaatcatgaatgaactcccattcacaatggctacaaagagaataaaatacctaggaacacagccaacaagggatgtgaaggacctcttcaaggggaactacaaatcactgctcagagaaataagataggacacaaacaaatggaaaaatattctaccctcatggataggaacaatcaatattgtgaaaatggccatacttcccaaagtaatttatagattcaatgctattcccataaaactgccattgacattcttcacagaattagaaaaaaactattttaaattatggaatcaaagaagaccctgtatagcctagacaatcctaagcaaaaggaacaaagttggagacatcatgctacctgacttcaaactatactacaagggtacagtaaccaaaacagcacggtactggtaccaaaatagacatacagactaatggagcagaacagagacctcagaaataacaccacacatctataaccatctgatcttcaacaaacctgacaaaaacaagcaatgggaaaaggatctcctattcagtaaatggtgctggaaaactggctcgacatatgcggaaaactgaaactggatcccttccttacacatcttatacaaaaattaattcgattgattaaagacttacttaaatttaaaacctcaaaccataaaaaccctagaagaaaatctaggcaataccattcaggacataggcatgggcaaagacttttaattattctcagtttattctcaatccagttttaagatgtctataagaaaagaggagggagtagtttttgtttctatcatgtgagatacactgtggttagaatgcggcatgctttataagtctgaggatcattataatggtatataaataacaatgagactagtgaataaatatcctggattttccactgatctggggaaaataagtaaatctgcaaagaagctataattccttggaaaacagatgtgaactaaaatatcattttttaaaaatggcattgtatatacaaatgctctgcaattacttttaagaaacaagttacaggactcaaatttcctatctccacagagcgctaagatattagtcctaggagagcgaaatgtcctggaagccaagaaaagcagagaaaataagaacataaattcaggaggtgaattaaggttgttcacatggagtaacattttataatgcttttatgtcaaaaataaatttgagattaatcattttcccacaaaaaatgttgtacaaactcccatttttaaattatgtcaaggtttaaaaatagaacactcatttttaggctatgttggtaattatgttaaagcactacagtacttcaggaaaataattaatacaatgaggtttcttggtactatgagctaccttggtatctataacctgcatattaaaatttaacaagtaagagcttataacaatcagagtttcaggacaagcaaattgactaattcttgtttccattataaacaaacattgaatttacaaggtggaatacagatgacgtattcaaatgagtttacaaagtacttaggattatgaatataaacctacattaataagaagactgaacacatcaggttactgctaaactctaattacttacaaattaatcaagtacaataaagaaaattatcatttgaaagacattcttgataatactactaagaactgtcaagcttcaattatccatgctaattcagaaagctggctaatcctaaacagtggataatttaacaattctttctattggcacagattatatttctgtgcgtgacaaatttaccttagcaatttgtttttcttagtttaatattaaaaacaagtcttgcttccttgctagatcagaatgcaaagccagccagaagattttttacaattttaaacgggttaattaccaagtatataatccacatatacagtatataaaatctaaatgctgtttaaaatattttagttaagctttcaaccacatttaataaatgcatgttaaggtatgtagattatgacaaaaatgataaaaaggatgcaaatttttttctatcactttgaaagtctgtcaaaatttaagtcatataaagtaccttgtgagttattatttcattttacagataaaactatagaaccttcaagaagtttcatgtggagtgactccattatggtaagtatattggtgtcctatatatatatttaaaatatctatcgcaaacatagatcttttgagttccctctttctcacttttctaacagaaaaatatagcatacacagggcatagtaaagaacatggatactggagcttgaatatctggattggaatctcgattcaccacttagagctgagtaaaaataggcaaattatttaacttcttagagcctcagtttcttcatctataagatggggttaatattagtacttatctcttagggttgttatgaagactaaattaaatgatacatgcaaagcagttggaacagaacctggcacatagtaaatactcaatgaatgttaggatttacatagcattaataagcacaattacttattttcaaatagataactcatagacaagagaggaaaaaaatctatttttctttaagagaagtgtcatatacatttctcaatttagcttataattatgttgattaaaacaataacaaaaatattctttgaaccattagagtaataattttcccctggtgtcaaggttaaagtaaggaagcagatatatcctcagtaaactcatcagagtatttcatcaagattttcacagttatatttagaaaatgaaaagctcataattgtaagattaaaatatgaaactttattataaaaagggcacagattttaaaagataagcagagagatttacatgagaaaagtgcagtatcacatctagtaatagtccaacatctactttaccttgtcattgttactctcccggtggaataaacagaaccatgtcacctcaggagttaatgctggccaagtgccaaaggccagcaatggcaagaaaggctgtggacagaggacctgggctatggctagaagagaatgccagagacggggaaaaactgacagggtaagagatgagacgatgaggacagaggtgctgggccagcagttgaaggagaggggagggagcaccataagtggctgtgtatgggggcgcagcagaaccatccacggtcagaccaacacagtgacaaacagccactcaagaagttcctaaagaactcaagcgttgacacaaaaggatgtgatgaacagcactcattcaggctcccactgtagcatcctgtggcctcgatgagtgggtgtggcacctggtcatgagaagtatctaataggtaggcccagggacataaagtaggaacaggaaggacagacctttcagctgtacttctttcctatatttaatggcacctgctttctaggcatttacttcattctgagagtggatgataatgatgatggtggtggccctggtggtggtggtaacgatgtatcttgacttacaatcatggtttccttcccattttgagatagacacaatgattcccgtttgagaatctgaagtaccaagacctagagaggttaaacaatttgcctaaatggcacaataagtaacaggaaagattgagttttgaaatcagtctctaaacctctaaaatccacagttttttttattataccatctactatttcccagtatacctcaccacagaaaagccaccatatcattgacctaaaagcctgaaacttctacttgtgaaacttaaaaagcatgaggacatcttttttttttaaaggaaacatgttcttatgctcttcacatctgaatagattaatagcaacaaattagaagtaaaatgattatacagacacaacatagttgaagacattaagtgttgtatcttcttgagtcacgattgcccccattaaaaaccactatgttttaaagaggactgtttatttagagatctggatggtaagctaaactttagaattaaggaattcagatttaaccctttgttacttgaatacgtttacatatatatttttaaaagcccttcctaattcaagaacgttaccccatttgcaatctctttgccagtctatgccatgacaagcctcatacacagtttccacttttatgtataccagtgactttctggatgccaataattcatacttccccaaaacagatacttgagaacatgaatcatcctagactattaaattaggagtgcactatcgatttaagaataactgacatgagctaatttgcagctattcctctggtatttggccctcagttggcactacaaagttagaatcctaaatattccaaggactggaattccataatctcttacaaatttccaatcttgtaagagattataggattgagggatggcatatttggcatcaatagaattcaaacgtctcaaatattttccaaattgaaaaagtgtccacttaaatactacacctggacaagaaattaataaatcaccaaggaaagcaaatatatcactttagaagcacatttgcaatttttaagttaaactaacagaaaccaaatttccttcctttgtgctgctaaacatttgacaaacctaaaagtatccttggtaaagtggctaataaactaacagaattaaatatcccttttgagtacaactgattacatgtatgcaagtacacactcagaactctatcaatttcaaactgctgtgaaaagtgctgaattccattctttcagggagatagaaaacatttataacagcaacagccctgcagtcacatctttttgtaactagctctaagaacgaaaaaaatctttatgacaataacaagaaaatgaattttcattttaaaaggcagtccctgtgccatcactggctgtcctgccacccagctcctctgaaggcattcagacccttcactggaatgtctcaaaaatcaatagcaatttattctctctttggaccccaagcaacaaaagtaaataatactgtcacctccagtctgcctgcagaacatggtcacaaaacagccttgccactaaaatacaaccttacgcagctctttatctatgctggcgctactgattgtattggctttcgtaggggacaaatacttcagcaaagccacacaaagaggtcaagctcttgtacctcagccagaaagaatgctgggacctgaattaaaaagaagacttgccaccacctaagcttcctgcttcaacaatgtgggttttatggaagaaaaacaagaatatttattttccaagattattaaaactaaggggaaaaatgtaagattaaatataccatatttacaattttttcctatagaatttaagaaaatcatcagatcactgaagcaattggttgaaccataatattttgcagctaaaatctataggtaggcaatttttatactgtctgataaaagtattaatccataagcaaactacgacttaagaattaaagttctactttgataatgtttaaccaagtaggtgatatcaataccattcgattgttgaagacattatatacactctggaatatataaaatggcattttgaagcaacagaaggaatactaggaataaccaagtataatcttatctatttagagaaaaaaggaaatcaagctctatatgtaacaccagaaaaccagttaatggaagaagcaggactacaatcccgtctaacattcttttcactatactgcttattgatgaaaaattacttataggcatactaaagaagagtcaggccaggcgtggtggctcatgcctgtaatcccagcactttgggaggccgaggcgggtggatcacaaggtcaggagatcgagaccatcctggccaacatggtgaaacctcgtctctactgaaaatacaaaaattagctgggtgtggtggcgcgcgcctgtagtcccagctactcacgaggctgaggcagaagaatggcttgaacccggaaggcggaggatgcagtgagccgagattgcgccactgcactccaggctggcaatagagcgagactctgtctcaaaaaaaaaaaaaaaaaagagtcaaagtcattttgatgacaataagccatcatccctcagggctacaaattactccttaagagaaaaagcaagtactttgaaacatttgtgcagtaatcaaaaattccgaaatcatagaagaatttaccagtcaatcataccagaagtatttactgaatatctgctgtgtacttctcactagtaggaaatacgaaaaatatacatacatgtttaggaaatattaaaatattgaatataaaactattaaataaaataaaatattaaatataaaaacaaaaatattaaaatattaaaaataatcagatgtcaaattgtacagtcaaagaataaatggaaatcaggcaggtgctgagaggaggagagaggggaggtaggttggatgagggacagggaggaagacaggtgacggaggcagacaccagggctgcagactgtgagtgctgggaggtgctgcggggaggatgggcctggcagagcagtggtgcccatgaagtaaagtgaagacagagagtggggccagacactggaagctccagaaatcaggcagaaggacttgaacttaatgtggtagagactccagataatatagaattaaccattttaacttggcaacatcactcctattgttttttggctcactcctagctcaaaaaaacaaaaaatacactaaagatgttgtcttattggtcagaaaaatatgacttaaaaatataacaattttttgaaccaaaaaggtgcttcctggaaatttcatttaaataacaaaaaacataccattgtgaaaaaacttcactcaaaacttacagttttctgataaaattaatatcattaagctaagggagaaaacaaatctctgaatccctcatttttattcggtaacattaaccactttggcaaaaaaaataaatgaacactaggattgggaattttgaaaaatcatgtttaacttttgtactttaaagaagatacaatgaagttgatatactctatcttctataaaactatgaggcatctaaggttaatcattaaaactgattaaatattatatttaaaaacaaatactcatttatgttttttcaaattttagaaagtttgtaaattctgtagtaaaccaaaattcttttctctttattttatgcattcattatagaaagttttgggggaaaagtgtgtgtgtgtgtgtgtgtgtgtgtgtgtgtgtatgcatgtgtatagatatacagacacacatgaataatcatgtgaaaacttatctgccagaggtctactctaatatttgttacaggcctctttctgattttaaaacaatctacagcagagatataaatattttacttatcactgtcaatacatatcaaatgtcttgaaatgactatgtcaaggtaacacagtaactacacttataagaatatatcttacagaaaagattgtggatgtggacagtggtctagcaacaggaatgttcaatgaaatattgctggaaagatgaaaatgggaaacaagtttaatagccaagagcaaagcattcaatatgtaagttataaacatattcatactttttcatttttatacatattaaatatagtcactgcccatccatttatttctcctattttcctaattttgaaaaagagttcccagaatatttgcaaattaatctgtaaacactgaatgatagtgcctgccctgaagcccacatgaggtgcttcgaggcagaaacggtgtgtagctggtgcccagaacaatgcccagaacagcacctgccacagaggacacggtcaacaagtacttaacggagtgaaaataaaaagttaactaaggatttgtaacttacactcactcactttgaaaaaaaacagaagcagtttacaacaaagtatgataaaatgtagttttcttttttaaaacagggtctggcttgcaatggcaggatcttggctcactgcaacctccacttcctgggctcacaccgtgctcccacttcagcctcccaagtagttggaactacaggcgcacaccatcatgcctagctaatttttgtattttttgtagagacagagtttcaccatgttgcccaggctgatctccaactcctgagttcaagcgatccacccacctcggcctcctaaagtgctgggattacaggcgtgagccaacacgcccagcctagattttttttaaatgtaaatcaaagtaagagaaaaaaccaaaacatccaaaccatacagaggaagatggaaaataacagaatcaggaacctgagctcatgccaacactcaatcatacgttcaaactttctgtcaagaaaggctacagcaggactgcaagtgtggcggaaggcggcagtgtttaaaatgtaaaacttcagatcaagccagcaggagtcaaagcctgatttcaccagttgttagcactgtaggactctggagaaatcaatgactttttctgggcctccttttcctcccatacagaatggagctcttatgagagcatcaccatagggttctgagattgacaccagccaatccgtgcacagtgctagttgcatggtgtcagaacacattaagagctcaatgtatgccaaatctgttatattcatcattacagctttgactgtatgcaaaagataccattcagttcttccaagctgcatttatttcatagattcaatatttattgagactaaatatttattttaaaacttggttggatgaagccccaccaatgtcttcaaaagcctaacatggaaatggaagaacagaaataccaacatataacagtgactcaggtgacatgcatagaatagagatgtactcaatgttccctgaagtaagaggaggaaatgatggattactgaggggtacggctgtggggcaatatcacattaaaagtgatgtaggaactaggacatgaaagaggagtcagagtacaaccaagtagggaataatggtattggaaagtcattccaggcagattggacaacataactaaggaaactgaggcatgggaggacacgagaagctgatggtggttgaacactgtgtgataggatgctcgtggaactgtgacagaaaacaaaatggcaacattctgttggggtcaatttttgaaggccctgttgtgcaatttggactttaacaagtaagcaaaggagagccagtttgggctgataatgacatcagtgttttagatactaggattatcatggaagacagattggatttagagagtgggaagaaagaatagaggctaaaacatcaatactccaggcaacaactaatgctaggtaataaataatacagactggaaacaagacaagacagtcgagttggaaagaaggaaacagatgccagcaatattgctgagggacagtcagaagaattagcacacaggaaagtcaaaaacgatttcatggttttgaccttatatggctagggcagtgacaaaattaattaaggatggtaacatagaggaagcacattttggggcggcagagaaagaagactttattttatttatttatttatttatttatttatttatttatgaaacggagtctggctctgttgcccggctggagtgcagtggcgcgatcttggctcactgcaacctctgcctcccaggttcaagcgaattctcctgcctcagcctccagagtagctgggattacaggcacgcaccaccacacgcctggctaatttttgtatttttagtagagatagggtttcacaacgttggccagaatggtctcgatctcttgacctcatgatcccccccgcctcggcctcccaaagtgccgggattacaggcataaaccaccacacccagcccatttttaaatagattgaatttgaggtagctctggaaaacaaggaggtgatgatattcaacagaaagatggaactaagacacagaagctcagaacgtggattgagaggtcatctgtgtaatagatgacaggcaaatttacaacaccagggaaaatttcaaggggacagcatttgaagtcagaaggaaaccaaagtaatgacacttactctatcactaaaaagtatgatatctaaaataaccagtatgcaggacttaaaacaactacaacctacactaaaagatagagagaaacactttaataaatgtagagagatactatgtgtctggatgggaagaataatttgtgtagtcatcaattctctaattaatctgtagatttaataaaattctaataaaaaactgtaatatacttttgggaagcttaatgaaattattctaaagtcatctggaaagagcatctgagaataactatttttaaaagagtaatatgaaaggcaaaactgacctagcagatattaaaacatattgtaaaaattcaataatggaatactgacttatacacaaaaagattactaggttagaaagtccagaaatagacaaaagtatgtgtaattattcaaagcataaaaacctgcaatttcaaatcagcaagaaaaaagataactttaatcttttagagaagcaacatgatgagaaagctttttcttctgagttgtgttaaggatgatggaggtcgtctaagcttttcatacttagagaggaagacactagtaacagaaatacaaaagaaagtgttcagttatcacaaagtcagaagtaaggaagttgtggattctagtgaatgtttactactggagggaatcatggaagaaaccaccaaccataatgaaatgatgccttcagaaaggaaagcgccaagaaggatgacttgacaacaatgctagagacagctcttaagaacagatgttttgatgagtttccatacccaatttattggaaatatcaaaaaaaaaatagcagaggtgaaaaaaataaaactttattgtcagagattgggcttgccaaatttaagatttctgagttgtcagttcagagaaatggcataataaatcagactgcagcagcagaaatgtctggccaggatttgggcaggtcaataacatagatttctgaagttgccaaaagaagtgcccaagaattaaggcagatggggacagggtattgaatgatagcttcctccattactgtggaggcatgacctgtggtaaacagagggagagaaaagaaagaaagagatttagctaaatattttgagcttcaactaaggtaaaaagttactgacaacagaatgtgaggctgagatatgtttttatttttctctccacagtgcctaacacacagtacacatattgtaaaagattatctaagaatggctggacgcggtggctcacgcctgtcatcccagcactttgggaggcaaggcaggtagatcattgaggccaggagtttgtgagcagcctggccaacatggtgaaaccccatctctactaaaaatacaaaagttagctgggcatggtggtgggtgcctgtaatcccagctacttgggaggctgaggcagaagaatcgcttgaacccgggaggcagaggtagcagtgggcagagacggtgcaactgcactccagcctggccaagagaggagacaacatctcaatcaaaaaaaaaaaaaaaaaaaatgacctaagaatcaatgcatgtggtaggaaatgctggaaaaaaaacactggagaacttaaagacaaccccaaattctgatcacagggcataggagataaagcagaatgagtagcagccacatgaaggcatcaaggtaagcagcatcaccaaaagaaagcctggctcagccaatgacgacaggtaaaaaggattaataaaaagacagacgggcaagggcagttcaaggaccataacagctgagctagtgatggaagacttccttttgcacctttcgaataaaattatttcattatctccacaaagattcacttccaggtacttggttattctggcctcccaccctctatatccattagtccccaccgtgaaaagcactgtggagaaaaaaaaaaaaaaaaaaaaaacactctttgcacctgaaattatcatatttaatagggaaaaaaatggaaaatattttccaactgttgtttatttctgaatttcagattttgttctcaattatactggcctggaactctgtcagaggtgaatatactcagacccatatgactgatttacactagaaagctagtctgtcgattgctagtatgtaatgcaattgtcaagctgacccacgtttgtataatacctgcatcaactcaggaggtgttggctagcttgcaaattttctttgaaaaagcgcttacctaggcaaaggacaacgtattttttgaaagctctattgaggtctgacacacaataaatcacatatatttaatgtgtacaatttgacatatttggacatatacatatacccataaaaccattacaacaatcgagataatgagtacatcacccccagtagattcttcctcccactttgtaatctcttccttctgcctctccctgacatcctcccaccctccactcacccatttgaattacagattagtttgcattttctggaatttatacaagtcaaatcacacagtttatattcttttgtctggtttctttccttccacacaatgattttgaaaatcatttcatgctgttgcatgtatcaataattcccttttattgttaaatagtattccattgtatagtatacaccaatttgtataaccattcacctgttgatggttattggagttattttcagtctttgtctattacaaataaagctgctatggatacttgtatgtgagtctttgcatgaacatatgttttcatttctttggggtaaatgtctaaaagtagaatggctatgtcataaggcagctgtatatttcactatataagacactgccatactttttcccaaagtggtttctccattttccattcccatctgtcatgtatgagatttccagttactctgtatcctcacccgtacttggcatctttcaaatttcagaattctaataggtgtataatagcatttcattgtggcttcaacttacatttccccaatgactaataatgttgggggtatctttgcatgtgtttacttgtcatctgtatactatctttggggaagtaactgttcagatctattgtctatgttttattgggttgttttagtatttattgagttttgagagttctttaaatagtctaaatataactccttttatcagatatgtaatttgcaaatatgtttctccaagtcctgacttgtcttttcattcttttatcaatgtggttttttactcgtttgttttttgagatggagtctctctccgtcacccaggctagaatgcagtggtgcgatcttggctcactgcaacctctgcctcctaaattcaagcaattctcctgcctcagcctcctgagtagctgggattagaggtgcccagcaccatgctcagttaaatttttgtatttttagtagagacagggtttcaccacgttggccaggctggtcttgaactcctgacctcaggtgacctgcctgccttggcctcccaaagtgcgggattacagacgtgagccactgtgcctggcctttatttatttatttatttatttatttatttatttatgaatgaatgagacagtttcgccctgttgcccaggctggagtgcaatggtgcaatctcgcctcactgcaacctccacctcccgggttcaagtgattctcctgcctcagcctcccgagcagctgggattacaggcaccctccaatgtgcctggataatttttttctgtacttttagtagagatgggatttcaccatattggccaggctggtcttggactcctgacctcaagtgatccgcccacctcggcctcccaaaatgctagaattacaggtgtgagccaatgcacacagcaaggtgttttgaagagccgaatttcttagtgttgatgaaatccagtttataaattgttttatttatgaatcctgctcttggtattatatctaagaaatctttgactatttcaaggtcatgaagattgtcatttggaagtcttatagttttaacatttaagtctattgtttgaaaaaggacattttttctaaatatgtcttaactgacatattactgacagaagtaagtaaccacacctattaatgaagttgcagcatcagcatctcaactattctgggagacaatgtaggccaaatgttccctgatattatgttgataataaccccttctcaaaagggcgaatactttacttcagtatcaataccaaggaaggaaaaactgtggtgtgagagttctgctccctgggtgccctctctattttgcctctgacccatgaaactttaaaaatgaagattatgaggaagaacaggccagtgaggtcagagtcatgggttaaagccttagggtcagcagtctgaggatcttcattttaaattttcccctactgtaactcccttgctcattgtttgggtatatttcctattcaatgttaatgttaaaatatcactgccatcttgttttttctctttttgtttctgatcctatttcctttcattaaaatgttattttctgttttcccaaaattattaaatacatataacacattttcttttcttcctcaaatattattaagtatagatacatatacacttaatatatacttaattaagcatatatatactaaataatatttgaggaagaaaagaaatatatgtttatatgtactatgtacatgtatgtgtgtatatacagatacatatatacttaatatatacttaattaagcatatatacttaatatttgaggaagaaaatacagatatatttatatgtactgtatgtgtgtgtatatatatatttaatatttgagaaacaaattaaaaaacatatatactatatatatgtacacacatacaggtcatgagatcaagattattgtcatagaatccaaatctagctagaaaacacaaaatttaattcccactgcaattttaaccccacagatgagccttgataaagtaatgagagagcaataagtagcttatcttttagaggtaccagatctgtttctagtcctaaggcatttcagtagaatgcttatttcaataaactcacttaatgcaaaagataagatcataaaggcttgtaaatcaattttttttaaaaactaaaacataaattcactagtggagctcactatttaggtaataactctattgaaaacacttttatagagtaaataatcactccttctcataaattcaggtttacatctgtaggctttctttaaagcaatcttcagtgaatcattttctgaccactgtgtccaaaataattttttaacactgcacaaaaggagatatttaatataaactgttttccgaattgtccttattattgttttcacagcagccacaatgtgattaatattggaaaaggcaccattatattcaagcctcactttcaagtagataatattttaaaacataagacacaaataaaacaaagttattgcaaaaagttggcaaaatatagaaaatctctcgtttggcctctcactttcacacgtgtttttgaaaaagattccaggaagactcctctgtgctcaacagcacagaacagcacatgcactctgtttccttttcttcatgaaaaatcgtaagaatgtggaagaaaaatagtttattagcaaaaaatgcagaaatgtaccaaagaaaaattcttttgtaggacttctaactctataagttattaaaatagatacaactcaggaaaaatttatcatgaaatcaaatatgacagaaattaaagaaaacttaaaggtgtgttggatgcctgaagttggtgttgggtgatgaaattgaggcaggagaatagagtctggaggcagggaacctaaagctgtttcacactgacttcctaaaactaaattgaaaggaaaaccctaactttccacacctaagtaacaaaaggaccagagactactccctttgcaaacccccaccttgtctgcatggtagatgggaaatttaaagttacataggagtgtgacctttgtaacttttcccttcagcccctgattactgtctacagccaatcaaaatgattgtgggccaagccttcatttgcatagaagtgcaactttgaaactttagcctctgattgattgcataaagcataaagcaatcaatcagatgtttgcacaggtgtgtgacctttgtaacttcatttcagcctctgaatggtcgttttccaaggtgaacaccaagtggccaatgggaaacctctagggggtatttggacccaagaatattctctatttgggtccaaatagacccaactcccacccgctcccaccctgtggagtgtaattttgttttcaataaatctctgcttttgttgcttcattctttcctttctttgtttgtgcattttgtccaattctttgctcaaaatgccaagaacctggacactcgccactggtaacaaaatgaatatttttatatgtgacagtattttagaaaataatgtgactatacatattcatatacatatacatagccttaaaatgttcataccctttgactcagtaaattttatttatctgaatctaccagagattttcaaaaacaatcctaaatttggaagaatttcagccatacaagtgcatatagtagtgctgtgttggattgcagcagtgaaaacatcccagctatgcaaccacagagaactggttaagaagatatggtattattatatatcccaaaggaatataaattgtcctaccataaagacacaggcactcataggttcatcgtagcacccttcacaatagcaaagacatggaatcaacctagatgcccatcaatggtagcctggataaagaaaatgtggcacatactatggaatattatgcagccataaaaaagaatgaaatcatgtcctttgaagcaacatgcatgcagctggaggccattatgttaagcaaattagtgcaaaaacagaaaaccaaataccacatgttttcacttataagaggaagctaaacattgaatacacatagacacaaagaggggaacaacaggtactggggcctacttgagggtggagagtgggaggactgtcaggactgaaaaactacttatcaggtactatgtccactacctgggtcatgaaattatttgtatatcagatcaacaggcaatcatgagtgcaccaaaccaacatgcaatttacccatgtaacaaactggcacatgtacaccttgaacctaaaataaaagttttaaaaattaaaaaagaagaaaaaaaagaacatatggtagattctattaatttggtagaccattatgtaggtaataagggtacatttgcaaacagaagaatcccaaaatgaaattttcagatacagaactatacaaataaggtatacagcttatattaaaaatgattcatagaattaaaatgactgtgagaatattcagtatcactaaaaattcaaacagtagttttattggagcaacgacattacaataattgttatttttactttcttgtattttgcaaatgttatttaatgaacacgcattattatgaatgcaaaacagctgctatttttaataagagagccaagaaatacaaatatgttcatgcttcttcaacagtgaagcggggaggactttatcttattctaggcctatgctgtccaaaagagtaatcactaaccacagacggctatttaaagtaattaaaattcaaactttagttcctcagtcatactaactacattttaagaggtcaattgccatagtctactagtatcagacagcagagagaacattttcatcgtcagaaaattctactgtgaacgagctgttctagataattggcatgggatcatagaagataacctacaaggaaaggataattcataagatgcaagactctgtagttagtctacactaaaccagcaaccttagtctattaagaaagcctgttctacaagatggactatgctatataaataagtgactcacagatcattagcaaagtaactataagtcattaggtttttggttagtttcctggggatgttattttggtatctgataaattcatacaaaaatcacgtctgttggaagtttatgaatgtaaaaaaactataattactctaagatggaacaattcctccaacatgcagccttcctacagagtaaacaaatttgtctttgtcttataataatcggttgtcttgaggaggcagaaacaggaaacaaaaagacaactttggaaataatactttttaaaacttttttcttttaaaaatttctgggaaaaaaaggcaagaaagaagaaagaaattcatttgaaaaactagctcttcaaaagcagtaccaaaatcacttaggtggataaatgtttaagagtgaaaaaacgtacacctttctttatttgagaaagtagaatagtatgaagaaataagaatgcaattcaccaagccattattaatgaagggcttatctactagagtattttgtgcagttggtattccattacatataatacatttcccattagaatgtttatttaattttcttgatttaccctcatcattgtacgaagatgttccaatccattttaaattaataggctgtcttcatttcaaacatgcaggctggattttactgacataatgtgaacactacaaaaagctgtttatctttgttgaagtatgccaagatcctctgattttttttttccagtgttttctacccttgagatttaaaactgaactcttcagccaggaaaatcaaggcagcagaaagtgtaactattaagatgtaagttgcacttaaaagtgtttcaatgccccatagctttccatacagttcaaaaattatgtctagtttttaagattattaaatgttacttagaggtgggaattttatcaccacagcaattaatatcagtggaaaaccctaatacagcataagttgaatgacaacctttacaatgtatccatttagagagggtgggaaactcaggaaaacaagctgagtatttggagtcagaagttttaggctgattgtcaatgttgctgattctcgaaacttctgtttccttatctacaaaatagagacactgagaatgcataatacatggggttactgttgtcttcatggtacaagttaggacacaaggagcaggttacttattttaaatctgttcactgttagtgaggtaaattattcaaaacaaaaccagaaaaaatgattatgattaaaaaacaaatcccagcaggccagcctccctttaaatatatttaataatatgaccaaacagatctgtaaaatatacaaataagggaataagtattcatttaactaaaaggtgttgttaaatagaacttcatcggacctttaaaatgtaacttaaaagtataatttaagcctagtgtttttcataaacatgtttacggtgtaaaaaagaaaatttgtaatttatatatattgcatctactgtattaagtctgcagcaggactggacatgttcctaaccatgtacaaaccagtcacactgcttaccagctatagaccttgggcaaattactttacacctctgagtattaatgctctaatctttaagatgttgatgatgaaacctacttcatagtgctgctgtgatgactaaattatgccacgaagcatgttgcacagatgtgtactgcaataaatcaatgtacgtttgcagtcatctttacagcacagctggtcatgaagactctcctgagtacatttttgactagagatatactgtgttttaaaacttctagttttaataaatttaaccattgagtagaactgtgctacttcttcaatattcagaaaagtatatatttttcatacaaaagtaaatatatatatataactattaatttcacattagaaatatgaaaagcactccaattcctggaaaatgtcgtagtacaaaggggaaaaattaagatagatgaaaaccagaagtattcctctacacctttaccaccgacattaaaaagtgaaaaatcaattcccttttcctctggtataagcaggtaacaaatggtaaacagtttagccagaaagaagaaaagccaaggaaatccacttactaaaagttaaattcagtgactaaaattatctttcgtatgctcaccactaccaaaatctatatttctagctatgttctttcctgagatccagatatatggacaacttccaagaatcaaactcaacatttctcaaacagagctgagtatttttggccagcagaccctcccctgccataatttgccttccctgtttttccctctcagtggatgtcaagtgtgaaggtcagtctgcgtgtgtctctcttcgcccatcattaacgtgtgcattcaatattataaacacaggaacctctgctttgcatgcaatagagggtaagcaagcctgtttatagcgaacgtccattctgaagggagagcgcacaaattattaaacagataggactcctttcaagccttttaagcactgtctgggttagggatgtggtggctacagcaacataaaaaaaagttaattttaaaatattaaacataatacaaaatggtgacatgatttttctctaaaatataggaagtgatcaatcaaatgaaaaactatattttaagtaaaacttcaccataaatgtcatgatttagccacagctgaaaacttaaagggtcagattcttccagctgaccctatggtgcccagctggctgaacattctgagaataatccagtgcagtggaaacactggacatttaataaatgataactcctgaggaagaacaaggaagtcatgtccacaccagaggtgggtggtgtaacggctgattttggaggagaagtttttgttttgttttgtttttcttttgtggggtgggggtttgttttgctttggcttgagacaaggtaggaaaacccatttggaaggctggaaatttgatatttgatataagagtctgtctggctagaaaataagttcttccagacatcaaaaaggaactaataaataatcagaataaacaaatattggccatgatatatatttaaaaggtagcctagctaggcatgatggctcgtgcctgtaatcctaccactttgggaagtcaagctgggtaaatcgcttgcacccaggagttcaagaccaacctggaaaacaggtatgtggagaaggactaacatatactcctgagaacatctcagaatacgcagagcatgtttttgttaactttttcaaagatcagctggcactccgtagatatatggctttatttctgggttctctattctgtttcattgatctatgtatctatttttatacaagtaccctgttgttttagttactgtagtcttacagtatagttcgaagtcaggaaatgtgatgcctgcagctttgtttttggttgttgttgttttgttttgcttaggctttgcttttttattttttatttttttggttccatatgaattttaggactgttttttctaattctgtgaaaaatgatgttggtattttgataggaattgcattgaatctgtacactgctttcggcaggatggtcgttttaacaatattaattcttctgatctatgattagagttaaaagagcctctttttctttttttttttttttgagacagagtttcactctgtcgtccaggctagagtgcagaggcacgatctcagctcactgcaagctctgcctcctgggttcacgccattctcctgcctcagcctcccgagtagctgggactacaggtgctcaccaccacacccggctaatttttgtatttttagtggagacggggtttcaccatgttagccaggatggtctcgatctcctgacctcgtgatccacccgccttggcctcccaaagtgctgggattaccgtcgtaagccaccgtgactggccacaaaagagtcttttatggagaaatagagaatggaataaagccagataaattcaatttactgctcataaatggccatgcttcttcttaacatggtccccttactgcagaggctatatatctaaaaatgagagaaaagcaatcacactgttgcttatgagcaatctacatgaaatacaaaaattccccttctgaaaaattataacaatttgttattgaagatgtgtatgtaaattttcccacctgtgttacttttttatacaagccaaacctagcaggaatctctaattatcataccatgaggatggcttaacaagggtgttgccagcccacaaatgcaatttgattctcagcatgaaggcaagactggcaatttacaaactccagcaacaagtaactatgaatattaagatcttaatttacacaatggagaactcattgctcttagaataaaaaaaggaacattttgaggatcctgttgctggatgtggagtaaaaaaaattatggtaatgattctgacaattgttgaagcacatacatacctgaatatcagggtactttttagaattattctgctcacaatggggaaatattttacttaaataagcagcctgaatttgaaatcaagtcataaggtaaatgtctcaattacaaatggtactgctttatatatggataaatctcatagacataacactgactgaaaaaaacagacataaaacataatgcatgattccatctatataacgttcaagaacagacaaaaataatctacagtgatagatgtcagatggtggtgactttcagtgaggatattgatgggagggtgcctgagggagtcttcatgacttagaaatattctacatattcatctagatggtgagaacatgggtgtatacatatggaatattatttaacctctacatgtaagatttgtacagttcaatatttgtgtgatatactgcaataaaaatttaaaaataggtcaattgtattagataactaacaaaattgaaaaacagatcaatagtactagataataaatatacaatagtctttatctttcctaaaacaaaatttaactgttactttagtgagtaccaagagtgcacacattcagaaggttttggaacccatctccttgtgtagcacagcattacatattttacatttcaacgtggctacaactcctaatcctcctgtcaagaatcccacatgagccaggctattgataaaacaattgcttctccagtaaagagttttatttgctctctcattgcctatcagcttaatacataggagaatatacttgaaaaggatcaagttctataaacaggactaaatgattatggagcaggcatctttataattgtgtttttacttttttccccccagttgtttctcaaggaatacagcagaaattgaaccataaagcttagcttgacagaaaggcattagcctaccatgctaaaccaaagataggagagacagttatttatgaagaaacactgttccctattatccttctgagattctaaaaaagggctaaatattgatgcatttcaaagtcaccttttcccccacttcttgtattaacaagcaggagtatgttttagatgctcctaatttgtcaagatcaggtgaacagaactgtcgtacagagcacactgctctcattcctacaagggctctgcaaccctgtgggttattaataattcatcggtctttcttagttcacaacaggggcattactcagagggcatcattcttactgaaagaagttaacagcgatgggcagataaacaatgcacaagtcaaagaagaagaagcctcttatgaatttgtgaacactgaagatctgttaaagagctccaactactataggaaaaaaaaaactgctaggtattctttacctaggcttctattgcctgttaggctaaattcagccatctttagaattatatcagttgtattaacacagaaattccttgaaaatcatttaactcttttgtgtgttaacacaggttatactactgggtacgattatgttgtctttattgaattagtttctccaaactaatctttttggcaggaaaatgatgtctacttttgggttccaacagtatttatttatcaaggaaatacatgaagcatcctaatgtcttaatgattgaaaacaagtctccaggaaaaggaacaccatcctttatggtcctcctcaatacacgtagaccctctgggtgaaatttaacacaggtattccaaaaaatttaaataacaggggcaacaggctcagaagcctaaaggcatgaatcacgcaagagtgtaaaacagtagagcgaggcagagtctgcagcctgtgactgcatgccctgcttaaagaaacttcaaaaacaaaccaaaaaccaaaaccaaatactgctaggccaaacatgcctatgtggggtgaccaatttcagacccatagcataaatcagaagtctttattctgaatatatgaggactcagaataggatgtattatgtcctctaaataaaagatattcatgtgggttaaataagagcattgatttattttcttgaagatatattgttattagaatgtactccattatttagaatgtactccattatttagaatgtactcgaatacaaattaagcctctgatttctgaatatcagtaacgagtaacctcgctttagctaaaaacagtaacataaaatttactgagcacttactaggtgccaagtactattctaagcactctgcatgcataaacagacttgaaattctcacaccgattctatggagaaaccaagcaggcacagaatgagaaagcaatctgcccacaaaaacacagctaatgaggctgctgttcaaactcaagcaacctgctttcagagtctctgtttccttgtttactgctcgcttcctcttagttaagagcacagctcatttactccacatgaatgcatcaagggaaagcggtagctttcactcattagcaagactgatataaaataaatagaaactcaccaccaaaatcactacatatactatacctcctaccttagctacaaagcagaggagtttcagggaccaagaaacaaaaggcttggagacaatgagtacagttcctgataacagtagataataaatatcactaggctgagaaagagttaagaggtcaaaaagaggaaaagatgattctataacaacatgccattttcctctcgtactagaaatggacatcttcagagtctttgcttcctttaagatactaactaggtcagatcagatgttcctctttttttcttttactaatggaatgccctaagacagaataaatatagaaattaaaggatctttgaaaaacccttgggtttttctttactgataatttcaaattttaaatgctacagattctataattacagtgacctcactcttggcactgaatgttatgccttcatgctacagtaaatacctttggttatgaaggatatgctgtcctaaaaaatggaatctttactagtaatgttgcaattttttatctgaggtgtttcccattcatctttttcaaaatagaatttcaccagaattaaagttaacatattatttattcatcatatctgataagcatccgatgatgataaggaatttttttcataaatacataaaaatttctttcaacaaatgcccctactatatctaaatatatagttggaaatgtaaagcaaaagcatttcaattagataattataaaagtaaacacattttttcaatttatgcacacttaaaacataaaatgttttagaacaaaatatttcaactaatttgttttaattagttaaaaatacattacaccatctcatagtagagacagctacataacatgctacataatggattagtgtcagaaaatgccaactttttgcataatttcaagaatatattccaaaaacacccccacttaccatcaagatttcaaaataataatagtcaatatttatatgtacctcccattctgtgtcccaccaattatctcattggatatccaaagaaaaaaaaggttctacatctcaagaagtttgaataacccttaaaggatcaaaatgtagtttattttatgaaaggctctgagaattcttgctttgaaaaaattaactttcggtgaaatatattgttttccagttaatgacatacttctcatactcatgcacgattctaatactttcataaacaaatacttagaaaaaagttccatcaaataaccagtgagaaataaattcaacctacatcactagagtcaacatgattcattggttagaaagggaaaggaagacatctctctcttactgaagcagcagtagcagcctggggtaaatctgtcacgcaaatacgttgggctatttcaatgttactcttgttagatcttgcttttatcaggctttcatgtaaataggtagtaaaattttcaaaaaggccatgtgtccatatgcacagattaaaaaaaaaaatcttttgttgtgcagaagctctttagtttaattagatcccatttgtcaattttgtcttttgttgccattgcttttggtgttttggacatgaagtccttgcccatgcctatgcctgcacaatgtgcacatgtaccctaaaacttaaagtataataaaaaaaaaagattagaaaattaaaaaaaaaaaaaatcatggttgtccagacagttgaactgggatttcatttccctgtgtatcaagagacttgtgcagtaaagggttaacttagcagtcttgaggttttcaaaccacacacattctaaagaaaagaaaagattggctcttgacaagctcctgggatataacctctaagtgcttggagtatcctgcctagtaagagtttgcttttctacctggggccttgggccacactagacagttttatgctaacaatgtgatttatggcaaacacccgttctagttcacccagggccctaggtcacactgtatcagaagtttgactacaggaggggctgcagactgagtaactaaagttacccacgtaggtgttccacacctacaagacagaccccccccaacaaaatccttgaccaccaaggctcagtgaccctccgggttgacaatactccatgtgtgctatcacacatcattgctgggagaattaggaactgtccacacaaatccaccaggacaggacaaccagaaactcattcctggtctctccctgactctgttctatgtcccttttacctttgttgatttgaatctgtatcattttgctatattaagccataactgtgtgtataatagctttttataatagattttatgatttctatgagtcctttcagcaaatcactgaacccgagagacaaactagattcttcccattggtatctaggattcaaccagccttattatctgactccttggtcatgaccagtctctgttcagacacctaatatctatcgaaccccttaagttaaatcagcctccagatttcagcagaaataaatgcacagaaaaaataagcccatataatttgctgtagaatgtaaaaagcaacttttgatatttaggccaattacagtaataaacattaaataaaagagactgaccaactgcaaactggactattttcaaacttgttgccaatgactatcctctaggtaagagatgaaggtgcctcacaaattcaactgtataagatgtatgtgcccagcagggtcgtgcctgaagtagccatcctgcctttctaacctatcttgtcccatctatcacctcacaacattggccactaatgctgcatcctcagtagagatgggatcgtgacctacccaaacattcattataaaggtgtaagaatcaaagaagcatgttgtcagctctgcttttggcaataaaggaaaggtttttctcaggttttcctcttcacatggttttgggctgacagtgagcagtgagcaagctgtacttaagagttgtccctaacagatgtgagggcggggacagcattgaatacaatcaccatctctgatggccccctctctaaatgcattaaaggaactcaaactggaaaaggagaattatccagccattaaatttcattctttatgagacaccaatagctacctttttttgctttcaagaaacttgggttatgggcacaaagatccttcaaaatattcaaattatccatcttgaatctcagacaatttttgtgcataataaaagttcaattgaagcctcttttaaagagtcacttgaagaggtacatagtgactaaaataatcattcaaacaggagataaacaggaataagtgaagctaattcaacctgcacatgcatatttaacatgatacacatatgttacaaagcatactataaatatctctgtgcctattgaccttgtgcagctctaggaataaatgctggaggaatttggtacttaaaatgttgaagaggtcaggcacggtggctcatgcctgtaatcccaacactttgggaggccgaggcgggcagatcatgaggtcaggagatcgagatcatcctggctaacacggtgaaaccccgtatctactaaaaatacaaaaaattagccaggcatggtggcgggcacctgtagtcccagctattcgggaggctgaggcaggagaatggtgtgaatctgggaggcggagcttgcagtgagccgagatcgtgccactgcactccagcctgggcaacagtgagacaaaaaaaaaaaaaaaaaaaaagaagaaatatggagtgctggtagacatttctgtcaatagcagcaatcagtagcttaacctctattgcttctctcattctacatggcagagatagcagtgataactgtggcaatccagcagaatgcgaggccttcagaagcagagctaaatatgaggagtagcacacacagtatgtgtctttatggcagctcttaggaaatctgtccatttgcacaggtgctcctagaggcaaatgagcagacataccttgaaccatagtgactctcttaaggttattcaaaattaaactgtgtcactcccaaagagacatcacaatcctggaagaattcagtcacctgtgactaacctgacaacaattaacatacttgaaaattgtataaaactcaaattaaattttaatctttcatacttaagaaagaatcagtaactgataaagaactgtttaactcaatttgaatgtgatttcatgaaaggatacattttttaaagttattcatctggatcacatattcaacagttagagttttccaaaataattccaaagcaggtttcatgctgacatttttaaatcgtaaaagctttagcacagtaggcattgtccttgcctggatgttctgtgtcggatctacattcgtgtttatactgtgctgctgaacaaaacttagcaccacaataattatgtgaatcaagttctagtcgactttgtcagtatgcttttcatctctaaagctttgaagtcaaatcccagtaaatgtcaatatgctcctatcatgtccacacctgtcatctgcagcacaagtcagtgtgatctgcagatagaaatgaggagaaattgaacatattttatggctgttctgcttgaggcaataagaataaagtaaatcaatacttcatgtcatttcctgaaaatactgtattctccaagacatttagccagcacttgcccatttaacaaggacaaaaacataaaaagaaagtttttaactcagaaaattagcacatcaatatttctgggtcacagaaattcaagatgtatcatgcattacttcaaaatctcagttaaatacactctcaaggttggttgctcacaggaagggtaagtatcattaagaaaatctaaaatttcaggaatgaaggctcatatttaatatcctattattcctactaaaatattactaaatttatagccccattaaaaaatgtcaagacatgactttctctgtaaaatgagacctgcaaaaacattatatatctttacttacatggtatatttttctaatttttctatcaatttctatcattttccatcattcatttttaaaaaactctttatactttactgttcaacactatttctgacctttggaaatggatatttcttgactatctacccatactgtatgtacacttaagtagaagaatgtacaagttcagggagcctctgcaatagtcttttgtaatttaagaaataatttccaaatctgagcaaaaataattgggccttggttggaaaatgtaagttacaagtatataacttaaagaatattgaaatcatatttgggaaaataaaaagtatcaatagtaaaatatggtagaactcttaagtacatagagtttggagtccgagaagctagagtccaaatattggctaacctcctattaactactgatcttggggcagttttcacttctctgagccgaagattcactgcttgtacaatgggaacgcacacaatgtacagctgctctgaaaagtaaacgagctctgactacagaaagtgcctggaacatggtactcagcaaatggtattttcttggaatcctataaacaaattggtaacaggaaacatactaaaaaagagagagaaaaacagtgaatacagggcaaaaatgaaaatcattaaaaaggcaaaaaatgtcccggtagcaatgatttctaagtatcataaaagaaaacaactaggaaaatataattagaatgctatatcactaaaatccgtttttgagaccaggatgttcaattcgaaatcctaagaatgatgtgcttccccctgcctgagaaagtgccacgctcaagaaaggaggaagggaaggaattccagtccttctttgcttgtgggttttctcttaaaacttctgtttagaggaggtaggtgtgttcctgtccccttgacttggcttcaaggactagagacagaaagtctactggaaaagcatgtatttgtttgtgaggaaattagatactggattcgatactggattcactacattgtttgttcaaatgatttgtgtcaggaaaaacttttttttttttttcttttttttgagatagggtcttactctgtcacccaggctggagtgcagtggtgcaatcttggctcactgcactcccaggctcaagccatcctcccaagcagcagggactacaggtgtgtgccaccatgcccagctaatttttttaaatcttttgtagagatggggtcttgccatgttgcataagctggtcttgaactcttgggctcgagggatccatctacctcggcctcccaaggtgttgggactagaggtatgagctaccgcacttagccaggaagaacttttaaaaaacaaattgttaacaaatccctgaggttacattactcatccataaatacatcagcatgtatctccaaaaaagtaaagttatttttaagcatactacaatataattaacatatctataaatattaacaatgcttccttaatagcaaattaatactcaaatatattccactgtctcataattttctttacagtttattcaattcagactccaaatatttgcttccaaataatctagttgctgagggataagagagtgggtaattgaggatatagatgaaaaaggtcacatataagtaaaattgttaaagttggatgactggtataacagagttcattaagttattctccctgcttctgtataaccttcaagttttcagtaagaaaaatgttttaagttttccgtaataaaaaattatacagacatacatcaatgaaaataaaaagatagcaataaatataactcacaggtttgagatttttttaaatgacattttaggtcaaaaaaatgctgaaactcagaccttcctagccctgtagcctcaataaacacaaagtaactgagagtagaaagttaatttactttagtaaaaaaagcaagttttaacagcatcaaaatatgagttgaataattaatttttaaaatcctgtattaatgtgtttatgtcaggttccaccagatataggcataaaacaaaccaggtgctgccttttttggagattataggctaacagactcagtgcctgccttctatatatgctatggcgtcaaaagttgggaagcatctgttcaaacaatagtttaggattttattgaaggtcaattaagacttaactgagaaattttaaaactattaaatacatttatggaaacaatttttgcatatctaaccatttttacattatcaataatttgaaaataccattttttagagcaggagtatttattaaaagtaaatatacctaggtctacttcattagtaaaaaaagtaaatattcctaggtctacttcttaacatattcaattggataagcaatgaataaggagtactgagttgaagaagtgaagtcctatctagacctcaggaggtatggagaatacagaaatgacagaatatacaccacactaagctgccttgcctgtttcccttacaaacagcaattagaggagactccttggggacttaacatatttactcctacatatgttaactaaaagcctatgctaatgtacaaaggatggatctcctcctgcctgaagatctcagcagatgtgacagcaggttctggaagaggatcagcatacaaaggcatacgtgtccactggcagatcctgctggttgcctagtctatcaatattgcttttcctttcctccttgctaacagaaccttggcattactgagggtggcaatgtgcctagattttaaccactacacttcccaacttctttcacagccaggactgaccacatgacacagtccttgttaatgaaatttaggtgggagtcactaggtggattgaaaatcctttataaggggacagtcaggctggtttgctactttttccttttacccttttcttcctctttgtcttcctccctatacctctatgtgctggctagagctcaagcaccatcacatgagcatgaggaccccaaggatggtggcttgcaaagtcaaaaggcttcattttcctctttccctggctggagagactgcaagtttctccccaggtgtgtggaccacaggtgctgcagttggccccaggctaaaagctgcagagataagaactgacttctacagctctccaccttttctcctccatgccagtatgcacacccaaccagcatctctgcttctcttcacaatccagtaccttcaagtagttgtttttgtgatatgtccaggtttttattttggagggacatgcattccagtagagcctaagtcccttagtttttagaaacaaaattatttaaatttcactactgagccccaaagaacttctaacatctagactattaataaatggcttcttgatcagagagtgatactcaaaaagccagacccaacaatagagttcacagaaacaacagtccttcaacattttctgaagagctcttcatttccattaaaagggttttgttaatcatttaaaaaatattgttaaattactgccatgtgtgactcatggattaggtgatagctggtactggctttatatagctacagaaacagaaacaagtctatgggtgtcttacatgtcaatatgctttagatcatttcaggtaaagtaattaagcagatacatattgactatttggtgcctaaccttatggtgatgagcaaagtgtggggaagctattgaagaatatgaaatcactcttgcctttctataatcttattgaaaagaaaaaaagactaacaagaaaaaattaatccaaatcaatatataatcaaatgctgaaatatggggaaaaggcaagccaaaaacatctaccaaattatgacaaaatatacaaggctaagactagattaactgaatccactcctcctagatatgctgaagctctgaatagataacatctggtaagctgtgaaacatgaaaagcatatacagttcactggaaatcaaaagagcttaagcttactatgtgagatataatcaagaatatgggttttaatctatgacccattgtttgccaggttctttttaaatttttcattcaaacatcatatattaaacaaaagctaattttaagaataaaagtgtctccaatattttaagtctcaatgactgaaagaatggtgaagcccttcttgggactctgaagacaataccccaaaatatggtgctttggcatactgaaccaaagcaggagccctagggtctctgtgaccttcctctcccggtctctcaatcatctgtctctcccaaaccagaggatgaggctgttctctgaagttctcttgtctacctagaaaccagacccaccaaagagaagtacgttacctttgatctcttcagtgaatttcattaacaagagaaaattaaaactcatatcctagaggaagagactgaaaattaaacaccacacctagaaccctgatgaacttcatcccaaaatgaatattgaatgaatattcaagcacttcacacaaataatcattgacgagctaacttctatcttccatgttcattaaaatcatttagtacaccccacaaaattgcctcatttccctcctctctcctttccctatgaagaagggtatacaagcatctggacctcgttgggttattgggtaatcattctcctgcaattgccccatgcttaggcatgttaaacaaatttgtaagtcttcttctcccattaatctgcttattgtcagttcattttcagcaaactttcagagggtagaaaagaagctttgtccccataccattaataaatatgagtaggaagaaaatgatctgagaagaaaagagatgaggagctatgttccgagcatgctcaatttgtgtgaacagcaagacaatccctcttgtgcccactgtttatagtatgatacaggtgaagtagcgaaggctttgataacacaaacacttcaacattcacatctcaactccacccacttcttagttggccttcagcaagactatgagatctagctcccaagactgcaaaattgggatcacaatatcaaactacaggaatacattttgagaattcagtgacatgattcagttaaaacacctaaccaataataggtattaagtgttaacatctttctttcttgtttctgcttgttctttttgaatgccaaatctgataagcttatgaatctctacttcaaattgacccatttcctaactatcctcaacatcatatgcttatatctatcgcacatcttttactcctattttctatttctctcaacttaaaaaagcactataaaagcacttttatagtattaaaaatactatacatccttcaagatccaattcaaggcctgtccttttggtacataagcaatcatttcaatctgcattaggttttcctttacctcatgacatactttgctattaattaatttacatacatgtcttgcctccccagataaaacataaacttttataaagcagaatctgtgtctaaaattggttttgtttgtaaaggctcggctctggactccctctgagatcaacaaaaacttgctgaataaaggaatcagtggtgctgaccattaaaatctgaggactaatgtctattcagatataccagtcaaagtcaaatttatgaaatgtgatttttgtctactgccaactgctaagaaaaccaaaattcaatgtgattataattgtaatgaacaacaacaaaaaagcagctgttgcttcggactaaaaagcaatgcttaaaagagataatgtaacgagggacttctgtaaaagaccttaaataactattgcacaagaagataagaattaaaattaaattaattaagataatcaattccactattaaaatggaaatgaacttttatcagaaccgtggtagaatcacaagtaagatgtttcaatagttaaaaagtagtttttaaaatttgagatgcattgcaaaaaaaaaaaattggctcatgggtcagcactggaattaaccctataacaacagtaatttacatgaactattaatcattttaaatgtgattaaaaaaatacaagtccagcacacctgttcaccaatcaaaatacctagggcttgagacaatgtagtaagacaacctgtaaagctaagggtcaacaagcttccaagattggagctttcttcactctcttttttttttgacatcagtgtacaactagactcaacattcaacatgtcaattatgtcatcatcactaatctttcagtattagcaaaagtataacttcaaaaactcatttccaataggaacacacacacacattcacatacatacacacacacacacacactcacatacatacatacacacacacacacacacacacccccccgacaaaatgaaaccaacagaagctcatgaaagcatatagggaatagtttcatttatgaataaaatgtttccctgtatcttctattaaaccaagggttttaaaaatcaaattaaatcaaaatacaaaaaacaatagtatattgtttttgtagaactaaacatctcctttaaattgatatgtctttaaaataggaggtgaaaactatcgtgacaattgttctacaagattaaattaggagaaataacttaaccaacattttatacattaacatttatttaaaatctgcatattaatgaacttcaagtattgcaaacttggcaggatgttgaaatcaatgttttcagatatctatcatgatatattgagtctctggtttacttgacgtttttcctttaaaaataattttaagtagttaagcaatgtaattcctcttattttcaaaaaaattcatattctacttccttcatagatggtcactgtaaagaagtttaaactctaattaacagctaataatatgcagatagcagatacacacaaaagcttccattaaacaaaacggacaaagaaaactaccatttcctgattttctccctcagccctccctacctactatcttgattctgcaaacagcagaataaattaaagttcctttcttctacatcaactcctttgtcctctcaaggttgcctaatcatattcatctcctaaaatgaagtaagaaacatttcaaaagctgtattcacattaaatcaactttctgattcgtgcattgcaggaataaagcaatgtaatcacatcttaaattggtttacagcaggctgtctaccttatcctacttctcaggattgatgaaatgaatagttttaaaatagcactttttgaaatgacaagagaattaatagtgcataattacctcagtgttgacaagtgagagatgtttaactccttaaatgagctctcctaatgaatcagtgtcagagaaaggctccactgcatgtacatggttgattgatatctaaggggattgatttaaccataaaggaataccgaaagccagtttttaaagttatttaggcaaaaaattaaatgaatcaatttttacttaatatttggaatatatttacttaagactttaccataagctttgatagtattctaggtgttgattactaggaaaatcttattttacattgtatgagtccactaaggaacatttaaccttttaatagagtggcaacaaaaaaaacttactttagtattggactccacactacataaaagtgaaaattaagctattggatttaaaaagtagtacagagagttcatttctgacatttatatttaaagactgtaatgaagacaactacaatacaatgacgtaaatctccattttaacgaaaacttttaatacatgtaaaatatgtataaaatattaccataccatgttgaacttttaatatttatatacattctctttctaattcttgtcaattaacatgtgatactgttccattctattttaaatcctgtgggtaaaaccaaaacagattgatatttctaaacacctggaattgagaaaactgaacacggtctcagcagtagagctgtgcagttgaaatgtaacacaagccggctccaacttactcttcatttttccatgtctttcacgtataccagctgcctagcttgagtgtgtgtcaggcacggggctaagaactttctatttaattctggagattcctaagaagtagatcatactatccccattttgtagatgaggaaggctgtgcacagggaggttcctgtcccacagtcacagagggtcgtgagtagagcctgattatgcactaagacaactggaatgcatagtccacacacacactggttggcaaatatatttccatgtagattatctttaccggattaccactgttttagctatcagtgaaggtgttagattgtgttgttattcctttatcagttcaatatatttgggagtcaactaaatgctagtactttcccaggtgctgagactacaagcgcatgacagagatgaggcccttctcacgtggagaccacagacagcatttgcagggagggggatttgctttgtaattaagcgccttagctaagagacacaggtgcaggagatgcacaatttggacacttagacaaacattcttgacctggtacccgctgagcctcagtgaaagagtgagggtaaagtgtgaggacaatggcagcctgagctcccagcactaacacaatagctggagctggccatgccctccacctgggcagcaggggactataccaccaggctcaggtggactgcgggggggttgtaggcagaatgtgcagcctgggagtgtggcactctatgggaacgtctgccttaaccttcctttaggaagccaaagcctctgtgctggcactcctccccaggtactaaccctgtcacctctcccccagactccttagaagattgagcaccagggatgaaaccaggtcatcaccaatcaaattcctggcttcactgttctatcttgggtttctttaaaaaataattagatacatgaatgcctcagtctgttctattaggtgtacttaaactatgtgtcaaagctcattggaatatttcactgatgccttaaaatgtctttagcagaaatgcatttgagttgcaaacatgcaccttaaatgtgacttcccagggacaatcagctaagaaattttagttaatgttacaatttataaatatttgtgaataaaaatgtgttctaaattaaaaaaccaagtcttcattgactcgtctaagaattagggatgatgaaaactacttcttaaggaatactgaatgagttattgtagctagatgggtccggtgggctctaacacacagcaggtgtgcccgaggatggtcacatctgaatcgtgaaacaaatggacttcggattttgtttatattataaaaatctacaagaaaaacagtatttttcttaatcagttttaaactaagtcaaataattttgctgcatttaccaagtgtgtagagatttatattttaaaaatataagaagtgtagcttcaatggtaaacatgtattttatatattacttcgtaggtaatgttcctttgcttttttaaaaaaaattgctatccttagctcagaaataaaaaatgttaaaatagtaagagactttagtaataactactaaaaactggctcttccaactttccaatatctatgatggaaacccttcacacctgcctgatgtgtcagacagacacaaattggttgtttgaggggtcagaccctttcttagactgcctctcccctcctcaccccttaaagtgatacccttgaaaatcccctttactgtttcagaagaacactgttttagaagcagctataccaccacatcatttacactcacaatgccatagatgtaaatgtgagacctcagggccaggccaaatactccgggcctgaaatcctactctttccatcaatatgcccttaatcaagaggaatctggtagagcttctgtgagaatacaagttcttaagtgtaaaatctagatgtcccattaagcaaacgataccagtcaaggaactggcttttttgagctcttcctaaaaataatgagatttggaggacagccatcagtcatggaaagacatcaaacactgcatgaagacctcttgaaacctggttccacaagaaaactagaaattaaaataatgcatttaatagctcataaagtttacaagattcttatctgctctgcaagacagaaagaatcaaatgattttcttggccagggagaattcaggttcaatttttaagcccctattctgtaaccctcagtcagccctgtaggaaggtaattatcagggctagagggatagttcctgctgtttcctataagtaaactcaggagctaaattaaggtacttagaggtaaactctcagggtgtgcagagcttggctgtttgactcccgtggattctggagcaaagcactaaacacttctatttattcagagagcaggtagagaatagggcagcagaaacacggctttctcagacacctccgccagcccctgctaatcaacgggagtcacacagctcacaatctcttgctatggttttaaaatgcaacttttaatgttatttcattgtggtgtccttgtactgaaaagcatttattatgtagtttcaaatttacctgaaggttaaaaaaaaaaaaaaaaaagaccacagcaggaaagctgccattgtgagaaagaaggacataaaattcaagcaatgaattaaagaggcaaatgaaggaactcttttcctctattagaaatagaagaaacagattgtgctcgtcttgcttagggccaacaggcgcactgcatggaactcagccagcttcagtcacaaagctcacttaggagttctggtctgtgaaaagaggaaaccagatgggctatttactttcaacaagataattctggaggaaattgttatatgtcaaagaaactttttagcttcatctgctattttagcctctaaactgattcaggaagcagaggggagggttctgttaggaaagaaataagagaattggggaaataaaagcaagcgcagtgcaaaaggctgggcggccatgtcgtccaagtgcataagcttcctggactcatatcctcactctaaccttggacaagcgatctgacctcttggtgcttcagtttcctcctgggtaacatggggaccacaatagtgtcactagaggttgtaaagattaagtggtataaatatcagtacttaaaatacaacacacacatgagcactcaataaccatcaggcattgtttttatctatttcattttctcttctatttgcaaaacataaagggaatgtatcatagatatagatcaatgactaaacaattcttaagaagacactaacagctaaatgttatattggtctactgattatattgaccatataccactgatggaatttgtttgaaaacaacttctcttttgtttggctaccacaaaaagtaaaataatccagataattttattcttggatcaaaaatttcaaagagattttcttacctcaaaattaagaaagatagcttttaagaaaagtagctgtagagtgaatatagaaaagttaattaaattctaagttaaatttctaatacatataaaggatgctttctaatgagaaaaaagcagagtttccccagcaaattgtaaataacttggaccaaaatcaagataattcttatatgaatatactgtggaaaaggtatctagcaacctcatttttaggatgtacaatatctaaatattagttattaagcaaaaactgaaagtattcaaattaagttatgtgaccattaggcatccaacttaacctacttttattttacacttgtactattgctaaataataactgatgattccaagagaataaacaatactctcagaacagagtaatacaaaatatgttcagtctactgtatttaccatggcaggaaaaaggacacacattgttagaaggattattcagcatgaaggactaaaataaaaaatagttgcctggttatctttgtattgattttaaaaatttcacaaatattctatttcattgtcacattagagaaacagcatcactattttttttttttttttccgagacacagtctggctgtcacccaggctgcagtgcagtggcacgatctcagttcactgcaacctccaactcccgggttcaagtgattctcacgcctcagcctcctgagtagctgggactacaggtgcaagccaccacgcctggctaatttttatatttttagtagagatggggtttcaccatgttggccaagctggtctcgatcaaactcctggcctcaagtgatccaccttgccttggcttcccaaagtgctgggattataggcataagccaccatacctggctaatatttgtatttttagtagagacagggcttcaccatgttggccaagttggtctcacactcctggcctcaagtgatctgcccaccttggcctcccaaagtgctgggattacaggcatgaatctgccaccactggattttcacttttttgtgtaacacattttctttctgtaaggggaaaataaacaaataattcattaatttaattttcaaaatttatttatggctctgataaacataaaagccaacagcatattttaaagctattttgaaaatataaaaagaatggttactatgtttgatttttcatatggctagtgactcaatccagctgtgccccaagaaaactgaatgaatgttgatgataaaaatatctgaaaactgtatgagaaaccacatagacatatatgctaggaacttacagattttatgtcccaattaaggcctgtgaataaacggagatgagtattcaagataatagaagtagaaatcatatctttgtcttaattaccatttataaagttaatataaaataaaatttccctaagtattgcagaaaagcaaacatagcaagacaattttacattgtcaataaactggaaatgggcaggaaagctgcttcctttgaaacaacctaacacggctttcatgacactgattcttaacagtgatgaaacattaaatgaaacatgaaattgattagcctctttctcttctatactccaaattttctcccactttgaaaatatctattatttcactaactcaaaggccaaaaatctaatagcgtttgttactcattttcgaccactggcctaaccccattccaggcaccttcagaaataacactgcctttctgccctgacatagagtcagagacctaaagagccttgttgggagagcagtcttccctgggcctacatatcttactgcaggggcccccaagccgcaggccataggggtccgtggcctgttaggaactgggccacacagcaggaggtgagtggtgggcaagcggagccagtaaaccttcctctgtatttacaggtgctccctatcacttgccttaccacctgagctccacctcctgtctgatcagcagaggtattagattctcaccggagcgtgaaccctattgtgaactctgcatgtgagggatctaggctgcaggctccttatgagaatctaatgcctgatgatctgtcactgtctcccatcacctccagatgggactgtccagttacagcaaaataaactcaggggccccactgattctacactatggcgaattgttatttcattgtaatatataattatttcattatatattacaatgtaataaagggcacaataaaggtaacgcacttgaattacacttgaaaccaccctcctcgccctgatccatggaaaaattgtcttatgaaaccgatccctggtgccaaaaaggttggagactactgtcttactgggtatgccaagacatcaagggtctgaacacttttttttttttttttaataacctgggctacttctcaggttgctttcgcaggtgagagatgaggcaacctctccccttggacaaacagcagactgacttactgcttgttataaaagcagtgaattccccaaactcagagttccttagttgcaatgcaaactcactcattcatagcatccatccggaccataggaattgaaagcaagggcaattgatgccaatatgctggtgctcatgctgcttattgtgccaagggtaataaaacgttttctttctgacccggaagtctcatgtcttctgccagtaaccatgaaacagtaactggctaaaatgtatgagaaacgatacacataccattagcttccaaatagggtaagatgatatctcagacctgacagttttggtgaaggaacatagctatctggagaaggaaggaaaagtgtccagagattgggtccaggaatataaaaaaatctccctggaatctgagagcgaatgctcttgcctaggaggtggacagtggggtgtggtgggtgggaataagggtccctactgtcctgtgtgctaatgaggctaagagaggcaagattgaaatgagtatgtaaacggaaccgtggatattgctcactcattctcctccacgggttggggtgttatcatgacaagggggcagcaagaaagacaatgtgggtgtggctgctgagccaggggtcctcaaagctgacacagtgtctcaataataatgacctttttacctgatataggtctttgtgcggaccatcaactttagaagtctggttaagcctcacataggctgctgcttgaaagccacagtaaatgtgccttgttgattaacacggagctgctgtccctctcatactacctgatccctcccttccctctattctgaactcagctgctttaaggagaaggatgactgggctgggtttaagatctccctatccccaggggacagaaagcccctggcaccccctacaaacacacacacacacacacacacacacacacacacacacacaactgtttggtatgatgaggaagaaaggaactcaactgttatgagtccaagttcccattcttcctggcccatggaagaaaggcacactgaactctactaatggggtttagtgcttcccagtgggaaaggggaggtgaactagccttgtaaaggtgccctctgggcttattcaatgtggtgttgtggtagcagctcccatattcaattctataataagaactgatgtattacacatttgcacggcctaatccctgaagtgtcagaagggcttttcatgttccagaactgctgcagaggcccctgcccactataatagcatcacctgtttgatggagctacaaagtactttaaaaaaaaacaaaaaagcagctgttatcctgcaactaagctcttgtggagaaaaatgaacagctgaaatcccattttcaggtgaatctccctaaagaggtgggaagggcctaagaggccttcctggtcaaatggaaatggtatattcaagggcacagtgcatccagccctagcatcacccagtattaaatgaaaataatggcagctacttctttggaggaaccatatcccccactccactactggaaacagagctgctggttcaagaaggctctcagaggttcccatcacggatggcctggttcactgacagtttgatgaagctaaaagccgatggtggtctctgaccagcagcagccaaaaggaccagtcagcacatttctctgtatgagagctctgacccttgtcagacaatgctcctaaagaccaggcatttcatattttacagactcttggactgctgtaaatgacttgtctgctttgccatttggaagactacagactggcagattaaagagcccctctgtaggactacacattttgaaaacaaatcttggctgctgattggtctgagtgtcactgatacagatgcctgcagtaagtgcttattctctgatgagaccaactggaatcaagctgttggtcaaaactgctatttaaaaaaaaaaaaaaaccaggaaaagtcatgtggacatggctggccctgaactattccgctgtgccgatgccaccaacagcatctcccaaacgtggcccttcccctcagacctgtgcaaacacagattgcttcaacactgttccaacctgacatacaaattcataggcttctcctgcctcccaagcagccgtagctaatgccatgtttagcaatctagattgcagcaactcagtgacactatgtggcttaatcaaaccagtgtaatgctgattccaatcaagtgtagcaacaaattccaaactagagtggcctgtgctctctatatgggggaaagtaggccacagaatgtctctccattaggcatgagggttgctttctgaaacagctattatcattgacaatgagacccaagaggggcaagtcattgcaaactttcttgcgcagatcatattaggtagcagacttgtcttgcaccgtctgaattaagacctactggtctccctctgggatttattcatagtaggctgaatcagagattctggtcggggaaggcagagagactggatgaagtcaatactgcaggttggcttcatcctgctgcttaggattttattgattgttgccctaattaaatgctggtatgagacaagttgactagtttggttccaacctctgttggtccgattaatcagagtgactacaggtggcctattcatgtaaaaatttaccaaaagccaagatggggatggatagagacagttttccttggtcttcttatactccctgcatgtcttgttgggataccaagactgcattgtcctgactgctcttttacctgggccatttctcaagactgcattgtcctgactgctcttttacctgggccacttctcaggactgtttatacatctgataaccttaaataatgaagtaatgtctaaccccagacaaagagcataggtactgcttgctataaaaatggaagattccctaagctcagcagtcatcatctgcaatgcaaacctactgcatgcacagcatccatctgggctgtatcacatcaccccgtgagattcaggggcaaaggaactagagtaaatatcatgacgcttatacaacttgccatactatgagtaataaagccccttaatctctgacccatgtctcatatcttttgccagtctccatgatataaacaggctaactcattagtttgtaagtagggtaaaaagcaaagcccagatccaacatgtttatctctggcttgcaccacatagggcatatgatagaaacctagttaagacaatcatccccatacttaatgtccaaacatgaagttacatagctgtcctaaagttgaacctgtcttctgagattatttcatggaagcaagagaaaactattaacatatgaatgtaaaaaccagggtcacttccccattttccaggcctaacaaacttatgaaacctccacataaaactagggttactcacttcagttccggttcctccagagtaaaacccctctgaaggggcactattaccaccacttcaccacactagagtgtggaggagaaatactaagtatatgagatgctgtaatattatagtttgaacggaagggtgatttgagatgtgaaagaaagtgaataagaagtgctactagacatgggcaatatactttttaaattccaaacttgatttcaaaaagtagaatcaatcagtcaaataaacaaaaaacctaccttcaaggaggtggaagaatggcaagaaactggtatttataaaattaggtctctttggccaggctcacgcctgtaatcccagcactttgggagaccgaggcgggcggatcacgaggtcagaagatcaagaccatcctggctaacacagtgaaaccccgtctctattaaaaatacaaaaaattagccacgcgtgctggcgggcgcctgtagtcccagctactcgggaggctgaggcaggagaatggcgtgaacccaggaggtggagcttgcaatgagccaagatcgcgccaccgcactccagcctgggcaacagagtgagactccacctcaaaaaaaaaaaaaaaaaaaaaattaggtctcttttgctacaagggagggaaggcagaaaaagtatgccagattcagggaataaaaagtgttaagaaatatcatagtgttatatcccattatcaaaaatcctacaattagggttcaaaattcaccttcagaaatttaataaaaagactcaaatgtcaccaagtgctttatgtatgattattggcaaaatatttgtctgttagctatacttatactgttttgtaaaagcaaaaaaaaagaacttaaaagacaggatgaaataaccattcagaagcagaattatagaagctaattattaaaataactcagcattatatccagacctctagctgagcagatatcaaaggcaaatcagtaaatattctaaaatgactgctctgtaatgtatatgattaaaacaaactgtgctaaaaattaagaaaattcacattgcttcagaaatttcacattcacttgtctccgtaattcaataaaaataaaataaatggtttttcagaacagccaccatcaggaatgtgacgtttgatcatttctccgccctgctgtgagcaatgaggtaaaggtagattttttattcacaccactctgcatcctcatgggtaagtgaggctgtcggcatgtcccgtgacttaattatgtggtggccctgctggaggtgtgcttgcttaccgtaaacagacgcaaatatctcaaaactacccctgatttacaagaaaaacgttcaagtttaagccagtctttaacacaaaagaacatctttagaacaattgtgaaaaaaatcagacttccttctttgctttgcgtcacggggcctttgtctaaccaggggctgaggagatgcagggacactggtgacagggagggaggggccctgagagcaggcactgaaacaaacctgctcttcccattttttaaaaaacccttcggaataatttaaatgagctcccacccaaattaaattgccttgaggttttccctccaaggcttttggcattataaataccccctgactttggcctgccatgtttcctccatcaatcacggagtagcctagaattaaattgaaatgattggatcaagaaaaatcaaatgttttaacatttagtttcagtaatgtgattacgaaccttttagtgatattgtaattactctgaagctttgagcatatgtttctactgagagcatttcatggagaaaagctgcattagggaaacaagtaaatacagaccccaatgaagcaaaagtgcatttgttgtaaagttaaaagctaaaggtggaaaagagacaaagcatctacgtaatttacaccctaaacctgctgcatagagtaaccacttttaaaaatctctacttcttccaaaattcaaataatttaagcacttccctctaagggcaagcattaaggaagcagtaagaagaaacaacagtaaaggacaagggaaaaaaagaagaaaggaaaaagtcatcgtccttgtgctaggtatttgcatggaaaagatgacagacaaagctctctctcttaaaattaatgaaccatctcctcagatacttaattttcaccaaagtcaaggcatatagttacttcccctatttgttaatttttttctcccatctcaacacctgatgggattctgctaggctaggagccccaaagataaatgaagtggggccccaccccaaaggttaatatcaaaagagactggattcctcaagggacatggaagaagacaaaccggaggcaaggacaaaggtcttctctcctttgaatcacactttcatttaggcaacaattatttattaagtatgagcacgcttattccctcaagaataaggcaggtaagtaaagatacactataaagatggaatgaaattcggtttttaaagtttagaggaaaataactctgtcaagacagtctgaagtacacaaaccttttgaagggtttgtttcttctgattatattaaagtacagctaattgccctaatagtttaaagatcctaagtgggaagctgtgtaatagctccaagtgcttaatttggctactggcaattttattttatatttcaaatttgaattcacatctcactttcagcgacaagacacagccacttcctactgccttagagttcctagcattaagattgagcggttcctcattactcagagcaaaacctgaattctccagtatggcatggaaaactgcactgagctggtcctgacaccctaatctatcatcacctcccactccatgctccctgtactccatcccgtcaactactcatccttcccaacacagcctctgctaacaagcctgccatcttgctggggccagcctctctgtttcaaacgcgctttctttcttggcctgctcaggagtccagtctgttgttaagatccagctcaaataaattccacctctgctgaaggttcccctgctttatcacacaatgaagcgtacctccatgataacatctattattgtcaatggttactttccatgtgtacacagcatcttcactaactgtgacttcctcatttagatacgcacgcctagtgcctatcataaatcctataatttaaggtgtcaataaatatttgccgaatttaacattttcttttttcagcaaaaaataaatgttttcttctttaaaaaccaaattctgcattcatctatttaaaaaatttattccatattagagtttctcctaactgtactaacaatgtataagggaatattttccaaatgtttctgttaaaactgcctcaagaaaccaaattctatgctgacatctgtgagaaattacaagatttcgctctttcgtccttctcaacttaataatttaaaattctaactgtataattttcaaccaacccatattagttattatttacaaaggacaggacaatgttaaactattccagggagcatgaagtgtctaacgctcatagggaactgtcaaatcagaaagcaatatacacataatggttatttgcttccactttgcctgatcatctgttatgtgaagtggtatctcctgtccaaagcataacaaaacttccccttctctacaggatacaaattagcaacctggtacatatcaaattacccagctgcaatgcactatgggagtccaggagaatattcacaccttcttttgccacctgagaaaactaccttgaaaagtgagttatgtccttggctagcttcatcaactagtccatacaccctacccgcctgcgcgcgcgcgcacgcacacacacacgcgcacacacacacacacacacacagactcctcatgtgtaacactactgcattacctttaagtgacctcacaataggcaaaaatcaagttgtagctctctgtcattcttccttcataaggaagtacctaaccatacgttcaaatggtgaagcattactggtaactgtggtggctgaataatgcctccttgtccctgaaacctacgactgtttcccgatatgacaaaagggactttgcagatgtgattaaggatctggagacgaagaggctatcctggtggctcctgaatgtaaccccatgtgttcttttaagaggaaggcagagcaagatttgatggcagtaaaggagaaggcaatgtgaccacagcagcagagactggagtgatgtggccaggagccaaggaatgccagcagcctccagaagtgaaagaggagtctccacaggagcttctattaatggaaggggctagcccagcgaacaccttgattttagtcccttttagtcactttggggctgggcacagtggctcacacctgtaatctgacaactttgggagactgaggtgggaagatgacttgagcccaagagttcaagactagtctgggcaacatagcaagatcctgtctctacaaaaaataaaaaataaaaaaattagccaggcaggttggcatgcacctatagtcccagctattcgggaagttgagcccaggaattcaaggttgcagtgagctgtgtttgtgccactgcactccagtctgagtgacagagggagatcttgtctcaaaaaaaaaaaaaaaaaaaagtcattttggactttgggcctccagaactgtaagaaaataaatttgtgtttaaaagtcactaaacttgtggtaattcgttacagcaacaacaggaactacacaaaaactaatacagtaatctggccatgccccgatagtgtataatattaaagaaagtgaaattatggttctaatgtttgttttcctgaaaacactacttttatgaccagaacatgagcatagtatgctaccattgaaaatttatctgacataatttgacacaaaagtagaatccgttttaaatgtattaccacaatgcatttgtcctgaagattgtgtttataacacattgcttttcagtatttccaaaacattatacgcttaacgctgaagatctgaaaaacacaatcataataaaagaaaacatcccacaacccaaagatataatttgccggtatacttcctgatatttttacatatacaaatggcccctaatgctatctagtttccagttatggtaactaaatggtcacattaacactttttaaaaaagatctttcccaattattaagaactcacacatatttgtccatcttagatcacttaatcatcctatcatcactgttttaagacaaaaaaaatcttattacttctaggaacttcatctcaaatagcatccccatcccctctctgactgactttacctgtataacttgcattctattaagcataagatgattaaattggctgcaaaagccagaagggacttttaatgaatttacacactaagaattgtgacaactatgtcttgatccaatatgaaagtttcttagatgttgaatctccattaaaaattattccagaggccaggcgcggtggctcatgcctgtaatctcagcactttgggaggccgagacaggtggatcacgaggtcaggagatcgagaccatcctgactaacacggtgataccccgtctatactaaaaatacaaaaaaaattagctgggcatggtggcaggcgcctgtagtcccagctactcgggaggctgaggcaggagaatggcgtgaacctgggaggcggagcttacagtgagccgcgatcacgccactgcactccagcctgggcaacacagcaagactccgtctcaaaaaaaaaaaaatttattccagaactgtcccccacaaaacaaaatagagttctaaaatgggcaacaatgcccagaaattgccagaacataaaaaacaagcacagagacttggtataaaactcaagacactgagaataagattatttggtgacttctttgaaatcaagatgatataaaagtcaatacctatgtcagaagctctgcatgtagtgagacacggcagatgccacacacacatacacacacacacacacgagaaagggacaatgaataatggagaaaactctagagagggacaaaaggaagaaattccaattccaatcataggttgagcatctcacagattcctaaatgaacaagagtggaaagcccacaacagatctctacgaaatatcactctctgtatcatatgattatgtctaaattgactgcccaataaaacacatatacttcccatctgatcctatgaattcagacatattcatgtaaaaacgtctttatatattgtcacatgtaattatacaaatttggtgaatatcaactggatcatgcagtctacatttgtctgtggtcaggagcccagagaagcagcacctcagagaacatgacctcacttgtgcttaaatctgtacctctcacactctgggaactcaccagagagctataaaggactttcaggagaaaggaggtcgaatttcaagggtggagagaagacccagggcacagggaatattattcttaaatctgtctaattctccaaggagcaaacctaacttgcccccatcctctagctgcccagagttcatcattcctcaattttgtttcaatggaaaaaaaaaattgtaatcaggactggatttgcctggaaggaaaatgcagagccagagactacaaagatttccattgcagacaattcccaatctagggaatgtctccagtaggagctgtggtgaagcctggtctgttccggtcaggccactcctgtgataaccctcagaaacattacaacccacagtcaagccctgtggcaacaagtaaggaagaaattcacctgttgttcagacaacagctgctcctttgagctgaagaatgaaatattaaattccagcttctgagaaaatcaaggaatgtgggtaagaaaaaaatgaggggacagaaaagagggagtgcaggtagatgtcaaaaaaaaaaaaaaaaaaaaaaaaactaaaggttgacctcagaaacacagatattacaaatgttccttcctatttctccattttattaatacgagcaagtttcaggtgtctacttcctatcatttcatgatctggaaaatggatctactctgcgggtacaataagctttaaaaatgactacgcagttacagagggcttcatcacaagatcttatttatgcactgaaactccaaaaatatctcacaataggagtaactggcgtattcaacaattatgtaaataaataataaaaagtctcaatcaggacaccaatattaactccctaatcaccaattttccccctcatttgatgagggtaggagtagagatgtgcaaaatgggtgaggctgctaactattgaacattctctcctccaaagttaagggctctcatgtgaaactttatgggggcctctgttcaggtcttacagtaaaagtaaattggagagaatcatcaagaagccatcaatactcttaaaaatacacacatctgtccatagatggtctttttttttttttttttttttttgagacggagtctcgctctgtcgcccaggccggactgcggactgcagtggcgcaatctcggctcactgcaagctccgcttcccgggttcacgccattctcctgcctcagcctcccgagtagctgggactacaggcgcccgccaccgcgcccggctaattttttgtatttttagtagagacggggtttcaccttgttagccaggatggtctcgatctcctgacctcatgatccacccgcctcggcctcccaaggtgctgggattacaggcgtgagccaccgcgcccggcccatagatggtcttaatatgtgcctaggtatatgagtcatgcagatatctaagaggaagaaactattctgcactattctgggtgacacgatatccacagctctgatgacattgttctctccacacagagaagaaactataaatagaaccctaagcatcatgttccacatatcaaagaaggagatacaaactatttttggaatacaaataaagctttagtaacatgaaataaaacacctgtcaataagagacattaatctattctacaaaaataagaactttttaaaaagaaatatggcctttaatcagagatgatgtaatgacatatcaaatcaatgtcaacaccctgagaaaagccatctcctactgcacaattaccctgccattctcagtcgaagactgtcctctattaaacattatctggacttctttcctttgttttatggagtgagtttataaacgcttgttctccgtaactagtgatttcaagtattctgttttatctaagaagtacaatgaaggtcatgagaagtcctctattaacactttatctggacttgctggcactagtgtaactattttctacaacgttctatttcataactttctagtactgccacagacatctttctaaaatacaacctgttcataatgctcttttgtagataatggttcagtgactcctccctatcgccaactttaaacctacctccttgacaaagcttatctggtgtgcctgcagcctcaccagatacctttcattctattctcttctctcccctccatgcctgtctagaaggccgccttcacctagttaactcctacttgtcctgcaggaaaactggaatggctccactgggaaacagctggatcttccaagctctataggctgagttttccagtacttccttgtataaacctatattatgatacccacctttcaggtttgtaaatctttacttttctgtaccccttctagactatgaacaaggacctgatgaagggtagttactaaaatgttggctgactctaaaggaggtgctaattgcctcacactaaaaagagggtaagaggtgacatggaaaatttcacataaagttggtgccattggaactggatcttgagtgatgaacagtagttttgagatgttcaacagaaagaaagggcattcagatcaacgagaatcaaatgaacaaaagaaacatgaaaaatcacgtgttgcaggcatgtatgtgtgtgctgatatgtacatacatctttctaattactcttcttctgtggtggtgaaggtgcaatctataccaccaatataagcctaatcagcccaactaggccacaaacttattgggaagaaatggtcatttctatgtaccttccccacaggcaatatatagacaaatacaacctatgtgtacccatccctacccagcaccatctaatacatatggtataaagaaatgacactgaaataataatcataaatacctattcattcaaggaaaaaaggtttctatttggtgaaaaacagacatttgagttaatctgttaagagtcctaggtaattaggaaattactgggggaaaagaatcctattactgtaattccttttaaccaagattctatgctacaggatgaagtaaataagccagggaggtgagctgcaacataaatcagccgactgtcacatgagtctctttaatattacaaaattgagggagagaaaccattcagattactacgaagaaacatttaaaatgagctcattaaatgcaaattaaaacagaaacattgaataagcactgggctacaattaaaggctgcagaaacagcaggtaagaaacaattttcattgatcaaagaactaatagctaacagaataaagtattttgcattaaaactgctttcatgaatatgaagcatttcgaagtaagaactcttttttttgcatttttcaaagaaactttggaggtaggaatggatttacatatcttaatacaaagtactttcattgtatcattttcaggcaatgaaactatgaggtttcaaaaaatgcagacttcaaaaacatcctcagaaatagggccaaaattgtaaagggcaaagggtcattttagagcctttggacccaaggaagaactattatataattacataaaatcttctatgcaaaactttagtagagcctatttttgacacaattttacctcattataaacagaagctttggggtacttaggcatagagctggttttcatcaacttatcaaaatggcagggcaaagagcagtacacagtatattcaactagaaatataaattgagactttaaaattcactgcacacaagcttgaaaacaaatatgcagatgtgtagccaaatggtgaagtcggaatatacattcctgatggcaagggactttttctgttgtgttccctcgtttccctggcacctagagcagttaagggtacatagcaggtgctggaatcactggatctgcttttgcaaaactaacgcactataagatgagaatgagaagttttcttctaaattaatttgaaaagttaaaagatactgtttttcatctgtcaagacggcaaaaataaaaaatcttcgatggcacatgggaggaaatgggcactcttatacacactgaaagggagggcagggccaccaaggacagttgtgcagcttgtacactgaaaggcactacccctagggtgagagagaggtgggggaccggagatccaggaggcgttctgctagtgaaagctgagtcagtctcaggaaggacgtcttttggcaattttcagcccagaggggcagggcagctctttactaccatgttgtattagtggaggctttagataggcttgtaaaattgggcaacttattttggaaaaattttgaaatacctaggaaaatgtaaaatctacaaactctttaactcaaattgtcatacgatttttattttacatctatgcttacatgtgcaagtaaaaagatatggccacaaacacttctgacaacagttgtctgtaaacctaatgagtgcttatttattggtaaatattttcataattagtgtatcctataaaagactaggcaggaatcgctgtggagtggatctggacatgcagatatgtaaattctcaaagagatgctaagtgaaacaaggtatagaagagactatgttccaatgaatggtttttgtcaatcaaaaatcttcttaaaagtctaagacactgaatgtgtatttcaatactgacaacattgttgtatatataaccatgcactctaatatctgctgttactcaaatacctaaatccagttctacagaacatttagaacataccacaaatatccccactaacattccattttaaacacaaagaattgctcatttttaaaaaagtcaaaatatatttttaatagaggtaccaaaaattacatttttctaaattgaattcttttaagcttttctattctgctttatatcatcttgaagtccttctccacactttccacaaaggcacaatttttaaccgacttcaattaaattatgtttctgtagctgcctgggtcagggcattcaacacatcaatcacaatgcaggtgggaaatgtaagtacttttgaaacagtcctcatgccaataagggaatcttcggttttgagaaagtaaaaggaaggtacatgtcattagcagtgaggtcacagtcagtcctgtttactcctattctaccaggaaacccatctttacgtttctccttaaactaagccaggatttaaataaagtggcagaatattattcgcagtaaggttgaggcgggaaattaaagaacaataaaattaaaaagaaagagaaataagttttcctgttttaggctaacttgttccagaagcagcaacaggcacagcctagacccaggaaaagtcttgataatattatctaatatgctctggagactctctcagcactccctcaacacagggagaagaaaaacaaattttcctttgttttacagaatgagtttatagactcttgttctctgtaactagtgatttcaagtattctgttttatctaagtagtacaacgaaggtcataaaaagcctgagtaggcctgaactacagctgcctgggcaccacagagaaggttataggataagcctgtgcccaggcaaacctagaaaacgaacatctgggttgcttggcaatggtcatctgcaatcctgtctttgtcctgcctctgtatccctgctttcacgccactgtaagcttgcttcaagctagcccacctccgtttgtgaagtgtgtataaaagtcaagtactgtctttattctgggcccagtcttttggatgtgagtcagctgggcctgagtacactcaataaagattctcctgcttcaacctgaggtctccctcatactcccgaatcccgcaacaaggtgagtgtaatagttagagaaagcataggcctgaaaggagcaagctttgagaagcactcttacctttaacagaaaatcccagatacatactatttacattttagtgatcactggataaagtctataatgtctttcctggctctgaatttttgtcacaaaaacacaaaacccatcactccaaggcttccttttaatggttttcactttcacctacctttagcactgttcacgacacccaaatcccaaactgaccattcagatgtttactgaaatgtggctaatgaggctgggcgtggtggttcatgcctgtaatcccagcactttcagaggcgaatgcgggaggattgcttgagcccaggagtttgagaccagcctgggcaacattatgaaactccatctctacaaaaactataacaaaaaattggcaggcatggtggcacacacctgtagtcacagctactcaggaggctgagatgggaggatcacttgagcccaggagttggaggctgcagtgagctgtgatggtgccactgcactccggcctgggtgacagagacagaacctgtctcaaaaagaggaaaaaaaaaaaaaaaagacgtgtgtctaatttcagaattaggcaatgcaactagttgaatattttattgcacattgtccatgatcttatatgtaaggcacatttcctagggaaagcaggcatggatttaatcatttatgttgtactgcacacttatttgcactatgtaaaaccatggctggagtgagagaaataacacttttaaaaaccaaccttatattctccatgtcattaccagtaattgataactgtttaatcatcaactccaaagatatttcttccttattggaagaattccagataaaactaaacagaactgtccaaacacatttcatcctaataaagttatttatataatcacttattaggtcataacttataactgagtaatgttctttagatcttaagtgcttgtctttatatagctttacaataaatttgtttctcttaaaattatctgtgcactagattaagttaaattaaaataaaatgtatttaactgtcttcaaaataaggtataggctattttcttcctgtagactgacagcacagatattggaaaatctcttctacttggttttctgattcagttcaaacttgtgcttgcaagtgaatcttacgtaaatgtcacctaaaaagagctcaagaagactcataaaaaatatttttttcgtaatttgattaactttcaagtcattcaccaaaagtcagaccatgctagaaagggaagaaaagttggacaacattcttgttttaccacaaagaccatgccagttagctggcttgattctcccactgatggggagaatgtttacattttaacaataacttcacaaataaacagatgtaagaagtgttttcagtgcataaagatcatatactttataaatccacctctcatctttcttctggacagaccacatctgacttcgaacgtacttactgcaatcaaaagtgttttgtaaaggaccctcctcaggaataaacaagctcactaaaccctccatacataacctggagaaacctccacaataatgaaaccccatctagcactgtttttcaaacatatggtgcatttccattaattttcagggatagcccctaaagtaacttttggctcaacaaccctggaagagaggacctttgctcatcttacacatcaagtgttcatgaacaactctgatgccactaagtttcgttcacaaacttgcacctcggtcgttcttttacaaaaaaaaaaaagaaaggttattttgcaaaaggcaatagatttaatcttggctactatttactcttaatgtttctttcatctcagccctccaatgagaagtttaaaaggaaacatccgagggagcaagtttagatctatctggaggagtttctgtggagccagccaccctcaccaggtgccttccattagagtttaatgctttgctgcggtttcctgaaagagccccacagagagtgggtctcgatgggtcctgaaccgcaccacaaccggccagtgaggtgaggggcgaaggtgaggggcggcggcggggcgaaggtgaggggcggcggcggggagaaggcttcgggaccccacacggtccgggggaccgcgaacgaggagcgggggtgcggggccgcctggcgtccccgtcgaggcggtcttcatgagaacgctcagagcaggggcgggcaggcgagggcttcgaacgcacacactggggccccggacccgcgtcgctgagctggggagcccggcggcgcgggccggggacggcacgggcactttggccccgtcattgacagttggcaccgggggtcctggtcggccgaggcggggcgtggcgccataccggggcgtggggcggcgcagagaggctgtacctggcaggtacccacgtacctatcatggtcactgggtaggtggcggctgcgggccaggaacaggcccatgcgcgcagcggcgccagccgcgcctcccaccagcggctctcctgggttaaatcctccaggcctccccgcccccgcgcccggccctaggaatgcgcacgcgcggagggcgcggcccagggcctgctgggagtcgtagttctaacgcgtagtttctcctcacgcctcctgcccccagccccccaccgccgccctttccggcttcaggcccagcaatcttacgtcaccggggggcggggctatgcgcccgccgtgttgaccagtcgcttagcaaccgggaggcttacctttggaagcttgttgcagctctagccaaggtcctgccctcttcccgccccgcccctagggtccagctcccttcacctaggagctgccaaacatctggatcaacctgggcactacgaggggttgaatttctaccattatcgcgccttttgatatttttttccagacctcctgctcacatccgtaaagcccactgattcttttactacactttttatgagaacaagacattttctaggaagatggtggcagaaaaagagaccctgagcttaaacaaatgcccagacaagatgccgaagaggaccaagctgctggcacaacagccgctcccggtgcaccagcctcactctctggtttctgagggtttcacagtcaaagccatgatgaaaaactcagtcgtaagtgatcttcctgaattaaatgcactcgctctgaatcaggggacacgagatttacagaggttggccagccttaggatggactctgagccatgtcctgggtggtctttgccaaaaaaggcagttacttggcaagtagcaaacggtgccccacagtgtgtggggggcaggctaggttgttagaatcttgggcaagtgatgtactctgcccatttataagcaccttcctgataacttatggtttctggaccgcccaaaattactcttaagctatttacacgaggaaaaaagatcccctttacttactaattcctaactagccccactcagcaaagggccttatagaaggtgagttcttagaaatcataaactcttgcaaaatttaacatgagctgatatacaaccgggaacataaactcatgaaataatctataatgagaaatttcttcacttcaacctaggaaattttagaatatcctagcatttgctctaacaacacttgtctcttacaaaatgatgtcatcttcttagagtactgaaagccaacttaatatgaacactgtttcctgacaggccttttaagatgatgtgctttaaacaatacaagctttagctcatatatctctgctactaatacaattcatatttcatctctattatttgtagtaataaaaataaaatattctaagtatcattagagaaaaaagattaaaaatatatacaaatattttagctgtctgcatgatagtatatattttttaaaccttcctatttgttaaatagctttacacttggtatgctaagacagattttgctactgagtaagcaactgtctgggaatgaggcattaaataataaatgcatctttcaaatttgtgtaatttacaccctgggaagatctgagttattac

SEQ ID NO: 487 - DNA, 172029 bp, Homo sapiens
  source 1..172029: mol_type = genomic DNA
atggtggctgtgggcaagggagctctcttgggcctctttataagggcactaatcccattcatgagggctccacactcatgacctaatcaccccccataggtcccacctccaaataccatcacctgggggtgaagatttcagcatatgaatttgtgggggacgcatacactcagaccgtagcgcaagttggggacaaaagctctgagtgtcagcagggttgcactggcttggaaatgctggaaatctggaaatttccagatcaggcatcacaaactgcatgatctagggctcacattgcattaacaatgttgtgtttggtccacagtgtttcaaaattggaaaactcgacataaaaaatccagccttctggcttttctttaaaaatgtgcaggcccaaccatgctgtttccacctttctgcattgcagtatttggctgaggctgagccctggctgccctctgaagactggtgtgagctttcaaatccccacagttcccgccacacactgttgcatcacagtgggccctctccacacatttgtcacctgtctcatacttgagaatatttattagtgcccaattccttcagggacctaacagggtgaacttaggccatagtaggtaacagggctaaatacagacacttgggatcctggctttccagccatccccataccatctcctcatgagtacaagcaagtttcaggtgtaatgtgggcatctaatttgtgatttgtggttcttgatcacttttatgggccagccactgttctaagagttttgcatatattaattcatttaatcctcctaggaacccaatcataatcccggtttacagatgggaaaactaacacccagagaaaacacttgctcacagtccatgggtaatagttgcagagtcagaatttgaagtcaggagcgaatgaggtcattttgcaaggttgctcatgacctagtgtctggttcattatgggggttcagtgggtgcaagctttataatattcatctagtcttgccaactgctgctaacgtgctgcatggctgaggtttagtcccagccagatgtcccatcacaaaagttaggcattgaagtggatgacatttgtgtttagagaaatgatatgtctcattcttttcagctctaacttggggtaagtttctgaaagcaagtaagagaaaaggagagggacatttgtgatctctcatgtatagaagactaacaaagaggcaggtggtcacacctgaaggcacgtcccctgacccttattacataatgccatgggctaaatgtccaaaattcctctcccagctctgattggcctggctactatgatgagtgaagtccaccagggaagacactgtggcctcgtttctcatcctcctgtccccaggagtaacacagaagcagctagtaacacaacagcattgtcctcacatacacaggcctgctttgtttccccaccacacagagcagccgctgtaacaatggccccgaatgacactttaccctcctttctccaatgttgcacttgtttttttagtctggaatgggctaaacaatgatttcctgcagggggtatcagctttttatattttctgcctgcttctctgtcagtcttcaggccccaggtcagtgagtggcaagccaggcccagagatctctgcgcccgttggaacatccccttctcgggaggctggaaggccatggtcattcacctctccccagcaaggtgggacctgccctggaagaagaaaccagaccaggtaacacaagagagacaatgagagcttggggctagggggtggggttgcaggggatggctgagtatccagcccaaggaggatgggtttctggcttcaagacatccgattttcttgaaagccaccatctgctgttaaataaataatgaaaagcaacagaggtcaagttcagcagcctcccagttagaaaaataccctctgtctgtctggccctgttcagtgcctctgatatctctgggtgaccagggtcttcatggcccatgtagatttactgaggtggctgttgccttaataatagctgctagtactaagctctttctctatgtattgcatatgtatacctattactgtatgtctctcattgaatgaatagtaatgatagcaaacccttatacaacatgcctcagattcttgcttctttcaaacccagggagtcgggttctagaatctgcgcttttcgtcatcatgccccttgtaaagcatttttttttacaacatcctgctaataaaccaaggtcatcacaatatttcactttgagaggcaatgatatatgatgatagctatgtgtattgtgagtcctttgccctgtgccaggcagcattctaactgttttgcagctatttcatcagatagatactttatgatctctattttatggatgaggaaattgaagtacggataatttaagtcattcacccggggtcacacagttgttaaatggcagagcctggatttgaattcagttttctcttaagtagtatgggaatcttagacccgcccagccctgctggtctggagttattctgcttctctaggtcatggtgtatagagggtgacattcagtttctggcttcatagaacatctgcacccaagttgacagcttaaggaattttttcgtttgtttattttaaatgatttttctattggcatcagcttttgtcttgcttgaagaagatggaattgctcaatgacgacagtgaaggaatttgaaagggtaagaattgctcaatgagtggtatctcttttttggccagagaccaggctaagttgcctcatatgtaagagaacatacgtcaaatacacaggactcatggtatattatggaagcaaactttatttttgcctatcattgtccctaatttttttcagcaggtcctccctcttcccttgccctgggatgaaaattaaggtaggtccacaactcttatgggcccccttcaggaatcaaaagttcttaagtcgcttttagttccagcacagcctcattcagcaattgggatgtccagtcccagggaatcagccagatctttgaatttggttcccagtggagacttttctccctcctccagtggggcctgcagcttggaaagggggtctgtggttggcttctcatttcccacgttaagcttccatccttctctcctctggcttactgatgattctgactcctggcagggggaaggggaaaagagaagaggcaggaaaggagctggaagtccgtacttggttaatgctgtggcaagctggcatttcagtggcaggttctggtgggtgtgtaaacctagttctttctctctaggcacaatcttgtggatacttcagagagcaccattatttctcatctttggggatctctgagttgctggtcccttgaagctggttgcctaataagactccttccttagttccctggcatctaagcagtgccgtattagtttgctgggactgccatgacaaaatatcacagactgaggggcttaaaccagcagtccccaatttttttggtaccagagaccagttttgtagatgacacttttttccacagaccagggtagggatggtttcaggatgattcaagtgcattacatttattgagaaccttatttatattattattacattgtaatatataatgaaataattacacaattcaccacagtgtagaatcagtgggagccctaaacttgttttcctccaattagacagtcccatatgggggtgatgggaaccagtgacagatcatcaggcattagattctcataaggagcatgcaaactagacccctcacatgcgcagttcacaatagggtttgtgctcctatgagaatctaatgctgctgctgatctgacaggaggtggagctcaggtggtaatgtgaatgattgggagcagctgtaaatatggatgaagcttcgtgctctctctgtccctgctgtgtggcctggttcctaacagaccacagaccagtactggtccatggcccgggagttgggggccccgggcttaaacaacagaacttaattttctcccagttctggaggttaaaagtccaagatcaaggtgttggaaggtttgttttctcctgaggtctctgtccttggcttgtggatggccaccttctcactgagttctcacatggtctttcctctgtgtgtgcattcctggtgtctcttggcatgtgcaaatgtcctcttcttataaggacagcagtcagagaggattaaggcctaccctaaggggttcattttaacttaatcacatttttaaaggtcctgcttctaaatgcagtcacattctaaggtcctgggggttagggcttcatcatataaattttgggaggatagttgaggccacaacaagtgctgtcagcttttctctgaaggtaaatttccattcctcctggtggtccttgtcagaaggacctacacatcccagaggttggccacagtacatctctggcttatggaaaatgctcgtttcattatcccaggaaatccaaagctaccacgttctctccactccagctgatcactccatctctcttgtattttgggattcacagacatgattcagacatcagccctcagtgacagtcaacctccagggacacagcatcttggaggccaatcttggagggtgggtagtgggcaattgggacttggagtgctcctattgctttctccaaaattcctcctctacaccaccaactgttcttctcacccagctttctttgtgggctgaagatggtcagttaagagggaaaccagtttcgtgccacttcttttgtcagccctgcatgatggcctcagtgtcacagctcactttgaaacatgtcttttgtccttggcaatacctgaactgagaccatagtcatttttacatcctgctacacaaatagcatctcatttagttttcataaagaaccctaggagttcttctgcatatggaagaggaatctggagctcagaaaggttaacgaattcacccaaaagagattattcagcgagtggcggggaggggagtagagattcaagctttaacccacttcattatttacttctctgggccttcatcatccaggcttcttagagcttttacctactggagtttggtctgtgctgctaaaatgttttcttcttagcagaaaactataaaggtaaacaacaacaacaacaacaacgacaaacacttcatcgctgcttgcaccacttgtgatgcaggggctggcaacaggagtgacaggtgcatcaggagctttcttaagtatgttgtgagatgagctctgtgtacccaggaaagtctttgactgcttgaaagtcctccatccctgccccactataatttaatcagcagaataatgaagtacaagtgaaatatcttttttttttgtagaaatgcataaaagcaattctgttagtctgttttgtgttgctgtaaaggaatacctgagactgggtaatttttaaagaaaagaggtttatttggctcacgtttctgcaggctgtacaagcatggcacttgcatctgctcagcttttggtgaggcctcagggagttttactcatggcagaaggtgaggggggagcatgtcacacggtgagaaagggtgcaagagagtgccaggctctttttaaatgaccagctttcttgtgaacttacagggtaagaactcactccattatcaccagggcagcaccaagtcattcatgaaagatctgcccccgtgacccaaacatgtcccactagaccccacctccaatgctggcaatctcatttcaacatgagatttagaggagacaaacattcaaactatatcagcaatattgcattctgagaattttattcaaggcagaaggggccatatcatctcaccttctagctcccaggaggtacttaacctaaagatgacttccgaatatgaagctatttaaaagaaaaaaaaaatcctcttttttgtttagatttttaattattttctttacaaataaagaagcccaagcctgtcattgcccattcttccttaggaaagggaaagctacatatgggcctggcagtggttcagaggctgcctgccaaggctgtgtcaggttcatctggcagccgtgcagagctgggctgggctgggccgggctgaagttggggcccagggcacaggcctgggatgggctggagctgcagctgtctccgtccagtgaggaaggggaggatgatatttctgttcacccactcagcaattatttaacaaacatttattgtgcccaagacttttgtgggctctctgccaggaaagggcaggtcattgaatgggccctgggaaaaatgatgtctgagcttctctccagttctcagagaaaggtaaagcactggaagcgggcgattcagggagagggcatggaggcatggaaaagcatggtgtgcttggagatctatggatggttttgaactgctcaagcacaggccggggtcaagggagggcaggggtcagaagagggaggaggaagaaggtggaggagcttccaaattggaacttggtaggcaggttgggccctgggagggccacagaagggtctgaagcagagttgtgaccagagtgggtttgtcttttagagggaactctgaggcaggacggggacacacttgagcatcagaggcgtcaaggctcagggagaggggtgagggaagatgaagggcagaaccgaagccctggctgagatcatgggaatggggaggggttaagctggagagagtggcagccacctgagggaggggttggtctagaatgtctttcaggtttctgacttgaactacagaagggatgctatgccatgatgggtcagtgtgtgtgtagggggccgaggacccttcccagctggaggaagtggggcatggggggtcggggtgttgtcctttcttttaataaacatacggaggggctgccctgagctgcgtgctgggagaggagagcagaggggacaccttccattccttacagagcccttgggccaatgaaagagcaattcaaatgcaatggagcaggaagaccctaagagagaattggaaaatgactgggaaaatttgaatgtagaccaagcattcagtgatattagagaattattaattttttaaggtgtgatgaaattattgtgttttaggtgggagaataccccctcatctttttttcttttggggagatgcaagctggaatatttaggagtgaaatatcatgatgtctgtaatttacttggaaacaaataaatacagagggagagaaggagagacagaaagagaatgtgcaaatatggcaaaacgttaccaattgttgggagtatatgggagtttactgtactgttattgcactgtgcttttggcttttctgtgtgaaatattttgtagtaaaaactggaaaatacaaagtagcaagcgcattgatgggaggtaagggtaccacaggaacacaatgaatggcctctaatcagaatttgatgcatgagggatgcttctaaagaaaacagcatctaagacctgaggaagagtgatccttgaagcggggatggggaagaattttggggagaatgtactaggcagagagggaacagcctgtgtgtaggcctgctggcctgtcttgctagaggaacaaaaagacatttaacgtgagtgtcaaatgtgaagcagagtcaccaagagatgggaagagaaaggtaggcaggtcctatagagtcttataagtttggactctgtcccaaccacagcataactaggggggcttcatttcagaaagatgctggctcagctgggtgcgggggctcacacctgttatcccagcactttgggaggccaaggcaggcagatcacctgagctcaggagttcgagaccagcctaggcaacatggcgaaaacccatctctactaaacatacaaaaaattagctgggcatggtggcgggcacctgtaatcccagctactcgggaggctgaggcacgagaatcgcttgagcctgggaggtggagcttgcagttaggtggaggttgcagtgcactgcactctagcctgggtgacggagcgagactctgtctcaaaataaaaataaaaataaaaaagaaagatgctggctcacgtgtgtgcagttgctaggatctggcagcccctgttttaagcacttcatctatatgagttcgcctaatcctcaccatgactttatcaaggatgtgcagattagcacctctatttatgagagaagccagccaaggcacagaagagtgaagtcacctgctcaaggtcacatatctggaagagtcaggattcgagcccaggcatcctggctccagagcccacgctgccctaatcgcaaggcaacactgcctcttgagtttagtctctctgtgtggagaaggaagtggagggaagcaggactcttcctcaagacaggaagacagcttaggaagcaaccgtacacatccagactcaaggtgatggtgacttgaactaaaacaataacagtggtgatggagagaaatagatgtaatagaaagttattttggagtgaaatctataggacttggtacttgaacagttgtgtcagggaagtcaaagacaatgcccaatccataccccactgaacacctagctctgtgccttcttggcaggagaaaagggctagagtaagagaatgtggagataccttgctcataaaaaaatcgagaagacattatcagaaccataacatccccttcaactgtgaggagcagactgttgtccacccaacctacatatctctttcctggcttccactaatcctcacttttggtgcaacttgccattttcactgtttgaattttttaatctgcacctgttataaaatagagatcattcctttatcctgacttgactggaaaaacagagtcaaaccacagctcctggtcccttccctaattgtctctcaactcactaacctgccattagccttgagtgatgtgacgtatgcacctgtctgtgtttcacaagaagcccttgatccttgggcctcttcagagggcttaactggaatgaaaaattaaacaaatattgaaaaaacaatagaacgaacaatacatggtcatgtccctctaatccttattgatttttaagatcttctcaggcatgaaaacaagattcactgctagcaacccaacattggatttctgttaactgaaagagtggcttattgatcagggtgggatgtccagcagggcaggagcaggcctgtgtctgccccaccagctaatcaaccccaattcaaccctaagaggtggagctcagttgggtgagagctgcactcacttgaaatgagggacactgtggcccaggagggtcctcgcagcatcctcagaagagactgaggccattcctcagttatataccaactctctggggacctcatctttttcttgctaaaggcctcaagaattcctcattatttttttctgtgtcaaaaataatataactactacatgaattcatgtgtagaggacatggatctgcagaataaaatgggttcatctacatatgttcctgcctttcattcctctgtctcaaggaattgttcatttaacaacagattcagctgttattctatgctgtttgaaggttggcaatacagccattcaccatataccaaatggcaaaaatccctgctctcatggagcttttattttaggggatattgtgaacagtttggtgaggagccttccaatccatatatgtattaatacaaacaggtttgtgctgtacatatgattctgtggctggcttttttcactaacaacatgtcttggagctcattctgtgtcagcatgaatggtccttcctcattctttgatagttgcataatggttctctgcagggataaacccctgctagtaaacatacagttataatttttgttttcacaaatagtgttgcagcgaacttccttctgcatgtactgttgtacacacacaattttggacacttactaagccatgatatataaattaattaccctctctgtgcctcagtttcctcatctgtacattgaaagtcatggtaataatctccctctagccatcagggaaaagcaaatgaaaaccatgatgagacgcactttacactcactgggatggatataatttttaaaaatagatgacaagtgtgggagaagatgtggagaaattggaatcctcatgtgctgctggtgggaatataaaatgatgcagctgctttgcaaacagtctgtgcattccccaaaaggttaacacagagttacaatttaacccagcaattccactcataggtatatactcaagagaaataaaaacacatgttgccacaaaaattcgtttagaaatgttcatagcagcattattcataatagccaaaaggtggaaacaacccaactgttcatcaactaatgaagagataaataaaatttggcatattcacacacaggaatattatgtcacattaaaaagatatgaagtactgatacaggatccaacatggatgacctttgaaacactatgctaagtgcaagaagtcagtcataaaaagctacatattatatgattccatttatatgaaaggtccagaattgccaaatgtataatgacagaaagtagataagtggtttttaggggctggggttgagtgggaagggaggaaatggagagtgactgttaatgggtatgaagtttcctttttggggtgataaaagtgttctaaaatttgctgtggtgatggttgtacctatctgtgaatatactaaaagccattgaattgtatactttaaatggttgaattgtatggtaggttctatggtctgaatatttacgtccccctgaaattcatcttttgaaaccgaattactaatgtgatgacgttttggaagtgattaggtcataagggtggggccctcctgaatgagatttttgccattactgaaaaggctggagagagacccttcaccccttccatcgtgaggatacagcaagaaggcaccgtctataaaccagaaagtgggccctcaatagacactgaatctgccggtgctttgatctaggacttcccagcctccaaaactgtaagaaacaaatttctgttgttgataagccattcagtttatggcgttttgttatagcagtttaaatggactgagttagtatatgaattatatttcaataaagctgttattaagtaaagtaaggttgctgtgaggactgactgaattacataagatgtgtataaaggtgctggcactttgtctttttgggcctagcttatgtcacttagccaggaatctcctttcaaatgacaggatctcattcttttttatggctgaatagtactccattatgtatatgtaccatattttctttttttaattattacactttaagttctagggtacatgtgcacaacgcgcaggtttgatacataggtatacatgtgccatgttgctttgctgcacccatcaactcatcatttacattaggtatttctcctatccctcccccagccccccatcctggtgtgtgatgttccctgccctgtgtccaagtgatctcattgttcaattcccacctattgttcaaaacccacatgtggtgtttggttttctgtccttgtgatagtttgctgagcatgatggtttccggcttcatctatgtccctgcaaaggacatgaactcatccttttttatggctgcatagtatttcatggtgtatatatgccacattttcttaatccagtctgtcattgatggacatttgggttggtcccaagtctttgctttgtgagtagtgggtgctggcactttgaatctatgtacctactaccttcgttgttgcttccaggggatggatttctagaagcggaattgctgagtgaaaggggaggtgcattattattattttttaatgatcttgcaaagttgccttctaataaaggctttaccaatgcaccctccaagaagcagtgcatgaggataccagttttttcctgtttccttttccttttcatagcaaccaccaccaaaaaagtctgaaagaatacacacaagtgttcatagtgatttcattgggtaatgggatcaggtgtcaacttcctcttccttttcctgtattgtttatctctattttctcatagtgctaaaaaaaagaacatgtaatagttgtataatgtttaaaaaataaaagcaccccccacatctcttctccttgaggctcctacccattcacagggttggtagtgatgactacaaaagaccctgattgccacaccctaaaaaggacaggagcccttcccattgtgatggtttttgttgtaaatttctagaagaaacggccagggggcgacaaatctaaacatgaaggaagtgcagaaactgcagttatttccccagaactgtactttcttgctagaaggcaccaaaaagccctgtaataaaatcatgctgtgagatatttcccccttcccagctactagacacaacaagtttgcaaatgcttcatatgccttgtcattcactcctcacaattccatgacagaggtactggcgcaaaaatgaagttaaggaaattaagcagcttactcaaaggcagactgctaggaagtggcagaggtagatactgttaagacgctttcaacttcaagtcaagagtcatcaacaaggatattttattatctcatttaaaaatgaggacatagggcaagcttcaggggaggttgattcagcagctcagcaatgtcctcagggtgcctcttctttccacctctctgctctgccatcttcctgttgcctacatcctcaggcagaaatagggcactagcaatgacatctagaatagcagaaggccaagccaatgcaccctcccagaagtagtgcatgaggataccagtttttcccctttcctttccttctgaaagcagccaccaacaaaaaaatctgaaagaatacgcacaaatgttcgcagtgatttctgtgggcgatgggatcaggtgtgaacttcttcttccttttcttgtattgcttatctctattttctcacagtgctaaaaaagaacatgtaataattgtgtaatgttgaaaaaataaaagtactccccacatttccctttgctacgtccaggggaagaagagagggacagtttattcctagagttttctccttggaatgatgaaatttttcttgaaatctctttcttttttccagcaaactttcccccacaggcacactgtatgtctcactggcccaatctaggtcacttacctacttgggaaccaatcattggcaaggtgaatggaattccctctcagtctgtccctggggtttgtgctggaggtgggtcattgtcccctgagggggaacatttcctgagaaaaattgggattttattaggaagaaagaggggaaatggatgttgtagagttgaaaggaagaaccaatgtatccagcattggtagagactcaaacatgcaattgtgaaactcagtagcctgtttatagctgctgtgccattctgtgtctttgccaagacttccattgctagaaattgattattgaggatggagaatataagtcgtccacatctgctctttctctctatcttcaggccccaatcctcaaagaaaggggatttgaaagtttggtttgaggcaggtttttagaagtgaagtagttgatttttgaaatgccatggtctccactagataatttctaccttgctgtctctagcctggaagagtgccattacacattccccctgggtgtctcaggaaaggtcactttgggatggtctcctcctcgcagcttatgggactaacttgattaatagtattgcattttagatttagaggactttggaaagacctgcttgacctcccttcgtgggaatcacaattttagctgatgtgatagattgaggtattgttcagtaaatcttcactcatttcccttccaccttgggacacagtacacttcctgagtcactgactctgggcttgggcattgacttgttctggtcaatggaatgtgatcagatatgactctatcagaggctttaaataatgcttgcactgtttggcttggccttctgctattctgacagccaacagaagagcataacttgggtagccactgccctttctccctgtgctccagaattagtcacatggaacagacacaaacctgaactaaggcagaattgccctagtcaacctgcagatctgtaagtgagaaaaagaaaggcttattttcctcagtcacaaagtttttattttgcagcagtattgcagcaatagtagacggatacaggtgaaatttgagggcattcagcaaagtgtatggagagtgtagacaaattagataagctgtgagaatatgtctcatcgaagcagctcctggaataacaagtgttaagtatggctcagggagggaaagacttggagttgttttggtgagtttcttggagcagcctaaattctaagaactttctataaactgttttctgacctattctcaccaaaacaagcatcaacgccaagaaattactaaaccatgtgtttcatcatcaatacgcaaatgtagaataatgtagaagaaagagcactagacatggtgaggttttggaccacagctgtgtactagtttagctcacgtctagtctgtggcttcaggcatgtcatttaatttctctcaactttactttcctcacctgcaagttaatggtagttttaagaataaaattatcaggcatatctatggttttcaaactgtacatttagtgatgggattttcttcaaagaaaatcaacaggtaaacctgagaactgaatatcacagtcagtttaaacattccttatttggaaccaagtcttttactgttggtggtagtgagcatgatggtggtggtggtagtggggatgatgatggtggtggtggtatatgatttcaaagtctccaaaaatgtttccttgtcttctctttcttccagatccctctcactggctgtgatctgaaagccacaattaaagattttgtatgtgtgttttggcacacttctcagattaaagggatgaagagactcatccatactcaacaagtccaccataatgacaacacagtcacttttacagttctatgatgtctcaaagtgtctgtacatcacccatgattatcccgttagttatgtggcaattctttgactccatgtcaaagaatgactccatcatccccactaccaccaccaccatcatccccactacgaccaccaccatcactattagagcagaacaatttaccatcctgacctggaagcctgttgtgtcctctcaaaagaacacatcatcattccgtggcttgacataatgctgggcttctttactcatatgtgctacaaatggtaccccaatttactctgtccccaagggtattctcggttcacaactctgtctgacagtgaataacaataagtacgatcagttgttgcaaaaatagattttaccgttagatcaaaacttggcagcaagcgcatcaagaactcccgtgtgtccagcccactgctttagaactactgccttaagtatatttccactttgaaactcactcccctgatccttaggagctgtttacactttaataagaatgagcccattagagtccacccagagagcatttaataggggcgaagtagagcctcttagtttgaattcactcaggagcagaccctgagacaaggatacaaatgcaagtaatttatttggaaggttactgttacacaagtaaggaagttaggtgggcaagggaaagtagccaataaaagatgaattgtcaagaaaattacccatgtgggtgactgaagctaaatcctaccaggggactcccagaaccagcatggaacatgcacccaagagttctcccacacaagaggaaaaggacttgcaatatttatacagcaacttccttagtcactggttaagaatgttctcaggggctgggtgtggtggctcacgcctgtaatcgcagcactttggggggccgaggtgggcagattacaaggtcagaagattgagaccatcctggcgaacatggtgaaaccccgtctctactaaaaatacaaaaattagcttggcatggtggcgtgtgcctgtaatcccagctactcgggaggccaaggcaagagaatcgcttgaaccagggagtcagaggttgcagtgagccgagattatgccactgcactctgcctggtgacagagtgagactccgtctccaaaaaaaaaaaaaaaaaaaaagaatgttcccaggaatatcagtcctgaattttctggccttccatgtgcatgagcataatgcaccccatagcatcaattacagggagaatgggaggaaggaagagcttgagaatgcagcaattgagtttagggaaggaaaggatgtcaagggtgttcaaagtttcttaattctcattttgttcagtgctagtcccattctaaggcgtggctgcttggcatagcagtttttagtaaaaaccttaaagaggtagaagaagaaatatcacctcttggtgacatatctagcaccaacaggacattttcacaacttcaggcaagcatttctggcttggatggggcagagccaggggagcaaatgtcttggtagagtgggctattgcttggctcctaatgggcccagccaaagaagcaaaggcctccctgcttggccccctcatgggttggtaggctatgctgggttgaattttatatcatcttaacaaaccaactgaagttataataaaaaaattggagaggtttactacttttatgaaaactataagacattaagcactaatgctctatgtatggggttacctagttcaagatgtcacttttttttctgggctgaggagaaatggggtctttggaaaaaggtagatatggcagtctcctggcacagtaagatcttttcacacaggggcttttgctgaatgttttgcttttttactctgagagcttttagtggtggatagcgttggaattttggatgtctatctatctttctcctctctgagctctagccaattgaggtatatatttaaggagttcaaagtatcaacttatgaataacaaaagcttggagaccatctgaatgtttggtaatatgggaaagattaaatattaatacattatggtaaatccatacactgtaactctatgtagctataaaagagaatgaagatgcccccctgaatattcacatgaaaaaagtgccaataaaatgggaaggagtgagaggagataacatatttgcagtgtcttttatatgcatgaaatttggaaagaatcacaagaaaatactaataggtagggcttgggagtaggaacagggtaggtgggagcgtgggtggcagagagaatttttactgaataccgttttttgagaagcacgtaaatatattccctgtatctacctagacatgtagagaaagactcaaagaggggaagacataggggcaactgattaaaattcttgctttgttcctcagatcatgagtcatcagagtgtatctgaccatgactttgggaaagggaaaaaaggtgggggaagaaaagatgggaaagtacaaatgggagaacaggggttgtgtactcggaaggtaaagatcaccatctccatctgttaaacacagcactgctgtgctgtctacatttcactcagcaggtgtgctttacaccaagtaggtgcttggaagtatgcctgctaagggctgagccagccagagtgttgtatgatctgttggaccagctgttcattgccactcacttgagaggtggtttaaggtgatggataagagcatggtctcctccatcagaataaaccaatgttcaagtcctggctctgccacttactaaacacgtgggactaggtccctatttcatcctctctgagcctctgtcttcccttgtaaaacaggaatactggtattacccacctcactattatgaagtataacatacagcgtgcacagcacagtgtctggcccattgtagttgctcaatagcttttagtgtttgcttttatgagtttgagtcatctttgtggtgaggattacagaccctgacccctctacttgaggtagaaccaagtctatggtttctcagcctgggcagggcaacctgcccttttctgacttttctgtgtgatgcagcagctgcatttccattccagcttccaagggctgagtgtgggggtctccagaggagccgctttactgacagatgtatcctctaggattccagaggcaatgccagatgtcagtgtgcagctgtgttcacagaacatcctatcaatgtttattccctgtgtagttgcaaagcaaatggcttaatgccattgtaaaaacaactctaaaagttaatagttcttctaataggaaccccctcaccgccaccttcagcagcaccaaattgttagttctcagtcttctgtctcacagaaagaaaaccagattacaccttggtcaagaaatgtacctaaagtttccctcttgatgatttaatcttggttggggtgagaaaaaagcaggtatcagctgtgctattggggatttcctaaccctttatattattacatgtttcatcctgccttgaggaagaagtttaagctacgccaatattcggggctcaaagagttatgtatgtttcaagttttcaaaatgtttgatatatcaaagatggtttttgtcctggtccctgcgttctgactggagacactttgctttgttgggtagccaaatgctgcctccttttgaagcagcaggtgagccaatgacaaatgtaatggggagtggggcagagatgctctaagaatggagggacctgggactggacatctggcttgtgagtccaagttcattcccgatgtcttttcctgtatgaaaaagccaagcacctcaaattaaggttccagaagcagccaacctgtagttttaacagcatgattgaccttgtctgcattgccagttcaatctaccttgaggaagaatactaaatagagtttgcccatggtcaactcaggaactagaggtgggaggttagaaggcactgcaattactgccattgctgatttctcctcagtccactacactctaggcagcatgcactgggcagtttggtgtagtggttcagattatgggctctgaagccacactgcctgaattcaagtcccagcagtgctcttattaacagctgtgtggttttgacctagttatttaaattccatgtgcttcaatttctctgatgtaaaatggtggttacaatatctctacttcacagtattgtgagggttaaataattaacatgggtaagatacctgtttgatagtgagcagtgtagaaacttagtctcaaataccctgtaatgagtcttttcgtttatttgtttagtacctggtactaaagaggacctaattcaaatgaatcgtgtagttgacaagcaggaactgaaataagttccctgtaaattatttacgtaacttggatgggaggacagctggtcccttgggcttgggctcctgtacccacatgagcaatctctgtttttgccttgcaacagtccacagctagggttaagttatctggaaagaatctccccacacatcagtaaagtggacttggctcacaataagctggtgaggtctgaggagggggtgaggggacgtatattgcacatacttcaacacacacatacatgcacctgcacatccctgcaaaccactttcacaactttcaggatttcttctctccaaagtcccacttggctatgttttaagggttccccttgatgccctttgctccatagcagcctccagtgttgtttttgctctgcctctggggaacttcaaattccttactctttttagtaagcggagctgtttagctctgtccctgctctgaccctcaatattactccatcatacacatcgcagcccaacgtcttcaactagattcattgatgtatgaagacggcgctttccttaaggggtctcaaagcactttgcagacatccaaatgtccattccccatttaagtgcctgctctgttgttcactatctatgtgaccttgggtgagttatttcacctctctgagtctcaggtcactcaactgaaaaatgaagataatgcaaggactgtggaggttgctaggaagaagtgaaatcatgattgcaaaacatagaacagcgcctggtgtctaatagcatcacaatgtatgctttttgtataactatatagcagaatccttcatctaagttggatttctcacagtagaaaatgggcattgacaactttttatgatgtgtgtataaggactatagggcacaaaggagtgaacagggctatctagacggcactaggaacttttgcaagttacttaatcactacacattagtctcctccattgtaaaatggggatagtaatcatacttatttatgactgtcggggagatgaaatgagatactgcatgcaaaaacagagtctagtccaatgtaagaatttagaaaagcatagctattattattaaaagcatatgtttttaattgaactattaggataagaaagcatatttgcctcctttcctgatgtattttgtattttgatttgatgtatagatgtattttggaaatcctgatgttattttgctgaaggctttagtcaagacagaagttatttaagctgatagctttggctttagaagtattaaatcactacacagtccataaacttactaataattgtctcttgatatttcatttgaaaatctgaacttctttttgggctgttagctttgtagtaatttcctttcatcagtgacacattagaattaatctgaagtataagagaatagttcagtactcttgaccagtgttccctttgattttgtataaactgtgagcaattggccatattccacaagcaactagttatgaaggtggaatatgcatgagcagactttagtgttgagatcaaataaagcttgcagcaaatttaatgtgatgttgtaaaggatatgcaaaaaccaatattgtgctgtgtgataattagacataaacgcagttcacacagatgagtgtaggtgccttccctgaaacaagcccttctaggattagctacctaagaagtgggtgggcctgttaggagcagaaaacagctttggagcccctcagaattcttctgaactaagagcctccagatgtctgttcatggagatggagcctgggtgaccaggaggcttatcgggaccaggacatgacaaaatcaacctcctcctgattgttataggggattgactgaggggaagtgtattagtctaggacaggaatcagcaaacttttttatgaagggcgagatagaaaataatttaggcaccgagggccatatggtctgtgttgcagttactcaacactgccattgtagggcaaaagcagcaataaaggatacaaacgggtctggctgtgttccaataaaactttatagaaacaggtgatctgctggacatggctgtggtttgccagctccttctttaaccatctgatgggttcaccttgcccactgcctagacagagctgatttatcaagacaggggaattgcaatggagaaagagtaattcatgcagaaccagctgtgcaggagaccaaggttttattattactcaaatcagtctcccagagcatttggggatgggattttttaaagagaatttagcaagtaggggcttgggaagtgggaagtgctgattggtgaggttggaaatggaagcatagagggggttgaaatgaggttttcttgctgtcttctgttcctgggtcagatcacagaactggttgagccagattaccggtctgggtggtgtcagctgatccatccagtgcagggtctgcaaaatatctcaagcactgatcttaggttttacaatagtgatgttatccctaggagcaatttgggaagggtcagactcttgcatccagaggctgcatgacccctaaaacataatttctaattttgtagctaatttgttagtcctacaaaggcagactgatctccaggcaagaagggggtctttttgggaaagggttactatcaattttgtttcagagtaaaactataaactaaattccttcctaaggttagctcagcttatgcctaggaatgaacaaggacagcttaaatgttaggagcaagatggagtcaattaggtctgatctttttcactgtcataatttcctcagttataatctgtacagaggtggcttcactcctagtctagactaaggctctgaatgggaaactggaggagaacccaaaccaacactttccagaaaaggctagcatctgggttgatgaatgaaataaggccatgggaagtcggagcacagggaagcttcaaacgttcttctctcttctccgcctttacagggcttgtctgccttagtgagggcaaccagctggagaggtagtaaggaatggataagcgtcttaacactgactggggtcaggcttaaaccccagctctctctcaatttagctgtgtgatcttgggcaagttattctgcctctctgagcctatccatacaatggggttcatagaacctgtctagtagaattgtgaggatcaaatgaactttgctatgtaaactgtttagcatgcaccaaatggtagagatagtgtgtctgtatactgtattttatggacaatttaaggaaggttcaaggtcttttggagatttgtcgcttttcctacagactttaaattgcaactccccataagttgagtttgtgttcggagttatttgactagttccataatatgcctaggagtagaattgttggttcagctttaggttgtccatgttcagcaagtactaaacagcttagtagacactaggtagtttttcaaaatggctatacctatttgcattttcatgagcagtgtgatgtgagttccagttgttcatcattctggttcctggtggttttaattggcatcttcccagtgggttaataagtgtgtgcactttttcatatgcttattagccacctgaatatcctgacacttctgtgaaatacgtgttcaagtgtcaagttttcttattggtttgtgaaagttatttacatagtctagatatgagaatttagctgctatggacattttctgataaacagaagtctctaattttaatatacagtcatataccacataataacatttttggtcaatgactgcatatatgatggttgtcctgtaagattataatgctatatttttactgttccttttctatgtttacatacacaaatatttaccattgtgttacaattgcctacagtagtcagtagagtaatacgctgtacacgtttgtagcctaggagcaatatataccatatagcccaggtgtggcaaaggctgtaccatctaggtttgtatcaggtacattctgtgatgtttgcacaatgatgaaatcacctaacaacacatttctcaggatgtgtctccattgttaagtgcctgactagggttctatttacctatctttgctttacttttttaagtcaataatttaaatgaattatttggtactatttacaccatattgcttgtaacacttcccactaatatctactagttgcgaaccattggattcattggctaatttccttccaaccctgaaacttggtgaatctgcgaagtcctgccagttggtgttcgtttgggctcattttcaacatgcctgagagggatggatatgtggagctactgttagctatgaatcacgatggacattttgatgtaattcagtttaatctatttgcttgtctagcatctaactaaaagtgcaagtggttggtgcagaaaagaaaaggaggaaattttggagtgcacaaatttgtgctaggataggatttcaggggaaaggttaggtagtgtagggagacggagatttgagcagccatggagtatagccaaggaaggatcctggatatctggaaaagtgaagagaaattgagagaaagttggatcacaggacaggtgagagagaagggaaatgggagggaaaggccaaaaagaaggtttcaattatgtggcaaatgtcagaggcttaaacataacaaaggaagctgttcatgagagcttggcctgatgagaactgatttccttgacttttctcgattttttactagaaaggtcctaatactaaatcacatatcaaggctttctttaataatagaatccattaatactcatcacttttttctctcctgattgggaataaaatggattattaactgttgagtaggcactgtatgaaataaaggggataaaggaaatttaggagcagaagcaagcactctgagctcctgcagttaatcgtgattggcttaaagcaatcagcaagtctcatccctgggaccacagtgaaaggctgattaggaccagtgagggcctggcccaagacttttatttgctggtggacaggatgaagctgagaagatgtggtttggagttgatgcagtcatcttattaccacagggaagagcctgagaatagagctaacacaaggaagaaagcagacagaagccaagagatggacggattgggttttagaaatgtcatctgagtcccttgatctagcggcacctgacttttaatctacctaagtcagggattggcaaactttgcccgtaaagggccagatagtaagggctttaggctttgtgggtcatgtcgtctctatcacagctactggtctctaccattggagtacaaaagccatgggtgatacataaaccaatgggcttagctgtgttccagtaaaactacttacaaaggcaggcagttgtggggagggcttggcacaagagcaatactttgtagatccctcatctaagacgacactaaatttccttttttttttttttttgcttaagtgtatttggcttgggtttcctaacacttgcaactgaaaaaggccttaagtgttataggttcttaggttgtggacaatggaaatcgattccaaattccttgggggaaaacaaagatttattatcaaaataaagcatagacaaattacaaattcccaggagagaaatttcaattgttgtgactgaagtcgcatgtccaggggagggggatttaccagccctctcaaggctgcacgcaggaggaaagaggttgtttctgtagggaaaattaggggactctattaagacaaacaggtactggaggctggatctactccattaagacaggaaaaagttcccatatcaagtgtattcagcaggtgccctgcaaatgcagttcatcaaaggcagtcttgtgtattagaaaaacatgttgattaacaaagacttgtgtcgtcgtacctctgcccctactggctgtgttgccctgggcaagataagaaatgtctctgggtctcagttcttcaagaacaaaaagaaggtgatgaactgggaatcttttttttttttttttttttttgagatggagtctcactctgtcgtccaggctggagtgcagtggtgcgatctcggctcagtgcaatctctgcctcccgggttcaagcgattctcctgcctcagcctcccgagtaactgggattacaggtgcctgccgccacacgcagctaatttttttttatgaactgggaatctttaagggctctttgagtgccaagctttggtggctttttccatgtattcatcatcttgcctgttaatctctgagacgacgctctgtgccctgtggcttatctttttgtataattactagctagctgtgggacctccctcatgttacataatgtctgtgagtgttaatttcctcatctgctgtaagccctacctggtaaggtggtgtacggattagagctatgcatgctacttgcttagaaaggcagagtgtgaactggtatagagtaggtgtttcagagttagatgatcaggactcaatctttgtttagtctttttcttactgtgcaacattaaacaaattatttaaattcttggaatctttgtttcctcatctgtaaaatgaggatatttatagaaccctcttgagattgttgtgtggattaaatgagatactgcatataatatgcttagtacatggcttggcatgtggtactctgtaaagagaaattgttattacttgtaatgatttaattggtttctagaaataggctcctgttagaaagaaagtttctcctattttttacagttcttattatggaattttaaaaaataattctttgagttttgatgttgttgtttgcttttagttatttctgtaaagttaaaaaagtaacagaggcctattttaaaaatattttattttctaaccattatagtaggatgcattcagttataacaacaggcttaagaaagaaaaggtatttattggcccatgtaatttgctgcgcttaatacagcactcaataatgtcctcagattgttttcttcctctctgcactctgccttctgtagggatcatttcctggtaatatagtctcaactcatgatcacaagatggttgccagtagacccagggcctgcctgcttcctcctccagatcctgtagaaagagtaaaggggctctctcagtagctttttcagaaaagcaagaaagtttcttttccatgagcttctagcatatgtcctctcaaggctcatttgcccaggttaggtcatgaatccactgcagaaagaaattgtgtccctagaggttgggcatcaactaacatgtctaaaaggacctggacccatctctgaagctggctggcagtgcccatacagcatgcctgagaatacagaagcagcatgccctgaaagaaacaaagattggcaaaggttaggcatcagcgtgggttcaccgcctctgctttaatcctccgtgttgtcgctaagtccctgtattaatttgctggggctgccacaacaaaggaccacaagctgggtggtttaaacaacagacatttattttctcacactgtggagtctagatgaagtgcaagatcaaggtgcagcagggttggtttcttctgaggcctcttccttggctagtagatggccatcttctccctgtgtcttcacggggccttccctctgcaggtgtctgtgtcctaatctcttctcataaggacaccggtcatatggggttaaagcccacttatttaatgtcgttttatcttaattactttttcaaagcctctgtctccaaatatggtcatctctgaggttcctgggacttaggacttcaacatatgagcttgtgagggatgtaatcaacccataacagtctccccagccctcaggtctactcctcagaatcactattttgaacagtttgtacatatctataattcttaattgtttcaaaaatgttctttgaaatgaacctacattgactgcttcagagattaaggcagctcttttatcaatgaaattatctcagcagtcagaaaatcttctgtgtgcctgacagtttttccctagaaagggcttaaagtagatgttaccagtaattcagggtatctacttttttaaagtatctcagtaaaatatctccaacaatatgtacaccataaattcttggtgagcctcccaaaatgaattttataatatatacaacaccagaaaacagaatgatttatggtttagagtgaactgttgtagatattgtttttatctgcctaccgtactttggtcataccatttcttttggtttctttggggaattctttctctagtccatgttatttttgaatatttgacagtcaaatcattgtgcaccaccacccacctctggcctcatcacagggttgagtatgtgatccagactaaacaaactatagtactgcatctttgggacaccaaagataagttaaagggctaggcacataacctgaggcagcccttgcccaggtgttatgaattgctggggaagagtaggccccctgttgtggattggattgttacccacaaaagatacggtgaagacctaacccctcatacctatgaatgtgaccttatttgggtcttaatccaatatgactggagtccttataaaaagagaagaggcacagggaccgaggaggaaaatgtcgtgggaggttggaagcagaaactcaagtgatcattaaggcaagtggcatctacaagccaaggaatgcaaggatcgctggcgacgacaccagaagctaagagaaaggcatgaactagattcttctctagagcatatccctgtgcacaccttgatttcagtgttccagcccccataactgacagaggagaaattttgttttttttaagccacccagtctgtggtactttgttgcagaagccccaggacactgatgcccctcccattctcttggatagaagttgtcagaagctaaggattctgggtggctaccatccacagcccacggagaaaggataaggccaaaacaaagagataaagagtggtgagaggtagactagtaggaagtgggttctcgtatcattgagtccctgttctactatattggcctggttcccatagcaattctttattgtgttacctgttaccgacctcagagctttccaaccagggtgccaaaggtagcagggttgagcatcaacttgggttcatcgtctctgctttagtcctctgtgtgttggttccttcagcctggtagccaggctgggctgaagcaggcatgctgcctccaactgcaaccagagttgagccgatttaagatgactcctgtgggctcttatacatattatcattttctgtgtgtgccatgacatgaaaaacctgtcttcacagccttccagtggtatgaaacatacgtttctgttttttgctgacactattttgatttgactttctatcacttggatttaaaagtgtcctggttaattttgaatcattagctataaatctgttaagcattgggagaaggcctactaaaaattatttgaaggttgtgagcaccagtaatcccagttacttggaaagctgatgcagaaagattgcttcagtttagggagtttgacactgcagtgagctatgattatgccactgcactccagcctgggcaacatagcaagactctgtcttttaaaaaattgagctaaaatttaaaagactaataataccgtgtattggcaaggatgtggaacaactggaagtctcttacattgttagtaggaatataaaatggtgctactttggaaagctatttggcagttattataattaaccatttatttcactcctaggtatatacccaagagaaatgggtgtatatgttcacaaaagacttaacaaagttactagaaaagtgattcctaatagtccctaacttgaaacagctcaaatgcctcagtaacaagataatgaataaattatgacataattagataattaaattctatacagttagtacaaaagaatggatcactagaacacacaagaatatagatgaattacaaacactgtgctgtgttccagaagccagacccaaaaaatatatactgcatcattcaatttagataatgttaaagaacagtacaaatctgacaatatttatagatgtcaaaatagtggttaattctaagtgaaggcaatagactggaaatgtatgtaagaaaacaggaggtgctggaaacgctctatatcttgatgtgggtagtggtaacatctgggtgtgtacatatgtagaaaaaccactaggttgggcacttgaaattagtgtactttactgcaaataaaaaaaaattgtaagaataaatacacctactatgtacccacaaaaattaaaaacaattttttaaattcaaaaaatagtcattgccaaaaaattctaagaaaaagtagtgctttttgcatttgtaaagcatgacatttaacattaagaattttaacatattcttttaaaattaatctgaaaacaaatacatatttatatttagaattttagacaatactgaaaactaaaaagtagaaaataagtcatctatattcccactatttagagaaaatcattgtgactttcaaggtatatcttttcattctcttaataagatctttttattttcttaattttagtgaaagtctgactgtagggtgccaattattttgtaatctttctaaaaacccattttgtacatttttatattagtatttttcaacagcatttttcatgatgatgttaccaggggtccttgctcccagagctcccaagatgatggtgggctgcttccaaaatggcggcaggtcgcttccaacatggtggcaagcctcgtgttctctgacctggggttcttggcctcacggattccaaagaatggaatcttgggccatgcggtgagttttatagctctattagaagccatgggtcacggaagagaaccgtggaacccagtgacaagtgttcagctcgattacgaccaacccgggcacttaaccgtgcaggaatgatggcaagcctttagcccgatttggagcagcaatgggcgcctcgctggatcaggagcacagcagacaccctgctggatctggagggttggaagtcagcggcaggtctgccacggtagcaaacggcagtggtggacggggagcgaaagctcagctcgagcagtaacaaacatggaccagaagacagtgcagttgcaagatttaatagagtgaaaacagagctcccatacaaagggaggggacccaaagagggtagccgttgctggcttgaatgcctgggtttatatcctgatcattgtccctggcgctgtgctctcaggcaatagatgattggctatttctttacctcctgtttttgcctaattagcattttagtgagctgtctctactatctgattggtcgggtgtgagctgagttgcaagccccctgtttaaaggtggatgccctcaccttcccagctaggcttagggattcttagtcggcctgggaaatccagctactcctgtctctcgatgatgtaatacaccaacatagtctttttctataagttaaactaatttttattgatggcaattaccgttgtttttcatgttctgacattctaaactcctccaggacaaatatcctttcagtaatctttacacatatccgggattattttcttaggatagattcctgtgagtcagttgttggtctgcaaaaatgctgaggttttgtttgtttgttttttattaagcggtaaacatttttattatttttggtgagtatttcaaattatttttcaaagaatttgtattaatttacactaccagcaacaatgtgtgcctttatattttacttttttattatttaaaatatcagacatacaaaattagaatagtgaacctctgcatacccatcacccagctttaataattatcagcatttttctgattttatttaatctgtgtcccttcatcctccaatatacaccctttcctcccaggtgtatttaaagtaaactgcaaatgttataactttttatccctaaacactttagtgtgtctccccaatagatacacacacacacacacacacacacacacacacacaggcaaaccattattgctatcactcacaattaaattaacaaccatctatgattcaattctaactggatcttctaatacccaatacacattcaattttcccagttttctccaaaaaaatcttttagcacttggtttattggaatcaagatccaaaccaaaattacatttgattgatctacctcttgagtctaatcttttaatctctaataattttccctctcccctctttttacccaattccattgatttgaagaccctgggtcagtcatttgttctatagcaggttttctattcctcatttgactgatgtacccctgtggtatgctgaacaggctcctccctcctcccacccccacccccatccccacaaggagctagctggcagaggctccattagattgtttcagttaaagtagttgaactcttgaaatgactttttaaatgccacctggaaaatatttaaagaatctaaaccagtcttaagaacccaattaaatatcatggtaagtggttgttaacacctcacctagttaggggcagaaataaaacccttttgtctgcactgggtgaattccactagaagccagctggagatgaaacaggagggtggtttgaaacctttaaatcacaagttaaagtggagtggaaaaatgacttaatgaattttctgactctgtgcccccagttggggccattggacaagcagaataattcttgtatacaggtagctattaatttaacacaacctgtggaagcagtctctgtttcatttacactgtgaggaggaaatacttctcctttaccttcttacattcagtaattgaggaactgcaaatgaaactgactgtaaaccaaaaataaaactctaagatgcccaccgaactgaatggacctctcctctcggccaaggggattccagggtaaacctgaaaaactagttcatgccatgatgggaatcggggtgttggacatgccttattttaccctcctccctttggaatttcaggcacaaccaatcagcattaacattcaaacagagatcctaagactgacaaaacagactctttgtaacaataagattccaaattccaacctgagtctagtatagcatcacatgacagcaggccctgaaagaaattattttacccaaaatatatttctttgacatattttggaatatccctgcaaaattctctcttgtaggagaaatttacattctccagagaatcctcttccctttccaggtctttttctgattctcaagagattaagtgagaatctagcacttttaaaggtctgaatagaaatcactggtcatctatttcctctaagcatagtcacctatgagaattcttctacataataagaaccttagactccacaatcccttatcttaaccctgacactcctttctattgactccaggtctttagataataactctttcaaccaactgccaatcagaaaatctctgaatctacttatgacctggaggtacccctgtcggcaccccctgtcccaacttcaagttttcctgcctttctggattgaaccaatgtacaccttacacttactgattgatgtctgcctgtagcattttccaaaatcgagctgtaacccaatctccctgggtacatgttctcaggacctcttggggttgtcacaggtcatggtccttacatttggctcagaataaatctcttgaaatatgttacagagtttgccttttctgtcaacatgacaaaagacagattagcaatattcatgtatgtacatgaagctcacagaaaaatgtgactttaaaaagcagttagaatttggggtcttatactatcacaataggggaaagagggagagaagaacacttatggggaaacaaatgacttttaggaaagataaatggactcagaaatatgagtgggaaatatcagttttgaggctgatatggtttggatttgtgtccctgcccaaatcttatgtccaattgtaatccccaatgttggaggtggggcctggtgagaggtgattgatcatgggggcgcatttacccctttggtgctgttcttgtgatagagttcccacaagatttggttgtttaaaagtgagtggcaactcagccctctctctctttttctcctgcaccagccatgtggagtgccttgctccctctttgttttccaccatgattgaaaggttcctgaggccccctcagaagctgagcagatgccaacatcatgcttcctatacagcctgtggaaccatgagccaatcagatcttttttctttagaaattacccagtctcaggtatttctttaatacagtggcagtatatgtttttcccgatgccaacttctcatctccagtgataggaatctatcttcctgggttgcaaaactcccacagagggcattaatggctatcaaatttctttaggaggctctgcttttaggcagatgagggatgttcagaaaaaatactctttatagtggtatattctggttctcttcattccctcatctgaaacttccctagaaatgtcacagataaggagcagaattatttaattgccccatattccatttaaccagtcttccaatcctgggaaaggttacacgtttgtaaatcatttcaggaggcagtggtgcaggtgggagttaggcctttatgtgctggaaaccatcaggtatttaataaagggcatttctatggagacaaaacaaaaacaaagattaatggttgaagcagacaataaactcattttttttctttttttcttttagtctagagtgcagccagtcaagaagatttctagaaattgggcccaaagtgtctttggatgatgaaatgaggatgacagtggcaatgttatcgtcatggttatttccttgagcatggcatggaagatgaggtgttctagtgaactttctcactggaccaaactgttgtgataaatcctttgaagttatatcaatccatccagtttcaacttccagagcttcgggaaaagggcagttttagctctcaagtcaggaaggtgggagaaaaattggaaacattaattactgaaaaaatgtgtaaaagagcaggatcctatttacattgagataaaaacagctcaaagacaatgaataggactggaatctgataacccacagggtgagtcatagttttccactgcatataaaatttctttctacaattattcccattttgctcaaagataatcaaagtaagattacccttgtttataaataagtcatctcattaaatatggcctggtcatttatttgcataagtgcagcaaaaatggtaattgaccatacaaacttttaaaaatgtgctttattggaacttttataatgaacctcatattggacctttaaaagcctttgaggcaaaaagtcaagccaagagcttgctatcagacttcacttgtagtccctatagatttgggtgaattcctatcttcttgaggtcttcaaaacatacagtttcctgagactgccacaaaagtgaccttcattactcatctgtaaggctgggaaccctgtagtccaggaaccaggtctatttttccaagacggctttttaaagcattgactccataaagtcaaacttagttgttaaaatattggtcatatctgattcaaggcacatcagtctcaaatatgacaatttagtcaaagccttcataatataacctatgtttccaattatttcttgtttcaaggggaagagatttttattaaacttacgcaaatagctgtattgccatgaaaataagaatactcaataagagtttctgaattctgcagggcttatagagagaaaaagatgaatgtttcatttttgtttacagacatataatctactaaattgctgtaagtatagagagtttaagagaaaagagaaaggggttccttatatccccagaaaatagaacattagagaactaacaatattccaaacaaaaaggccacaaaaattttaactcttcttcatcaattcatttagtcctatgcaattcatttttgttttgcttgatcttagcagtttaatgaacccctatctcctctattagttctggaaatcttaactcagtctagtggtataatcatcaagttacttaggtaatgtaattagaaacctgtacttctgagtacttgtcatatccctttccgtgggtcttgagagaggcccttttgttaaacatgaagcactttgcccagttgctgattgtaaaatcattcaaggagtcattagagtaaaacagtaattatctgttgatgacaaaagacttaaaatggctgtggttaaaggtatgatgagagttcattataatgtaattgataagaaaatttcattgtctctgtgacatattaatacaacatttagagacaatagctagaattatgactgataacatttgccaggacatattacggacagcaaggacattgacagatttttgtttgtttgtttttttgagatggagtttcactcttgttgtgtaggccggtgttagaggtgtgatctcggctcattgcaaccttcacctcctgggttcaagtgattctcttgcctcagcttcctgagtagctgggattacagacgtccaccaccctgcctggctaatttttgtatttttagtagagatggggttacaccatgttggccaggctagtcttgaactcccgacctcaattgatcctcctgccttggcctcctaaagtgctgggattacaggcatgagccaccacacctggtccacattgacagatttctaagaacattatacatttctgaaatatttatattaataacatatacccatactaatataacatagagacagttaagaatccctttttatttgacatgcttcataggcaatttagaatgtcaaataacctaatttgtttaacatctctctttttacaaggcaagagaataaattctttcagatttttcaggcgctgtcttgatctcaaaatcagtttgaagttaagaagaattcatttagaattgcatttggaaagttgtcaaaaatgtcaaaaagtttgaacacttgatgaaatagaatcataggtcatttagaaaaaaagatttggttctcttaaataaacaaaaacatgataaagataacataaagcataggaaattattctgataagacagagaatccttgtttcctcagtagattattcaaaaagtaaaagaaaaacaaactttcataacttcctactaagagcagaacaataatccaagaaactttatccttttaagagagaatggcaaactctagtttagcattgaaatgctattgatattaaaactcattttcaaaccttataataaatccattcaatgttagccagattgaccatgaattaaactgtgagctaagctgaaaaaagagattagcaagagaaaagacagatttttattcatgtatatccacgagttcatagaaaaatgtgattcaaagaggtggttataatttggagcttgtattagtcagggttctccagaaaaacagaatgtgtctatgtaggtatatatatttggaaatgaagttccaaaccataagtgtcactccttacaagctgtttgacgttggataggttacttaacctttccgggtcttagtttctttacctgtaaaatgcagaaaaccacaggattgttgtgaggatgaaataaaaaatcattcacctaaagctcttagtctagttcttggctttagacgggttcattcttatttaagtcctttaatttttatcccccctggatttgaagttaaaaggaggtacacacagaaatcaataacaataataatttaattagtattaacaaaaatgtaatagcattacaaaaaaaacccatgaatgccaacaccatcatttgtacatcctctttccttctgcctaaaatgccctcttccacaacaaaacaaagatacaaacaaccaaaccagcaaaactgtaggtttgccatagctgaagctgcagctgttgccagttctcctccgtgtgactttggcatcttggggacaaagagagcggtagttgggagtattctctggcattaaataagccttgttctgagaccctgttaatctactatataacctgagtgattttcttaaccctccttacctaatttatcatggaatcctacatccattatctcctaaatgtctcaccaatccatctgctatggtttggacatttgtcccctccaaatctcatgttgaaatgtgatccccagtggtggaggtggggcctggtgggaggtgttttggtcatgggagtggacccctcatgactggctttgtgaccttcccttggtgatgagtgagttctcactctattagttcatgtgagagctcgttgtttaaagagcctggcacctcctcctcctgctgttgctccctctctcgccatgtgatatgcctgctcccctttgcctctcacaatgagtggaagcttgctgaggcctcatcaggagcaggtgctggcactatacttcttgtacagcttgcagaaccatgaaccaaataaacctcttttctttataaattacccagtcttgggtgttcctttatagcaatgtaaaatggactaataaaccattcatttttctccatgtccactggctttccctactccaatctaccatcatctgttgtctgaactacaggagtctcctaactggtcttcctctttcttccttgttttctatattcaatagaatttagctttggctaagagtgatagcaaatccaaaataatgtggcttaaggacaacttaaaattttattttttactcatataaaaatccaggtagcctattgagaacccattagaatgtctaaaattcaaaagactgacaataccaggtattgggaagatctggagcaaatggcactcctattcgctgctcgtggggatggaaaatgacacacttactttgaaaaactggctgtttcccatattgctaaacatacacctaccatacgacctggccattccactcccaggtattctcccagagaaatgaagcatacatctatataaagactgtatgtaaatgttcacatttatgtacacaatagccccaaacagtaaacaacccaaatgtccattgactgctgagtggattaaatgaagtgtggcacaaccatacaacagaatacaactcactcataaaaaagaatgaactatttatagaacagcatggattaatctcaaaatagttatgctgaatggaagcagctagacacagaagagtgtgtcacatatgagtcagtttatagaaagctatagaaaatgagaaatagtctgtgacagaaagtggatcagcgattgcctcattctgggtgtggggttggggatgaattgcaaaagggcatggaaatcttctgggaatggtagaaatgttctgaactttggttgtgttggtagttgcacagttgtatacaactgccagaacaaatcaaattgtacactttaaatggatgcaggggtttattgtatataaaaagtgtatgtagattatagctcaataaattaaaaagtaaaaggagctgtccaaggctagtaaagcagtccacactgtcaagaacccaggatcccctttttgtgctgctcctgcacaacaggcttcatcctcatggtccaagatgggtagcatctggtttccaggctgcaccatggaggaagggccaaagaaaacgaagagcacatgggagtctcttagaagcccctcccacttggcaattcttctcacatgccattggccatcttctagtcacagagacacacctactgcaaaggaggctgggaaatgtagtctttatcctggatggtggtcttgggtcccggggaaatttcatgactgtgggagaaaggaaaaatggatactgagggacaattagcaggtatttttgacactgccacttgtatctggttttcaaaatgtacatctgattgtatttccctctctacttaaagttcttctgtggctttccactggtctcagaatatagtccaaacaagctcctggccatggcctccaagaacctgtgcaatctggcccttgcctgccttgtaccttactcttgactagttctgaactccaccaagtatttgctggcttcagctcctctggtacaccatcaaggttattatttactctatttcaatttgcttgtaaccctttcccctccctctttgcctggttaaccactctttatcctttggcttttggttggttgatctaaactcttcagcataggtcaggcctcctttttgttttacacttaccttttctatgtagcactcctcacagttcgtaattttatatttgtgtggtaatttgattacatcttcctcatacactagactgtaagctccttttgttcacctttgtattctggaatctaactcagtacttagcaaggcagaaggaactaaataaacttttgttgagtgatcaaatgaatgaatccattatatataattcatattgttaattgatctgaggttgctaaggaataattttgtacttccactgagctctgactgcaaaacacttccactgagctctgactgcaaaacactcactcacccactaattatctttgttaggtattgcttttgaaatgctgaatagtatttcatcttatcatttgatctgtaccaccaccaaaaatgtttatttaagtctccatctatgttttgagtggagattttttttttcttttaagacagagtcttactctgtggcccaggctggagtgcagtggtgcaatgatggctcattgtggcctcgacctcagcctttctcccaagtagctgaaactacaggtgcacgccattacgccaggctaatttttgtattttttgtagagacagggtttctccacattgccaaggctggtctcgagctcttgggctcaagtgatctgcctgcctcgacctcccaaagtgctggaattataggcatgagccaccatgcttggctgagtagaaacctttctataaatattgtctgcttgggtggcagtgtgtgtgtgtgtgtggtgtttggggggtaatgtgaaatgagtaaagtttgtggaaatgaaagttactgtacagttcattgatgcctgttttcctataagggaaatttgaattatttagggtagaaacaggactggtgtgcagcaggctccagggaaagcagccacaccttgtgatatggttatattgttcatttaactggagaagtagggctctattgatctactcaaggagaaaaattattcttgagtacgtggtatttatttagaatgcaaatacaacatggtctacttaagtgggagctttgacaggataattataggatattaatatagattcaaaaaaccatgttctccatagtgtgactcacggttagccaactatataataagcaaaagtgaaacgacttttctttataaatattttcttattcaaagttttcttcatttattcatttacaaagctttgccgcagtgaatcctattagtgggttttcttatattttgaaatggaaatactctgatttaatcttgtgtaagccgcagaacatagtcaaaggagtaactgcatgacttggggtgaaaacgggaggaggcaggcagaacatgagagggaatgtggccatgaggttcgaggagagagcaccagcctggacaacccttcttcccatgggtacttagtgagctgcctcagacccagcacatccaaatgtggctgattttgtatcaccctcaccatttttgccatatctgccaaccaaccaggcattgtttacttaaaaaatagactctctttttcaaacttaaatgtattttaaaaagaaaactaattgttttttttaatttgagatgaggtctctgttgcccaggctagagtgcagtggcacgatcacagctcacttgcaacctccttctcctgggctcaagcaatcctcccacctcagcctcccaagtagctgggactgtaggcatgcaccatcacacccggctaatttttgcatttttagtagagactgagttttgccatgttgcccaggccagtcttgagctcctgggttcaagtgatctgcctgcctctgcctcccaaagtgctgggattacaggcttgaaccaccgcgcctggccttttttttttttttttttttttaaggtataatgctagcgctggtatgtcagggatttttctgtgttgctctctgctgtattcccctagtgcctaatctagtacctggtaggtgcttaagtaatgtttgttgaataaataaacgtcattctcatcaatagaaaagcatgtatttttctaagatgtgttataaacatatagctattacaattaaaaatgtctgcttcccatttagaatcctcttgcatgccacctgtaatacacctatgtaccatagttttctaaactgcatagcaattgtcactgaagaaattatctcatatcattatttacttattggctttgtccctcatagatgggtacctctgtttcttaagagttttgtcgacctctgtatcctgagcatctagcactgtgtgggggcacattacaggtatactacaaacatatataaataaataaatatctttacagttatcctggcatgtaaattattatctccattatcatatagatgaagaagaaaccaagacatagaggagttaggccataaaggttgttgctaaaaagcaacaaccttttcaacattttcaaaatgcattgtatttgccacggtcgctgggtcatgggtcattcccccatgggtcatccccccaaaattaataacccccaatgcaatagtattaagaaggagggcctttcagaggtgattaggccatgaggactccatcctcctgaatgggattagtgctcctacaaaagggcttagagaagtctacttgccccttccggcttctcccctcttctgccacgtgaggactcagcaaaaggtgccatctatgaagcagtgagcaagacttcaccatctagccctctaacatcttgatcttcaacttcccagcctccagaactgtgagcaataaatgtatgctctttgtaaattactcagcctagggcattctgttacagcattccaaatggactaagaaaattttcttgtgtatttatgactttttaaaatcccaattcttagaatggttttacctccaaacaggtttcagcacatgctcatttattcttcttgcctaaatggctgcactcaacttcctctctgagctcttagcctccttgcgtccttcctgcacagttgctgccatattgttccgcatggtatcctccacaccacatattcatcttacaacctgcctgctcctaaacttccaatggttgcctgctgctccaggacgaaagtgtgaagtctttggcttgctcatcagttatgaataatttcaggcacaggttaagatccaaaataataatggcttatatcacaaagaagtttctttaatgtgaaacagttcagaggtcagatgtcccaggctgatatattcatcagggaggttggtccctttcttttcctttcatcatctttaacattgtgcctcatgatctaagatggtgccaaagtttcagccattatgttcacattccagaatttgtgcataggactttcctttaagtcttattctttagaactttgtcacgtggccatacccagctaccagtaaggctgataaatacagtctatgctaggaaaataaattagatgtcttgttaaaaaggaagaaggggagacatctagtagtctctaccatagcctggcattgaaggcctttctcaatcaagtatcaacccagcttttcaggtttcctttacttacttgcagttcttaatactctatccccattgagctcctttgttcacagtctctaaaacacaccttgtatttgtcactttctctccattcattcaccccgcttgaaatgctttcttgcttgacatccaagctgtaattttgtttccatgattctttcccgtaattgctggaatctgaaatgacttctgacgtggcactcttctagaaatgaccatgagatctcttcagataatcactctcttctgccttggatttctcttctttggattagttgaaaagctaaaatctttcattgttaattttttacacacttagatcttacccctcacttcaacccctcattctagattccctgacggcaggatccccttatgtagggaatatttattggcctcatagttcacatgtgacatcatgctctgtgttgggaattttgtatggaataagatgttggaccactcctcaaaatcctcatattgcctatgaaatctggtttttttgagacaaagtctcactctgttgcccaggctggagtgcagtggcgtgatcttggctcactgcgacctccgtggtatggtttggctgtgccccacccagacctctacttgaattgtatctcccagaattcccacgtgctgtgggagggacctaatgggaggtaactgagtcacgggggcccgtctttcccgtgctattctcgtgatagtgaataagtctcatgagatctgatgggtttgtcaggggtttccacttttgcttcctcctcattctctcttgccaccaccatgtaagaagtaccttctgccctctatcatgattgtgagaccttcctcagccatgtggaactgcaagtccaattaaacctctttcttttgtaaattgcccagtctcaggtatgcctttatcagcagtgtaaaaatggactaatacactccacctcctgggttcaggcaattctcccacctcagcctcctgagtagttgggattacaggcgccggccaccacacccagctaatttttgtatttttagtagagacatggttttgccatgttggccaggctggtctgaaacttctgacctcagacgatccactcaccttggcctcccaaagtgctgggattaccggagtgagccaccatgcctggccttggaatctggttttaaaacttgtatatattaagtactttgtaaatccctgttggtttattgaggaataaaagctgacacttatttaaattattataacatattcacaataatatttattaacttctatgtgctaggcactatgctagtctttcatgtatatcatttcatttctttcttttgacatctaggaggtacacaccattaatttttacagataaaaatgaggcacagagaggttaagttacttgcccaaactcacacagctggtaaggggtggagccaggatttaatccaggcagcttgattcctgagcctaggctcttagtcactatggtaagaaggtgactggaaaacaatggtggtctcataatttaaagatttactgcctttatttaaaatatccatccacaatgtggacaatgccagctaccccaccccattaggaagctttcttgggctgggatggccttgccccagcctgggcactgccaacctaccactccccatccgagtctcagctgccagccctctgtccctccctctttctgtgttttgcctaaatgactgcacccaacttcttctctgagctctcaacctctggtctctccctccttgcgtccttacagcacagttgctgccatccagtgcacagctgtgtttctgtgtacagctttgatctcatccattctgcagtgacaggaaggagtaactgagcaaaggctgcagtctggagcccccctgctggactgggctcaccaatctgtgtggttttgttctgtccagcccagtatttaataatgtttctaaatttgttgtcagcatttgcaaattagatgtcacacaaagtctggatttttagtttctcttgaaaaactggcctattttggaaacactgggtctgtatgcccatgggctcaggctgccaagtgcagatggggtatgtgctgtctaagatggcacagtccctcctccctatgacttgggcccttatagccatattcattttcctttctagcttgtcacaaataataactgataataatgatacagagtgcgcatgcatataacactatgtgtcagacactgttcgaagtgctttactttttatcactgcagccaatttgggaagaggtactgttacactggcaccactttgcagatgagggaactggggccacactagtagtgaaatgtctgggactcacaccctggcattctggcttcagagtctttgctttgaagctctgcactgttacctctcaatacagagaatggaatttgtgtctctgctctaaaaggagagagaagcagggaggaaactgcccctgccccctgtgctgcctgaagctgacacatcaaaactacaaaaaccccagagctgatttcctatacaaataacatgcaagcagggaaagactgtttttctttattgctctaaacaaagttgaacttgcactagagatgggggcaatcaaaggatcccagctgaacacctagcagtgactctggggccatctcagagccagctgtggtagagagagctttcttctatctctcatggaacagagggaattaattaattctattaagcctccgtccaactctcatttgaaacataagcccataaacaaatgtaatccatctccatcccagattctctccgggaaaggcaggcagatggagaggcagatatgaaacatggtgctggactaagtaagcatactggcctttatgccaatatccacggtggtcgcccatccttcctgagcctccctgtgctgcagagtccacaacatgataaatggagcctgtcacacagagagagattaatttgggggcagggttacttgcctggcagccatgggaaagtgagccctctatacgcttggctcaagtcagaatttcatttgaaagcttctataattcagaggcaaagggaatatggctggttcaagggggtgacggctgtccaaagaccaacctgagagctgaagatattcactgggtacttcgatatgccaggtgctgtggatgtaacaatggacaagcctctagcatacatagttaagatgatcataggattccagaccagagtgctttgagagtgaagaacacaggcttcaattggaactatctggagctcaatgggacatgccgtcacagtaagcagagccattaagaccacccacagctctggagctcccaattctgaatctggccaagtgaccatgagcttgtttcttgctgcacaaaatgggaacaataacagtacagagctcttgcctctcataaatgttgtaagggttatatcagataataatagtggccagaatttgctaagaaccccctcctcacaagacaagagcttgaggtcaagtcgttgggctctgtggtgtttacctggttttccagaagctgagatgtcaggtgggctttgcaaggtgagagccagtgcttaatggctctggaatatccaagggaattaaagaggcaaaggtggggaagagaacaggagaaacgaagagacaactggaagcggaaagaaatgttgggtggacattggacagctaatggaaatgtttcaaagtacctactgtttggtccacgctgtgattccatctacaagcccgtctctgcataacgtcttcagcaaagtagccattgtttctgaacgtcttgatggaggcagatctttttgggaggatacagcagactcaaggtgggtcggcagagggagctgaggcactccccatgtcctactccgcactccatgaaggctcaactaagggtgaattggtgaacaccaagtgcttagcctagtaccagtctgtagagaagtttctataaaccgtattattatcaccattatctttattatgtaggctggctttggtctatcaacactaacctggaaatataaagctggagatcagtagggcagacgggggcgaaatatgccccataagaacaaaggggagtgttattattatacattatccctagggaagcctagggttcaggagaaagaaatgacttcgagaaatcccaggagagtctcaggcagctctatgtgtgccaggtctacctccagtaagacatgggtggtattccacactgatcagttgtttgaagaatgagaagaatgttaattaatcctgttatctgagcagagtactttctggttcaatttctctgataaaaccaccctgaatggagaactctcagaacacccaagcaggcctccttctaggatcccttgaggttcagcgagacttggaaacgggtgggatggggcaccctttctggtcctaggaacttcagggtcagggctgactctttcctctcagtgttctgaccagagaccctttacaatccagtcttcttctccctttaaatatagccgcactttagaaagaaatgggaaaaaattaattcatgtgtcactttggcacattgtttttttctcatagtctctccttaaaacctgcaggcatttaaaaaaatactggtgatgcaccagggactgcatgctgggcactggatagaactgctttagaacagacttcaataagtgaattgttaaattgaaaggcaagaacaatttgatgtttcgaggagatcatggttttgcaaaagcgattcttaaagtgattggcagcttatggggattcacaatttagcatgaagggctgacgatctcaaaggcagctgggcaaagaccccagaatgattccttcaggaccaagatgtgactggcttgtgtgatttgtatcagaattccatgttgatcagaaatgcattcagaattgtttcaaatgttaaaaaaacagaaaagagagacaaattctagttcaacatctgtaagggagtacatgtactctcagtgagtgatatgcaagatttgcagattagacaaaaagtattgttagtgtctaccctgtgtgaaaagtatataagacgccttgacctttgtaagttcctccatctagctacttagaggatttctttgttgcctgaggctgtctgtaaaggtctcacaaccttgcctctgaaatatggtttcacttaccttggggaccctttcatgcaaggtggaggttggcctgaacagctaaaaagacagtgaacaaagacttcactgagcacgcagtaaaggctgtaggaaccacattatttctgctcactctaaaagttgagcagatgttggtagtgtggaagatttggtctgagatttgctctcaggtggtagaagagcagctaactttcacccatcagcctttatagtggtttccatcacttaccaaaaagaaactaagtatacgtacataaggtatgtgattctcgcaatgacgccgtgatgtaaatgctattattacctccacttactgttgaggaaacaggtctggaaagcttaagtcacctatccaaggacacagtcagaatatagatctagggcatttggttctaaagcccatgctctttttacaatgtagaaataagttttatgttgtttttttttttttaaaatatcacatgcttggtggggtgcggtggctcacgcctgtaattcgagcactttgggaggccgaggcgggtggatcacctgaagtcaggagttcgggaccagcctggccaacatggagaaatcccgtctctactaaaaatacaaaaattagccaggtgtggtggcatgtgcctgttatcccagctactcaggaggctgaggtaggagaatcacttgaacctgggaggcagaggttgcagtgagccaagattgtgccactgcacactccagcctgggcaacaagcgcaaaactctgtctcaaaaaaaaaaaatcacatgctcatagaaaaatcagaaaatatataaatgtatgaaatagtctaattccactactcacagaaaatcatgttaagtcttggtgtattacttccagacctatttccatgcacatttagttgagattgcactgtatttacagttttgtgttttgcttccttaacatgttataaatatttcttgatattattaaaagttattgacatcatttttaaggcaaacataatgttccattctatggctatattgtaccacctgttttggacattaacttcatttgtacttttgctattgtcaataacaacaaaacggccatctctgaaggtgatttttgtttatatttcttagtattttatcagggcagatttctggaaagggtattactgggtcaaagggcaagaacagtttaatggacattatgaggcattagaatgcaaaaagtgcactctgtttttgtaaataacaaaaaatgagcattacttttcaagactgagattaaaaaatcaagataaatgaaaaccatgaggattctgactgagaatgaactgaccagccatcaggtttaattagtgctacttttctgaccagtaaggaaggggcagcacaaatacccatggagctcctccttgactattgaatttggcatttttgaagcatttttgccaagcttgatttgttaaaatttagcaacaacaaagtcatcaaattttcaggcaggggccagaaaggaaaaactagttcacaaagatttacagccttcaggaatgttccagaaggcttttccagatggcaaagggctagagagaaaagggtctttccagcttgggcttgactggaggctaggaagggaggtcagggtgagagcagcggcaggaaggacggtgttggcccgtgggactgatggttgtgttctgcacccggtgagaggtggtttgagggctaggaagtcagtttatcttcccaaacaggataggtagaggaagaagggggcacgtgactgccagcccaaggaagtcctttggaacagcaggcacaaggtcgatgatgggaggaagggaagtgttaatgaatcacagagagatatgctgtgtcttaaactcctgacaaggggcgggtaacctgccatagggaacatgattgcagtgtgtaacccgccgtagggaacatgattgcagtgtacctggagctgcggttgttaacctagggattgtgccccgtggatagcattttcaggaattctgtgcatgccctgaatttatgaagaattcatgcagaaaaaaaaacagacatagtttttggtgagacaaggtctatagctttcaggagtctgtgatccccaaaagattagaaacaagtgacctgtgtgtatattccctctatctctaggatcaaaggtatcttctctcctgagcctaactcctcctcccctgttccaaggtgcctcttgccctggcagtggcagaaagccctgtctggatgcagtggtaggtgccccagcctaatggttgtaatggagggtttagtgggaggtgtgggtaggtcaggtaacagcagatgctccgggaaaagctctgtgcttcggcagaaagctgggaagcgtctaggtgagtctatcaggacaagattttcacttggagacatattctgtttcctaaaagtataattcctttcacgggagcgtggcaacacccagggctggctataactgctgcttgaagaggcttattgacacagtgagagcgtcacgtttgagattagggctgtatttctcttgagagccccttggctctcttcattatactcagtttcttttgaaggatttattttttaatttttttgtagagatggggccttatcatcttgggatttatttcaaaaaataaatccatcttttgaaggatttattttttaatatttttgtagagatggggccttattatttgagcccaggctggtctcaaactcctgtgttcaagcgatcctccagcctcagtctcctaaagtgctggcattacagtatgagccaccggcccagccttctgaaggatttaagaaataagtgtttaggccgagcgtggtggctcatgcctgtaatcccagccctttgggaggctgaggcgggtggatcacgaggtcaggagatcgagaccatcctggctaacatggtgaaaccccggctcaactaaaaatacaaaaaattagccgggcgtggtggcaggagtctgtagtcccagctactcgggaggttgaggcaggagaatggcgtgaacccgggaggcggagcttgtagtgagccgagattgcgccactgcacttcagcctgggccacagagtgagactccatctcaaagaaaaaaaaaaagaaatgggtgttttattacagcattgtccatagtgacagaaacctgaaaacaatttcagtgtctagcaatagtgaaataatagacgaaactgtggagcattcatattatgaaatactagatagcttttaaaagaatattagctccgtaggcagtgacctaaagggagaccacaatgtttacttaaatgaaaaaccaagctagtatagtacataggatgggaataggcaaacagctttttgtaaagagccaaatagtaaatattgtaggctttgtgggccatacagtttttgctacaactactcagcttggcaattgtagtgcaaaaacagctatagacaatacacaaaagaataggcgtggctgtgttccaataaaactttatttacaaaagcaagcagtggatcagattttgtctaccagtcatggtttgcagatactttgcatagtgtataatatctttgaaaagaaactttgaatatcgtgtatgtgttttataagaataggctccaaactattaatactggttaccttggggagaaaaagggtgggattggcagtagggtgattattcattttttctttattcatttctgttttctttgatttgaaatgaaacacatgtattgtttcataatttctttttcacgttcctaaaatgaaatacatatgcagtgggaattcccagatgtatagaaatgactttgcctatggaatgggacagttttgacttgatttaaggggattttgattgaccacaagcttcaagaaaccatcagttgctaaaagcctaacctagtttgagatggtggtaatgaaagtataattttctgattaatagaggggacagtcccagtgttttttgcaacagtcaaaccatatctaggacttccttttaattttggggtgctgagttgtaaggcagacatggacaaactagatgtttgctgaagacagagactgggaaggtgaagagtgtggaagtgctgtcaagaggagtggagcttgctgagcctgaagaagagagggcaagcatggaagaaataaaagctgccctcacatcctagagaggagaaaggaactgttacccatgctccaggctgtgccctgaaccactgatatccacttcttgtcaagcagatgatggtccagccagcatgtaagggcgagatccttacatagcctccttctaaagtatttcaggaggacctggtctctgcaagattcaggagcttggggagggggaaaaaagttcctatggtggttcagggcctgaactttgggatagatagacctggttttgcaaccctggaaaagtttctgaatctctccaagcctccatttttcctctgtaaaagagccataataagattatgataatgatacttatttcatggggccattatgagaatcaaatgaatcaatgcacatttagcattttccagtatgtctggcacaatcagtaagtgctcagtacatgttaacagtttgttgttggcttggttcttattattgtggtcgttactctaacagctgcgggagtagtcttctagtttgctcctgtagctgtgtttgacatgctggtccccttaacttcacaacatttcaccccatactcttcttagccaaaaccaaggtgatagcttggctgcatggctttctctgggccttggttgttttcatctgtaaaacagccttcacggtatctattgttcctatttaataaggcagatgaggtatgaaagactccatggatatatccttggagagagaaatgaaggatgtaaatcgaaggtgacacagtgcctaaagcccgagttccctgcctcacctttctatgcatccgaatcccactcctgctttaactaaccaagtccccgcctcttccgaccatgtgtttatctccttcctggaacttccgggcacctctgtctgccttgcccatttgggctggtaattctatgctgtattgatttgcatcataaattaataatctcacatggctgtgtcataaccataactgtaagtaagatctgagagagttgggtctttgtcttacatattttcatattaatagctatttaaaaaaattattttagaatgaataattgatgccaagttcaagcagattgctgtgtgtcagaaatggtgccagatgtcttcacagataatcaatattgaatgacatcacaacacccctataactccgctaccaatgtctctactttactgatgagcagtggagttcagaaaattagttagctagcccgtgaccactcacgtatagtaaaagatttgttctttcctattctctcagggccaagcggggtatcaggcacacagtatgttcagggtacatttgatgtaaaatgtccttagcatccctcgctgaaaaattgaagattttggctgggtgtggtagctcacacctgtaatcccatcactttgggagacgaaggtgagcgaatcacttgaggccgggagttcaagaccagtgtggccaacgtggtgaaacctgatctctactaaaaatacaaaaattagccgggcatggtggcgggcgcctgtaatcccagcacttgggaggttgaggcaggagaatagcttgaacccgcgaggcggaggttgcagtgagctgagattgcaccactgcactccagcctgggtgacagcaagactctgccaaaaaaaaaaaaaaaaagaaaaattgaagatttcaaaaactgttgtttctaaaagcaactaaattaaagttaaaaaaaaattccataggagcttgtacttgcctctttctggcatctgtttaccaaacaggctgatcattcacctggaactgaaccagggccagtgagggaggggaaacaggaggcccgagtaggacccaggtttcctgcagggaagtcctggccaagtatcccgcttccttctggtcgattgttcatgggaaggaaggcgaggggccttctgttctttctctggaatcccgtggtgcccgtctttggcaggcagaaacaatgagcctaccccagcctctcacagtgtgtttgaggcacatcttccccattctgtggcctaggtgatgcttggacacattgtaagcacacagatgtatggatttattattatttcctaaaacctatgctctgctggctgagatgggcctgggatttataagccctaccaattagctgagtgctgagcactgtaatccagggccagtactgctctcctagctgcaggaaaggggtggtgaaaaatcacaagaggaaaatggaacctggcactagaatgtgagcaaaaaagaggcaattctgctgacttcagagaagcttccttgcagaaggaatctgaaacacgagcaactctctggggaggatgagaagctcttctacaaggaggaggaaaacataccttaggctatatggctgctgggaatccaggttaaaatgtttaaccctggagaaaaagaggtcagttaggagtttcttgctgtaatccaagtggtgacaatgagggcccggatgcaggaagagagtgagtgtgtgtgtgagtgtgtgtgtgggtgtgtgggagggtgggtgtgtgtgtgggagggtgggtgggtgtgagtgtgtgtggggtgggtgtgtgtggggggtataagtgagtgtgtgtgtgggatgggtgagtgtgtggatgtgtgagtctgtgaatgtgagagtgtgtgtgggtgtgggtgtgtgtgaatgtgtgagtgtgtgtgtatgcatgtgtgtgccggggaggaggaagtggtggagaagtgaagaataagagggagtgaagaataagagggacagtggcaagaggttcttaaaggtaaagataaagcttgacttgggattggttatgaaacagagaaccagttaaaaaaagttcatgtttcagaatttgttaaaactagagttttgtttatttattttttcttttttaaaatttcaataggcttttggggaacaggtcgtgtttggttacatgaataagttctttagtggtgatttctgagattttggtgcacccgtcacgcgagcagtgtacactgtacccaatgtgtatagtcttttatccttcaccaccctcccaccctttcccccgagtccccaagtccactgtatcattcttatgcctttgcatccttatagcttagctcccacttatgagtgagaacatacgatgtttggttttccattcttgagttacttcatttagaataatggtctccagttccatccaggttgctgtgaatggcattatttcatccctttttacggctgagtagtattccatggtaaatatatatatatatttatatatatttatatatttatatatatatatttatatatatttatatatttatatatatttatatatttatatatttatatatatttatatagttatatatttatatatttattttttaatatattttatatgtattttatatataaatatatatttataaatatatgtattttatatataaatatatatttataaatatatgtattttatatataaatatatatttataaatatatataatttatatataatcattatattaatattattaatatattaataatataaatatataaatatatatatttatatatatttatatatatttttatatatgtatatttatatatttatatatatgtatatttatatatttatatatatatttatatatatttataaatatttatatatatttataatatataataaatatatataaatatatatacatatatatcaaataaatatatatatttataaatatatatgtatatatatttatatatttatatatacatatatatttatatatttatatatttatatatacatatatatttatatatttatatatatttttatatatttatatatatttatatatttatataaatatatatttatatatatttatatatttatatatttatataaatatatatttatatatttatataaatatatatttatatatttatatatttatataaatatatatttatatatttatataaatatatatttatatacttatatatttatatatttatatatttatatatttatttatatatttatatattttttatatatttatatataatttatatatatttatatatttatatatatttatatattttttttatatataccacaatttctttatctacttgttgattgatgggcatttggactagttccacatttttgcaattgcgaattgtgcggctataaacatgcgtgtgcaaatatcttttttgtataatgacttattttcctctgggtagaaacccactagcaggattattagatcaaatggtagttctacttttagttctttaaggaatctccacacctttttccatagtggttgtactagtttacattcccactagcagtgtaaaaaaattgttcccttttgactgcatccccgccaacatctattatttttttatatttttgattatggccattcttgcaggggtaaggtggtatggtattgtggtttcaatttgcatttccctgatcattagtgatgttgagcattttttcatatgtttgttggccatttgtatatcttcttttgagaattgtctctccatgttcttagcccatttttgatgggattatttgttttttgttttttgttttttcttgctaatttgtttgagttccttgtagattctggacattagccctttttcagatgtttagattgtgaagattttctcccactctgtgggttgtctgtttactctgctgattgtttcttttgctatgcagaagctttttagttaattgagtcccatctatttatctttgaaattagagagttttagatctagatagggctcaccttactccttccccctttcccctttacagatgaaaagttgagcccagggaggttaaacaacttgcctacaggagtaactcatgtcggtacctggcttcaggaccagtaattagatctctggatcctcagtatggatccccaattttcccctgtttcttctattcagctcagagggcagtgctaatcccaggttacagtacttggcactcagctaaacagtggggcttagacatccctggccctcctcagataccaggataccagttttatgaagaacaaaccctgataccagtgttctcaacctcagcactattgacttttggacagagaggacagagagagggaatatggtgtgagatgaactggaggggtggacagccatattgggcacagtcctgtgggtcacatagatttctgccttgtcgtggaagtgacaggaagcccttggcccacttgactgagaaggatggtgtaaaaatatttggttttgtttgtttgttcttacagacagagtcttgctctgtctcccagactggagtgcagtggcacaatcatagcccactgcaacctcaaactcacatagctctttgttgtgggtgactgtcacccacattgtaggatgtttagcagcatctctgtcttgcacgtcatatgttcggcagcatccttgccactagatgccactggcatcttctccttctctgcacatctatagtggtgacatttaaaaacatctccacacattgccaagtgtctccagaggagtgggtgtggagggacaaaattgcccctgcttgagaaccaatgtcttatattgatgagctccagcatcacatgagtcaaagaaaaccagaaaattgaaaagggtaaagctcctatcattcatttagaatgaaatgattactattttcctaataatcttgagaaaagtgatttgttcattcactcattcaacaaaaatatattgtgtatgtactattgccaggtgctgtcatagtctttagggagacaggaatgaacgggttggattctagagcagcagtccccaacttttttggcaccagggactagttttgtggaaacaatttttccacggagggttaggaagagatggttttgggatgaaactgttccacctcagaacatcaggcattagattctcataaggagcacacaacctatatccctcacatgtgcagttcacaatagggttagcgctcctataagaatttaatgctgcagctgatctgacaggaggtggagctcagctagtaatgcttgcttgcccaccactcacctcctgctctgtggccccattcctaacaggccacagactggtactgatccgctgcctgggggttggggacccctgctccagagggtttataatcaagctcagtggctgtgaaaatgagagaccatttctaggacttcaagagtccatggagaaagggaaaaaggagagaagccagaggagacaaagaatcaatagtcagaagtggctagaaagccaggagagtacaccgtgacagaagtcaacctaggcattgggcggctgagacagacttcattgtcaggagcacctgtgtctcaattctggcttactattacttgggcaaattacttctttaacctcagtttccttgtctgtagaatggaaatcataacagtagtcacttcctgactgttttgaagacgaaacaaaaataagataatacatgtgaagctcttagcacagagagagcacagactgggacctggtaaacatggaacaaacctatggaagctgctctagttatctttcagtttatactattttattgctaggaacaaagttgtgctccaggcaaaggcacgtcaacagccaccaaagattggaataagcctttggggcagttattttagctttagccatctggctgtcccttatcaataatttgttggttgcatctgcggtgggttttgaggtatcataaagtttactaagcctgttatttcctatatgcacagaagcagtgagaggaatgtgttgcagtcataatgaaagtagaggtcattttttaaaattgaaagtgagaaaatgtattgcaataggaccattctatatttatttaaaaaagaaaagaaagtgagaaaacgcagaatgctacatgtgcctttgaagtgagacattggatgatggggatgatgatacatattaaatacttagaaatgagtttggcacatggtgagcacttaagcaacgtcttcctttgtgattgtgattattatgatggtgcagaacaaagagggaatcatacggtatgtgaaaaatgttgagtttacacacaagacagttattagccaggggcaaggaaaagtgaagactaaactggaaaaaatctggaatatgtggctagagctcagcatcaatttcagatgccttatgcaaattcaggagatggctagaggttggagaacgtaaaggggtagctgggagaaaatgctgcttggagatgattgttgtaagccataggcattccgtgaggctaagttcattcattagaatctgttcctcattaaaatgaatctcaggtgattgggtcatggagcccatacctctcagatatttctagagaccgtcagcagagggaggtctcatctgcctcaacaggtttacgaattgatccactttaaggaaggatgtccaagacagcaatgttttacggtggcaaagagaaacataaacttcagagcctaaactaacatttctatttggtggatatgtgagtgaagattgcaaacttaatctcttcttgttctccttggatttacaaatatagcatcaacaacaactcacatttactgagaatgcaatatgtggcagacagttctaagcatattgcactttcaccaagactctgtgaactagttagtgttatgtgcccattttatagatttagaagcggaggcacaacttgcttaagggacccagttagtgaattgtacaagcaagatttgaaccaggtagtctgaccccagagcccatgctctgctttgctttgctttttttttttttttttttgagacagagtcttgctctgtcacccagtctggagtacagtggtgcaatctcagctcactgcaacctctgcctcctgggttcaagtgattctccagcctcagcctcccaagtagctgggattataggtgcgtgtcaccatgcccagctattttttttaatttttttttaattttttagtagaaatagggtttcaccatgttggccagtctggtctcgaactcctgatctcaggtgatctgcctgccttggcctcccagagtgctgggattacaggggtgagccaccacacccagccccatgcttttaactactgaatttacaaacagcctattaacacctgatctttgcttttttttttctttttgagacagggtctcactttgttgcccaagatgaagtgcagtggcacaaacagctcactgcagccttgacctcccaggctcaaatgatcctccagcctcagcccttcaagtagctgggactacaggcacatgccaccatgctcagctaatttttgtattttttgtagagtctaggtttcaccatgttgcctgggctggtctcgacctcctgagctcaattgatctgcctgcctcggcctcctaaaatgctggaattacaggcatgagccaccatgcccagccaacacctgatctatttttaagtatcaaagcttctgtattattatgatggctgtcactagtagggaagcatgatcattgacatcaaggataattgtgaccaagtaaaagccatttgatttagcaacaagcagatcattggcctctgagtgggtggtttctgtaaagtactggggtggcagccagactgtgaggcctcaagggagttgagggaagtgagaaaagggaagcctccagggtttacaggcataccttgttttattctgcttcggtttattgcacttcacagatattgtgctttttactgattgaatgttgtggcaaccctctggccaagtcaattggccccatttttccaacagcgtgtgctcactttatgtctctgtgtcacattttggtaattctcacaatattgccaactttttcattattattttatcagttatggtgatctatcatcagtgatctttgctgttaccattgtaattgttttggggcaccacacactgtacccgataagatggcacacttaatccataactgttatatgcattctgattgctccattaagtggttgttcccctgactctccctctcctggggccttggtatttcctgagacacaatattattgaaattagccaattaataatgccacaatgacctctaagtgttcaagtggaggaaagatcatgtctctcactttaagtcaaaatctagaagtgattaagtttagtgaggaaggcatgttgaaagctgagatgggtcaaaagctagacctcttgggccaaacagccaagttctgaatgcaaaggaaaagttcttgaaattaaaagtgctactccagtgaactcaataataataagaagcaaaacagccttattattgatatggagaaaatgttagtggtttggatggatgatcaaaccagccacaacattcccttacgccaaggcataattcagagcaaagccctagctctctttaatcctatgaagcctgagcaaggtgaggaagctgcagaagaaaagttggaagctacaggaggttggttcatgaggtttaaggaaagaaacctgtctccattacataaaagtgcaaggtgaagcagcatgggctgatggataagctgcagtaagttatatggaagatctagctaagatcattgatgaaggtggctaaacagattttcaatgtaggcaaacagctttcattggaagaaggtgctatctaggactttcattttagtaagaagtcagtggttgtttccaaatcttcaaaggacaggctgactctcttcttaggagccaatgcagctagtgactttaagttgaagtcagtcctcatttacctttttcaaaatcctagggcccttaagaattatgctaaatatactctgcctgtgctctgttagggaaacaagaagtccagatgacagcacatctgcttacagcatgttttacagaacattttaagcccactgttgagactactattcagaaaaaaaaaagatgcctttaaaaacattactgctcattgacaatgcacctagtcacccagaagttgtgataaagatgtacaaggagattaatgttttctgcctgctaacacaacatccgttctgcagcccagggatcaaggagtaattttgattttcaagtcttattatttaagaaatacgttttgtaaggctaaagctgtcatagatagtgtctcctctgatggatctgaacaaagtcagttgaaaatcttctagaaaggattaaccatttcaagtgccattaagaacatttgtgattcatgggaggaagttgaaacctcagcattaacaggtgtttagaagaagttgatttcaaccctaatgagtgacagtggtttcttgagatagaacctcctcctgatgaagatgctgtgaacattgtcaaaataacaacaaagatttagaatattacataaatttagttgataaagcagcggcagggtttaagaggactgaccccaattttgaaagaaattccactgagggtaaaatgctatcagctatctcttgtgaaaggaagagttttttgtgaatggaagaatcaatcaatgaggctaacttcgttgttgtcttattttaagaaattgccacagccaccctaaccttcagcacccaccaccctgaccagtcagtcagaagccatcaacattgaggcaacaccctccaccagcaaaaaagattactactcactgaagcctcagatgatcaacattttttagccgtatttttaaattaaagtatgtacattttttaggcacaatgctattgcacacacttttaatagactacggtatagtataagcataacttttatatgcaccagggaactcaaacatttgtgtgactcactttattgtgatattattattcactttattgctatggtctggaaccaaacctgcaatatctccaaggtacgcctgtatataacttccaagaatttggcagtaactgtcaggaaagaaatagaattacaactacaaggagtagccagccatgtagaggtttgttttttcttcttcccaaggtgataaatacacaatggaagtaagaaaaagggctggcaaaggggaagaggatgaagatactgaagaggaaggaaagatacttcatacatctgggaggcgatagtgctcagggcactggttaagggctttggcacctggctagatttggagatgttttgcattttacttattgacaatccctgatacatcagtgcttggatttttagtaatcagtggttggattttcagtaacgtggacccacactgacttgcaggctcatattcttgtggttggatggtcctttatctaatgctaggagaactgcatttgagtcccagtgctgccattaaatagctgtgtgtgattttggacaaataagtcacttcatgtcgctgagcctcagtttcctcatctgtaagtggcagatttgaactaaagatccaggggtcctttgtacgtgaagcggtattaacttctaatgagaatagaaggatgttctgccattttaggtgaaagattaatcctcttattgaaagattttgtcttagcgtgggagagaggccacagtcacttccttcggtgttggagagagaggtgatttgaccagaattgtaatagagtccacattatatttatacaagtgtatactattctttgaaatggattaatttgttactggagtctagggcattaattttaattttaatttttttacatattaattatcattttattctggtgttttgttctttaggaagacacaaatgtttgtgatcaaatgctgacaatcaataatgatgcaaagatgtcagcaattagtgtaacactttcattaaaacgtagaaaataacagataagatacagacatgatgattccagagcagatgccatgaagacactaacagtatgtcccaaaggagcggatcaacagagacagagacgggataaatccagactggtctataacagaaactatagggcattgttttaaatacttcagaagcctggccgagtgcagtggctcacccgtgtaatcccagcactttgggagaccgaggtgggtggatcacctgaggtcaggagtttgaaggccaacagggcaaaaccccatctctactaaaaatacaaaaatcagctggacatggtgatgcgcgcctgtagtcccagctactaggaagtctgagacataagaattgcttgagcctgggaggcagaggttgcagtgagccgagatcatgccactgcactccagcctgggcgacagagtgagactctgtcacacacacacacacacacacacacacacatacacacacacccacacacacacacacacacagacacacaaaacagaaaacttatgttctttattagctaaattcatgcctgaatctcaggagaatcatgaaatattgctaccttgtgtctagtagaatgacaatgacatactgttcttctctggacaagtctacctattattagtgggatggttacctccctaagtgttgagttctcaggaaggaggatcaaatgggatatctatgtgctaaccatcagttgctaacagtatttaataagcataattttctctaaccaccagagttataaaatataactcagcaaatgcttagagtgcctactatgtataaggtaccaaacaggaaaatggggacgagagatgtcagttttgctgatcaaagcctgtcacccaataaaaacccaaaacaggaaaccatgacaaatatctgactatctggtgtgcagccatttggaacacaaaggggtatgtgcacatgtaacatcgcacatgtaacacacacacccacatgcatgcaagccatcagctcaaggcgtatgtgtgtgcatgcataaatgcatgtgtgtgtgtatgtttagggtcagtgtggaataataggctgaataagagggtaaggttttatgatatacacccagggggaaaatctgtgtaagtcatgcttttatcttgttaggtatatgttattactcaagaacacttacacctggtgatccagcagctcaaacacacatacatgcacacactcctaacttgatatcaccctggtgtacactaattgtcttaagccactcatttgattcaagaagcaagtataactctacagcagcagttctcgacatgtggtcagagacccctgaagttgcctgcaggaactgtgaagtcacgcagggccccatgctcagagctcagttcaatgttctgctgtggctgtcttgaaatgctttataacttttggacaagaaacagcactttcactttgcactggtccccacctatgtaactcatcttagttgcttgagatccttttaggaggtccatgagctcaaaactattttaacaagactaacaacattaatatattatttgccttttctactctgattttcacacaagtatacagtggagttttccggaggtgacatggcattggtattgcaacagactaagtgcacagcagatacgagaatccagatctcttaggccagatattcaagagatttgcagaaataaaaaacaaagccacttttcttgctatatataccttttgcttttggaaaatatagctatttttcataaaaatacattacttatgttaatttgtaatggcttttaaaattatttttaaatcgattaataaataaccaaggattttctcagttttagtttctaatatgttaagtatcaacagatataacttataaaaacaaaagactttaaggctcataataatttctaagactttaaagggttactgagttcaaaaagtttgagtcactgatctctaggtatttactgtttctaccagaggaaagaaatcattgtgggaatgtgatcaaacgatagtgtgtttgcttatacttgttcatttatgtgggcaaatcaatgtctactgaaaaaaatgaggtaaagagacaacctttttcattacccttggacttctgcagaattttcctaagtgtgacctaacacaagtcacttgtttttacttgtttttctcctttgttttagagcagcaggttctaggttatatctaactcttgtggttttctaaaatggaatggctgttaaagagagatcgcgagcctctcttccctcgaggggcttgggagaggtgatacagacgattccagcatgaggcacagttggataaagtgacctctgagggtcctttcagtttggaggatgctagtagagagagtcttttcccttaccaagttcaaagtcggggggtgctgaagtaataacaaatgagtacataaaaggcaaaaaaaaaaaaaaaagacattctgtcagcacggaagcagcaggcagtcaccagagactcctgccttccattggcgaaccggtcaccggctccgtcctgaaaacagaacttgctccgagtgatgtaggcaagggagaatgcttctgatgggagggcagggcagggtgggtatgggaatcgcatgctctcattcttatgactctgactcactgaaacggatccctcccttccctttttgaggaccctattccttcacttttagcaccaaagtgctgacgtgccttttccccacttgtctttagaaaatctatcttgcaagtgaatgctaaggtgctgggctattgacagtttcacacatcacccttggcggggtgggggtgggcggacgggggcggtggttggtgggaaacaatgacaaggagaaccggagacagtatctttaccccaggaacaaatctccaaaaaaggacgttttagacactgggcaagcagaattgacatattggggaaagaatgtttttctagcacttctcacaccatgcctgctgtttctgtttgaaagcataatcaattatgtctgtcctcccttcttctctccacccatctttcctttctcacttccacttttcctccttccttccataaaaggtcttatggattctctgttatagcccaggaattgcttagatattggggattcaaagataaataatgtgctgtcattgattttataatttgtgagtggcgacagacaggtaaactgatcactgtaacaagaggaggcaaatgctgcatgggtgggggctggggggtggtgtgtgtgctgagtgcttgggcagcctgcctgggatggaggagcagggcagccctttgacctggctcctgcaggggaagtgggtatttctaagggggagaaagagaacaaggttctccaggcccagagacgttaagtcgtgcacccaggttcacatggctatgtcactggaccaggcctgagcctggtttgtctctgcaccctcgacctgtgtgcaataactactgcctttcccagaccacaggcatctcagtgtgcctgggcataggatgaggtgagagggaaagagtggccgggaatgaggctgtggtcaagattccacacaccattctttgcatcataccaggagacagaaagagaggcaaatatttatggaccaggagaaaagtaagcccaattctttgctgttaacttacattcatgacacaagttatttaaaatatattcctggagtgctttcgaagtgtgagggcagacatcactccttgacctctgggagctcatatctttctttccagattagctggggacagattgactgtactaagcagaattcactgttaatagctcaatgccttttctgcagatgctgtggttacagctcctcaccgcttccttagaagctcttttgccccttctgataataaatgacctgactcttgtcttttcttttccccttcctcctgacccgcctttgagagatgaatcaacccccgggcaggtttcctgcaaggagtggaggaagggccccagctcctagaccagcagaaaaagcaggagttgactgatttctgctaagctcacttgacaaagggatctggtcccctttacctaccagtctttctgtacctgcctgacactggcaaggcacttactcttccagaaacagctgggccagaggaaaatggcccacccctcccacaagaatgccaagaagcaatcggctgttaatttccagtaggacgaacaggaaccctttcaaccaggaaatctaaattgaacagtgattaagtcattcaagctccatggccctgtttaatttccaggtctacagatggctctgccttcctcttagagaccatttttagccactggtcttgggagggtatttcacttttaaataaggcacctgcatgttcttgtcaggctgcactctgtggtggttaaacccacagactagtgggggcagaatgtccaggtgtgaatttcagctctgccatttgctgtgtgactttgggcaagttacttacctctctgtgcttcagtttcctcatctgtgaaatggaaataataataattgcactgggctcatagtgttgtttcatgttttaggagaattaatgagttgacacttgtgatgtgctgagagctatgcatagtaaacatttttgggggttaaattaatacacatatttaactatccaactgtgaatgggacttgcctttgtcctttccttctctcgtgaggtctgtcattagatagagggaatgaatttagtaaagaggttaaatgcagagatttggggatcaaattgcctcagttcaagtcctgactccaccacttaattagaggttaagtcacctcacccctctgctcttcggtgtcttcatctgtaaggtaggttataattgcacctatttcttaggatggtcatggagaatgagctttgtaaagttcttagaatagtgcctggtgcttagcttagtaagtgctcagtaaattttacctattgcattattacaaactcaaaaaaagtgccatataaacacagcagttttgattatacaagctacaagctgcccaaagctaacatccttagcaagtgtagccaggacctcaagccagctcctagaggctggctgtgtgttagtcagcaggaagcttggcagtctgtccaggtgtggaagagctcagctctcccgtgtttgagtcctgactttcctgcttgttaaaggtgtgacgtcgggcaatttgacatctctaaacctcaatttgtttcctttctccctccctccgttcctttctctcttccttcctctagtgaacatttattgagtggctgctcagtggaggaggcactgtgtgaagttctagatattccccaatagacagttcagtgatccgtacatcacaggcaggctgtaaggattaaacgagttactatctgctgggggcttagtctgggcctggtacttaatgtaaactcagtaaataatggctgctcatgctgatttcctatcaaacgtccttagatcatatctgttaggtctcatcatcccttctgtgaaggaggtagctggttcttatgataaagcacttagcgggaatgatcgttcaagtttacttgctttgtttctgcagtggaaactgaagcagggcttttttttttctctgtaaatttgggagactatcagcagaccagtcatccaagaaattaaaaagccgaaagcagagtctactgagtagactcaattaagatctcccctcgtcttatacagtctcgggtcctttcgaagcaagtttgactgacagggaattcttttgtctaggaccacatttcccaattatatcctgctgaatattatttccttaagctgttaatagtattccatgaaatgaaattaaactattgaatttttttttctgaagaccacctccaagttcttaatatacgactgcattttacagtattgcatggagtatttttccaaaagttattagactaaggaatgtttctccagcaacaccagcaacatttcatggtattatcccttccccttcttggggaacagtttgagaaatgcccatctaggatagctaagccagacttcatcaatgaaagccaggctgaaacaccaaaactctggtaatacaagtattatatttaggaaaagaattgaagcagatgttgagtgatgggccagtctgtgttattgtcagactagaactgcccaccagttaacgctggagaaagaagagagttctttgtgaagggcagccatccacctggctggcgtgtctcaccttgactgagtgagacattcaagcactgctaggtacaggtgctgctaggggacagggcatctttcctctgttcactttctgctcttgcagaaatctaatttctcacatccagcagaaaacctccctgcaatgagtggtttggatgagaatatttatcttccccaaacagttttgcaacttcctcttccttaattgggaggtcaagatgactgaagaacttacactgggaaataaaactgtataatttgtagttatttctacctctgtcaagctgtgggaccttgggaaatgactaagctgtttcttttaatctcaacttcttcatctataaaatggggataataatagcacctctttcctggtgttgtctggggagtaagtgagccactgcttgcaaagtacctcacatagtgtcagcacatggtacatctgcaattcatatttttttgcaattaatattaatgtcagttgtaatttttttgtttttatcaattccatatttgtgtgtgtgtgtgtgagagagagagagagaggacaaaaagggaggaagagggaggcatatgccatacttagagtataatgtaaattctattttgcaaaggaagattttgagtaaaatgaaaaacaaatacatttcctattaatgacatctcttttgctaaagagataatttataaatgtgattttaggtagaaagtcctagaaaccaaattactaattaattagtattttagtttattcgtcactctctggggaatgtagttagcatgagttaatccctcaaagcttactttgtatgggatgtaccttgtattatggtgcctaggacgctaaattagtggttagagggttgtacagtaggctttgactctgaggaaaggggctgagattgccttgaggaatttttgattgggtctcttgaatagcctaaataaactatcctggccagaattctttcacagtagagtttaaaactcctctctccttctttctccccttctttgccctcccttccttcccttctcctcccttctcccacagacaggaatgaataagcatacacaaatttttccttattccattcgcctttctatatatccaatgcagactgctgtcttatgtcattatttatattatattcatgtgattatgttccttatcttgattttatctgtttctgaagtgggaagggtgtaaatgtcattttttatttttaagattacgactgtatttccatattctcagaccacttattgaagtctcatttatattcaacagcatgcagtaatacacatcagaatgtaaataaaggctaaaacatatgttcaacaaattgggaatagaataaaatactaggctttgccataaaagaattgagattatttatgtggggaaacaaacataatggttggtcaataacacacaagttctcttatttcaaatatggtatctaattatttttctttgttactaaaaaatgtattacaatgtgccaagcattgtgccaagtatttcacacggctctcctaaacctcatttaggcctcatgaaatccctaagaaacaggtagtgtctgcaactgagactctcactgccttcaaatggaactgtccttaaatggtactaccaggtctcagtccaaaccttagcctttttccccacaaggaaacattgattgacctaaggtttggcttatactagaagggatgactgttctggtcaagatatttgggtttcaaaggacaacttgacctggaccctggaccccactatctcaaataaaaggagtgtctcatagaaataagcccaagccaggcttcatgggagccgggaccagagaacttctctctctctctctctctctctctctctctctgttgccgtctctctctcaaagtaaatacaatgaagtgtatgaggtaaacaaaaaaagggtaagagagtccagggtgtatgtgagggagttaatataataagggaatctaatctgggtgaggagggaagtgaggacttgaggatgaccagccgtgggttaagatagtatatctcgggggagctgaagatttgtgggagccaaagtactagagagaatgaccgtgaaagatgggaggtggtgttaagagagtgggagtgggtgtaaataggaaatgaaaacgtcaaggctgaccgtgagagtaagtggctgccgtagattggagaacaaggtcatcagggcagaggtcaaggatctgagcttctgggatattggaaaaattatttctatgaatattgaaatcatggagaattatgaaaagagcaacatctaagagagtgatcataaaccaggtctgaaaatttcaaggcaagagggagataacccaggaatctgtaatgaccactacaggggcaggggatagcgagtagaatagtctaatggcttgatggggattttagggagggattgtggtctggaagtggcacaaaaaaacaaggaaaacaataactccacctcaaagtccagtcatgccatgagtgtgggagagaaaataccatcatttgagaggatttttagggcctcagcagaaaagcagagttcactttgaacagcgattctcaaaatgtagttcagggacccttagggaatctctaagacctggcagagatccacagctcaaaactattttcatagaaaactaagatattattcaccttatcactctcattctctcacaagtctgtagtggaattttccagagtctacgtaatgtatgataatgcaacaacagattgaatgcagaagtcagtagaagaatccaactgtcttctattaagccaggcattaaagagattttcagaaatgtaaaacaataccatccttcccagtacttttgttctgttttgttttggaaaatatagttattttccataaaatatgtgatggttttactattattttaaactgaatacattaattttaatttttaatttcaaatacagtaagtattgatagacactacccacgaaaatcaaagctcttagggtccccaatcactttaaagagagtcgtgagacaaaaatgtttgacaaccactgagttagtacataaaggcaaaggaaatgctcaggaaagaagtcgaagtgtaggggattttgctggtgatggactatgggtttcagggtgcacaaaaggaggtttgggaatgaggaagggctgggagacaggtcagaaactgggatggataaaagcacgtggtgatgataatctggggtgattaagacaaccttaggccctgatctttgaactgatgggcagagacaaggatgcagggcataaggtggccagtcctgatgactgcagtgcagagagtgatgctgaggctgaggctgagtgttgtgaggaaaccagaagccagcttctgctgggggaggatgaagctgggagaccagttatcttatatagcacgtgggttccttagtttgtatcccaaaggacactttgattggcacatctcatctactcatgtgtcaggtgcccagtcccaggaccagtcacctgatacaggtctaggacaatccactgccccattctgcagagtctgaggtatgtgatggttcctggaaaaggcggtatggtctggtcagatgccccccaaaggcatctacaatcaccaagaaagacgaaaatctcttgtgttttggataactctgggaatttatttatttatttatttatttttgagatggagcctcactctgtcacccaggctggagtgcagtggtgagatctcagctcaccacacctctgcctcccaggttcaagcgattctcctgcctcagcctcccgagtagctgggactacaggctcctgccaccatgcctggctaattgttttgtatttttggtagagatggggtttcaccatgttggccaggctggtcttgaactcctgacctcaggtgatccacccgccttggcctcccaaaatgctgggattacaggcatgaaccaccatgcccagcctgcaactcagtatttatttggaatgtttcctgttcaatcctgtcttaagatgcagagaggggattatttgcaatggagtgtcttccattgatgcaaaaggccttctaggaaatgaactgggcaatacaatggcagcatgtttgatcatggcagtggtgacttcccactgtgaccaactccttaccaggaccttaccatgaccttgctctgttgcttggacctcatcttgtcccccaccccacctgtttcctatgcttcaaccataggggcttgctttctccttctaacttgccatgcttcttcctgactcagggcctctgtactgaccatttcttctgtttggaacattcttctgtttccataaatgcctcttttcatcatttaagtctcaatttcaaagttatcttctatggaagatcatccttgatgaccctatgtaaagcatttctcttctttttttccagtcactctagtttgtcctcttcgtagcacacatcagtacttgagatgatctcctttatgcatttgtttccatgtgtaatgtttgtcttctgctctttggtgttagaaaccttgtctttcttgttcaccattacatcactggtgcttgacaccaataagtggccagccagtatttgttgaccaaatgactgacttaggattgtgggaaggaataactgaaatccttgaaagttatccaagaggccgggcgaggtggctcacgcctgtaatcccagcactttgggaggccaacgcgggcaaatcacaaggtcaggagtttgagaccagcctggccaacctggtgaaaccccatctctactaaaaatacaaaaaattagctgggtgtggtggcaggcacctgtaatcccagctgcttgggaggctgaggcaggagaatcacttgaaccccggaggtggaggttgcagtgaggcaagatcacgccactgcactccagcctgggcaacagtgggagactccatctcaaaaaaaaaaacaaacaaaagaaagcaaacaaaaaaaacaaaacaagaagaaaattatccaagaaaaattcaagtaggatcaccaaatttcttttttccctgttaagatttgcttattcaaattattctcagacagtcagatttaattcactacgagccactttagaatggagggcagacactccccaataccaaaagacagaaacgatgataaaacccaacataccagaaataccccattgctaacaagagaaggatgaaagggactaaaataattattttgcttatgtcatccaaaattctcccaaaaagcagacttcagggttctcaatttttctactgtggaagttacaaggaaggcagaaggagggcaaacttttatcatttgtgtgctaaatctccatgctgtaccaaaggtcactgattttacaccctggtgttagatcagatgctgagcatatttctcaaatggtcccatttttatggatagtatagtgctgtggtggtatattgagtgcttacgcaagttttatatctagattggtatttatcatgagtaactacattaactcattttattacctgagctctgaggacctgaaaaactgtgtgttcttatgttgcacacggctgggagatctacttgtgctcctcacaagttgtgctaggcattaacaaaggatcttggattatcagggcctccttttttccatctacaaaaggagaaaacttatgggaggatatatgtttttcttcattggaatacttttatatcatagtatgagacactagggttattgtggagggagatcaaacttcaaacacctaaacgtggcagacatttgtttcacacctattgtatctcagacccctaaggcattaaatgtgataatgtgggctgggcatggtggtttaggtctgtaatcccagcgctttgggaggcagaggtgggcggatcacccgaggtcaacggttggagaccagcctggccaacatggtgaaatcccgtctctactaaaaaaacaaaattagctgtgtgtggtggtgcacgcctgtaatcccagccacttgggaggctgaggcaggacagtcacttgaacccaggaggcagaatttgcagggagccaagatcgtgccactgcactccagcctgggtgacagagagagattccatctcaaaaaaataaaaaaaaataataataaaatgaataaataaatgcgataatgcgtaaattgagtaattttcattattattcagagatggaagcagttaatcagaggaagagagtgtggacagagatctctgtcctgtccttttttgcctgtgtataacttcaaacaagtcacctaaccctgcctgaacttggtctggttaggctctgtgcggggtagaaatgagtaatgggaatggggtgggcaggcattgtcatgggaacaaagcaaaagtagaacaacggacctctggaagaacagaatctgaaaggtggttttgatcacaaggcagcctctcagggagggcctctgcttctcctggtcttgatgtccagttgtcttctactgcttcctttatctcaatagtgttcaaattatgtggttccaagcaaggttttctttgtaaaatggtttgaacccatgccattctattgcataatttctgcttgctcatagctctggccccttctaactatgtgtccgcatcccttgcaagctgcattcagagtggcaggaaaatgggcgatcagactggtaacaagagaagcagggagtggctgggattgtggcaaactggaaactgcacgttctccctaaaagggagaaaaagcactgcagaactagccaattacagagtgcaggtctgcagcaagaatgatgccaggtcccctaggtttttcaaggcaagctgaaaaatctgtatttttgcatgacgttttctaattttaaaatattggcaagtagttcaaacaatgttgacctcataaggttcaaacaatacaatctaatatagaacatttaacgagcccacagccagtgtgcagcttttagaatctagagttcagataaagtcacaaacttcagcttttgcgctgcctaatagttgtgtgtgtgtgtgtgtgtgtgtgtgtgtgttcacattcctgaaatgtaatcttactggtgaagtgtactttttggggccaaaattttcacagcacaaatctatggattggatgcacctgggttaggtgcccacccttagtcttaaagggggctgcctcagggatagctactctttcaacaggagccttgattggactgacttccatttcagaggttgtggacatggcaagctgtgtatatatctaataaagacctagaatttcctcctcataaattaatgtttaactagaatgaccaacactggtttctcctatgaagattctgtttcttaataagaaaaagcaaagtcccattgacatttaggtagaattttggttagaatttggctggtgacaagcatcatatattggcattaatggtccttaaggagaagctctgatttccatggaaatactgactacttctcctcttaagaaaattctggcttggcgtggtggctgtgatcccagtgctttgggaggctgaggcaaaggctcagttgagcccagaaatttgaggctatggtgagctatgattaagacactgcagtccagcctaggcgagagagcaagactctgttttaaaaaaaaaaaaaaaagaaagaaaaaatatctgcttacaaaatgagaaactcttagggttagaaaagaatttaacctctttaaacttccctttcagtccttcaatacttttttatggcatgctcgtatgttgtgaatacttctctttaccaggaagtacgcttctcccagaggagactctttcatctttagacaggcctcatgattaaccttttttttcttattgcacaatgccctgcccaccataggcaatcagtacagcatacgctaaataagttcatttctatgtcatttgctgagtacatactatgtgccagacactattctagaaacttgggcaatatcagtgaattaaaaacatcagatttgtttaactgaaccgatcccttatagagctgatgttctaccctgaaagtaggaggtggtaaaagacagataataattttttcctccttccttccttccttccttccttccttccttccttccttccttccttccttccttcctctctctctctctctctttctttctttgtcttgctctgtctcccaggctggagtgcagtgctcactatatcctccacctcccaggttcaagcaattctctgcctcagtctccagagtacttgggattacaggcacccgccaccatgcccggctaatttttgtatttttagtagagatggggtttcgctatgttggccaggctggtcttgaactcctgacctcgtgatctatccgcctcagcctcccaaagtgctgggattacaggcgtgagccaccacacccggccaaaatttttttcttaaagtaaaccatacaatgtgttacaaggttatagatgctattaaaaaaaaaaagcagagttgaatgagggagactgggagggaggggcgaattacaactttaaataggtggaatagggtaggtcttattgaaataaaacttgaaggagattgagagagttagcaatgtagaatggatgttcccaaactgatctccctgcagccgggtagaactagttccctttccacttcccaggccctagggataatgataggaaaaataatagcttaatatcctttgaatcccagcagggattctaaacactttttctgtatgaattcactaaatcctcatagccaccctaagacagagctactacttttatccccattttcatatgagtaaactgaggcacagcaaagttaagtaacttggctaataaccagagtatgggaagaagaggagctgctgtggagaccttgccattttggctccaggctttggctcttaatcccttagacgagcctcttttaagtctcctccctgctcattgtcctctcagtttcttgccaggcacggtggcttatgcctataatcccagctctttgggaggccgagacatgtggatcacttgaggtcaggagttctacaccagcctggccaacatggtgaaaccctatctctactaaaaatacaataattagccgggtatggtggtgcatgcctgtaatcccagctactcgggaggctgaagcatgagaattccttgaacccggggaggtggaggttgcagggagccgagatcatgccactgcactccagcctggatgacagaggggaaactgtctcaaaaaaaaaaaaaaagattttgtttcccaggcatgtgtcccatgcccagtctctttcattgtgtgtgattcctgggatgaaatttaaagcccttcatcattctagggcttctgttgaggatcttttagctttacctaatatcgcaggacaaatgagacacccagaacttcttcaacccgctctcatgcccacaaccaccgtaacacataggttttgtagggtcgcaatgaccaaatcaaaaaatgaaaatgagtcttgctcagttttgagataaaaggacatgcacatctttttcttcagcaaatgtcactgtggtttcaaagcctatgtgtgatgtgcgatcgggcagcatttttaaagtatttcctgctcaaccatagggtgaaatgatgcaggtagtgagtcctgcaaacagctgcactaaattcttaacacctgcaaaaaacaacaagaacaacaacaaaacaaaacccaacagttttcaaaataattatgcattatttttaatttttggcttgttgattttctgtggtttcaaactctgaaggaccctctaattcatgaaacctgcagttagaaaatgagtttgggagctttaaaagaatttgcaaacaagggaaagatttcacttgcattatattttcatcaatgcacttaaaacaacttctggaatcgccagagttccaggctccactcctctcttcagctccgccctgctcctttttaagtgagccccagaatcacctcttggcttggcagtttcccattgcggggcagctgggccgggggcgggggtcggctgcagatctcccgttgtgtgagagaaacgcaagcacggagctcccttgacctgctgcatcctcctcggcaattttttttttttaagtcaaaaagcttggatttcctgaaattgttgaactggatgtaagtgcagggcccccctctccgctctccccagcagggtgagagttgctgaaggggaggaggagtgagatggggtgaagtgagttgggggacattggagagacactaaagctaggtgcccgggacaggaaaagtgggaggagaaggaggaagaggggaggagggggagaagggggaggaggaggaagaggaggaggaggaggaggaggaggaggaggcggccgtaagatgagagaggagggaaacgtgtcaccagcccggctgtgggagctccgcggccgaagcgtttgttgactcgcgctggagaggaaccgaggctggacgggaccccatctgagggcagagctgggggaggagggagggacggagggagggagagctgggcagagcgcgacggggagaaccatccaggtcgctcatttctctccggtgagaaaacttcctcgggaagaccggaaactttttcctaggcgcgcggagtctggggcggaggcgagcggcgggtgtgcgcgactcggggtgattcacgccggggaccccaaggaggtgagtggtgggtggggggcgtctctgggaggggccggagtcataggctcagcaaccgcgcaggattgagcgaaaattaccgcgcgctaatctgacggggcgcggcgtggcgggggtaggagctagggaaaagtgtcacgtttgggggggcaaccaggtgggaactcctgcatggttaaggatcctccgatcggacgctgcaggcaggcgtaggggatcttactcgagaccaccatggtggggaggtgggcaggccacgctcccggtctgctctttagggtggttgaagtaccgccgtgaggtgggatgcggatgctggtgatcatgggacctaggctgagccgggaggtcgaaaaagaaagtcggcttgtttgactctctcgttctccctctggggggcaaatctaaagagctgaccccgcttaagcacgggagatttcgcgcctgcagcagccttttcccggcggtccccctttttctggagggaggcgtgggagagaagggcagggcagggagccactttgtcccgtgcgctgctgcacgcgcgcgctctgcggactagggtgggccagggcccagccagtggggatcccgccgggacgggctgtgagcaagccctgggacggcccggctgcggaccccgcgctgggagtccgcagtatcccccttccgttttatttctcccgcctgccttcctttcggcgaggctttcctctgcgcgcttactgtgcgcgcatgccgggctcgctgcacgcagggggcgctctaggggccccgcccgggcagctgggaccctgcctgcccaaccctccggcccattttccttgaggccgccgcccggggtgggaccaggctgtgtgcttgctaactgtgcttcaggaatccgctctgggatgccttcctgtctggcaaaaggggttacccccagttctacccagtccctgtcctcggtcacatgctgccgccgcctcttcccccgcggtgccgggagcccgcgttttgtttgtcagcagttaggcggtgagtatttatagacgccacggcagtcctgcggtgcgcaaggtttcaattactgcgatgcgccccacaagacgaaaggttcacgcgctgcgtctgagctgcacgtctgccccggagacccgcgtggaaaaagctctgggctggaatctccgggcttccctgcttgggcagaattctggacctgttgcccagacgacacgtgcacattcagatgacccatgctaaggaccaaagggatgccaccggcccaatgtactgccttcatcccccaccatcctcaagggacccttgctgatcaagcccgggagactaccctttttgacctctctttggtgatcctgaccaccgtagaaatttgcagtcatgacatttcattgccctacatactgcaaaatgtcaaagtgctgagctgtggtaaattgctctggggtggaaggcgctgttactgacaacacgaagcagctagcgggtcaggaggggaaatggagcttgcagaaactaatttagccacatttaaaatttagcccctggtaaggttcccagtatgactgacgaaggtgcagggctcctgtctgtggaacctggctggttagtcttctctggttgcagccctagaatcaggatcaagggtgctgtttagagcggtttctgtagcatgtagcctttcagataagggaagtgatgcttggtcaatccacaaagttgtcttcagtttttccaactgcaaccattgttctttgagtatgttactgatgcttctaacaactggaaccactaatatgtaaaagaagaaaggcactagaaataagaaagtctaactagcttatttctcaaaggcttagtttagactactttgtttctcaagggtgggacctcatttctttcaggtccagagggccatggatatatatttatttctgtgggtgaaatttcaataatgttctgtcttagaacattacaaatatgtgccacttgttttaaaaaggggaaaggtgcaaatgcctcttgaggtcttaatgatgtcttaaactttgcactgagagactttgataatattatatactcctcatgcaaacaatgatataggtactattatatccctatcatatagatgagcccactgaggcttggagaatttaagtaatttgtctaaagccatacacacagggatggagctgagaatggattacagatttgttactccagactcatagtctggacatgtctttcccttcaattctccattgttgattagctcacgttatagttgattagatggatggctttttatttattttcaaaatttcacagaatgttacaaattggctcagttattggggaaaaaagccctaatcttgtctttagaaaactgttatattggttatctgaaaatctcttgctgatagtccagacctaaatcataatcctcactttgctccttgacttaatgtatcttcagcattaaagccatttatctgtagaaaattgaattcagtaaggactttgtggattacttaattttttcagatttctccatactaatgatttgtaggtatgcatgtgtctgttttcctgtggctgttccttttgtacaaggtaaaatatgctgaaatctctcttaaattgcagcctttttccttttcattctttttgcagagctagacccaatacagaattgatttgaaaaacagtgtgtgagttcctctgaaagatccttacaatgtctaatgttcatcattaaaggtttgttctcaagagttgcctctctgtatgtaaaatgtaaatacatgttaaaggcaatgcttgtagaaatgaccctttgttaacaagtcagtgtgaattaatattttagttgctgaaatataggaataaaatattttgtggattttgtacagaatattatggggtttggaattggggaacaaagagagcggtaccctgataagcagaaagcactgttttacaagagaagatttcacatggagccaaggagggggatggatggcagtgatggggcatcagaggtgaatttgagttaattcacatttttgtcagtacctggggatccaagatttactttgaaacttgtacagttaaaacaaatgagctgacttatttattgggcaacttctgtgagtcaggtatagctatggtaatggtatttgcgcctcccaacaactcaggtaggaaggtattattttctctattttcagatgagaaaacagaggctcagagagggttgttaatttcccagtgtcacacagccatgaactcaagcgtcttgctcttttcagtacattttgatatctacccttgaaggccttccatggagaacccagggtcccaagttctcaagaaaatcctagtggttcacatggaagtttctggatcagaagtcaaggccagagctattcagggactctaaaatgaggagacaggaggtgggtgaacaatgaagcctgaagggatagtctggataattctgacagtagtgatgccacagaagaaggaaagtcaggcgctgtggatattgtgaatatagagaattactagcattggcctgggcgaggatggctgtcgcattgcagaacacactagatgaggttcccagaagggaagagtggtgaagtgtctccacctccctcccgatgccttctgctgcccggtgttggctttatagtcaatataaattagggagcctgtgggacctgtttgcattttaattagacttggccctttgaggttccagtcactcagtctccctctttaaatattctttttttatgctttgccagtttatggcctttgtagattaatcctcggatttcatgtacgggagagagaaagagagaaaaaaagcaaaggttagtgattacctaaattggattaagttctgtctagcagcatttaaagaaatgcctcttgctccctaattaccatcaactaagaatttaaacggtctattaaatttaagctgacttttttaaaaaactccctgaaatttccagctgtaacatattctgagattttagaggtttttatatattcttcaaatgtgtagaggacattctctgctttcccccccttttaaaaaatattgcatttctggagcaggataataaatgacatcactatatactaacttcgttaaaaagcagaagctcacagctaggctcagctagaagggtttgtggagagcagtagaaatccatctgaccgtggcctacgggaagaccttgtaaacatctaccccctccaaacaacctgtcattaattatttgttcaatttatttagcatagaattatatgttacataaaattatgtatttactcgtgtattaaacttgcaaagctttcattcttctttttctcccctcaattttgaggtgcgaatatgtttccctcacccacacatcaatattctggtttcactttagctggttaccaaatgccggcaacacttccactttaccgttctctccttacattacctattacagaactttctccaactttgctggttctttttgacacaggatgtgtcctgtattttgttgatggcatctttggcagcagttgggtttccagcaaatactaggattaagggactgcaatggactcagctgtttaggaactggagtatatgttagcttaagttgagcctggaagaatagctgaaaggatttgtttttatctttttcccaaggacagggggcagggtaggggtgggtggggagggggagaaaaatctaccattggctctgatgtgtgtctgtatcagacttaactaagctgcctcaaaccctgtcacaacctgcttgtgacctcagccacataaatccttggtgtaaacccttttatgctgccatttaattctaaatacttctctggaactggctcaatatcattccccagatgtctttgaggagaccacatcgactgctgccatcattttggagaactgtttcatcatgctagctcccggacaccaccactatggaagcagtatggccactttccttgtaaaacatctcgcaggctgaattcttgggtaaacatggtactcttttgtggtgtttgggataatttttttttaaattattcaccaacaggacaatagattcctttcaggcctcaaaaaagctccccaccagccgggcgcggtggctcacatctgtaatcccagcactttgggaggccgaggcgggtggatcatgaggtcaggagatcgagaccatcctgaccagcatggtgaaaccccatctctactaaaaatacaaaaaatgagccgggcatggtggcgtgtgcctgtagtcccagctactcgggaggctgaggcaggagaattgcttgaagccgggaggcagaggctgcagtgagcggagatcgcgccacttcactccagcctgggtgacagagtgagactccgtctcaaacaaaagaaaacctccccaccaaggttggtatcaacttttcagagaggcagggttgttgaatgagccctcattttggtcctaacgggcatcatggagataacacaggttgaggaattgagatctggaatctgatctcagctctgccataagcaagctgtatgaccatggtgagttgctcagttattctgggcctcagtttccctatttacaaagtaatgactttggcctaccactaagcttccattctgttctaaaattccttgatggccaaggaagcatggtctagagctgtgcttctgaaagcgcacatgcatcacctggagatcctgttaaaccacagaatccgattcagtaggtctgggctggtgccagaatgtctaagaagctcccaggcaatgttgattctgttgattcccagactacaatgcgggtagcagggcactagagccttggtcagggcttccccaccttggccctattgatggttttggcggataattctttgtggtgggggctgtcctgtgcatagtaggatttttggcagcatccttggcctctacccattagatgcccatggcatcctccactctcatagttatgactatcaaaaagtgtctccaggcagtgggacaaaatcgcccctagttgaggacattggtctagaccagtgttatcaagcctagttgtacatcagaatcacttggaagatatctgggaagtacaaatttaggtatcttgggcccagtgaatgaaaatgactaggggagggcccaggaatctatattccttaaaaataaggtgatagagatggcctggaattcttctctttgacagtctgaaaaagtacaagatctacacctgagttctggtgttatccctccatagctatgggaccacacaggcaagttgcttaaatgctctgaaccagaaactctccacttctaaaataggaataataatagtgtctacctcctaggattgttgggggccaagtgggataacatgaggaagagccttaggaactataaagtgctgtgcagatgttagtggcaaatgttataccacaggcctctggagtttaatttttttggttcaattactttatttatttttcccagggctgtatttctttttcttgaggcttagctctgtaaccttcacaatatctcttttctttggccctcacagtcaacagctgtgtacatttgtccccactcagtcccatgccagtctcaaactggcagcccgtgggccaaactttggcatcagacatgtactgtttggcttgcattgtattttggggaaaagaagaaaacaagatgattttctccagtatttaaaagttgggagagttgacatctgaacacaggttttcagcttttctgtaataaaccaaaaggagtctgaggacactctttagtttgccacattccccacctgacccgctaatcttgttcacgttctctgcttcggtctgctgtaagcattgtttcccatcccagcattaggctttcctgtctttttctttcttttccttttttttttttttttttgagatggagtctcgctctgtcacccaggctggagtgcaatggtgtgatcacggatcactgcaatcactgcctcccgggttcaagtgattctcctgcctcagcctccccagtagctggaattacaggcgcctgccaccacgcccagctaatttttgtatctttagtagagatgaggtttcaccaggttggccaggctggtctcaaactcctgacctcaggtgatctgcccgcctcggcctcccctgtctttttctttaatcatgaccaattactattcccttttattattatattattgtaggagccatatctggctcatctttgtggcaagagtagtaggtactccctagatatttgttgaaatgtgatattttcatcctacacctggtctttcatagttaacaccttggatacaccttgaacttttaaagcttcttgcctatgaaaacttgttcttccttctcaaaatttcctttccagtctccaggccccatattctttagtgttatgggcaaggaagtagagaacctgtagttttcagttgacctttcattagctttgcttcgtaactccagaatgtgagttaacctttctgcctcaatcttgtctcagttgtccatcttcaattacagcccttggtgtctgcatttatagtattacttttggatatttccttagaaaccctgagctccctgggagaagatgatttattcttctttgccccctgtaacttcctttactcagatcctggcatccagtggacactctaatgtttggttgagttaaatggacttgaattggaatcattacctccatgaaatgatcatatgtggatatttccatcagttttctgagcctctattcaatgcctgttatacctggctatactacctgagaagaaatttcccttcccttcatctctttttctcctcttttctttttctctcttctttctttctttctttctttcttttttggagatagtgtctcactttgtcacacagactggagtgcagtggcatgattgtagctcactgcagccttgaactcctgggctcaagggatcctcctgcctcagcctcctgagtaggtaggactacaggcatgtaccaccatgcctggctttttttttttttttttagagttgggatctggctagattgcccaggctggtctcaaactcctggcctaaagggattctcccactttggcctcctaaattgctgggattataggcatgaggcactgcacccagccttatctccttttcttatgaaaaaaccattttatcttatttctgccatgagagagtagagctaattttttaaagtaagttgcacattttaatctagagcacattttcccacacttaaaactcttgttggctgccagactgtagcttttgactactctttcactcaccagggttttgtatacgttacatgtcagaaatgtaattgctcactcacataatggtcagtcttagctactgtttgtgtctagactttttggcttaccatctggtaggcgctgcagaatcactctggatgacatttgggggccacacccagacaatatgcactccaagaaacttgatacttaaagtaggcttatagatgagtaaataagatgtgtggttatttcccacagctttgtttaacttgtatcacagaaggggatttttctggtgattatacagtggcttgcaggccaaggtgatgatgatgtgatgatataattacttctaggtgcatctaaattgtcagctttctgaatcctgtggacacttagtgaacaccgttaagcagagataaacacttgagcgtgtatcctgtttgccctaatatttattgttgtgcaaatttggactctcagactcttctctctgcactcggtttccagtagcgcctgagaaagttgtctcttgcttcctgttgagccctttccatagttcacagttgacccttaacattttcttgtctgtgagagtcagtgttcattctttggccggcttttgtctcctaagagttgcaaagattggtccttaatagaaacaattgtgctatgctatgtagcaggcacttctgctctgctatgtctgtaggctccactgaccagcaaacagactcaggattgctcacccatgtggtccaggtctacgtccccgtggacaataatgcttaggtggacccaagtttagtcagcagcaaagaaaattattctgatctctcagaaatgggaaggctactcttcctggtggcttggaagtgcacctttcattccatcatttaaaaatatttgggcaggcatggtggctcacacctgtaatcccaatattttgagaggccgcaatggaaggatcacttgaggccaggagttcaagactagtctgggcaacacagcaagacctgtctctacaaaaaattagctgagtgtggtggtacacacctgtagtcctagctactcaggaggctgaggtgggaggattgcttgagccaggaggtcaaggctgcagtgggctgtgattgtgccaccatactccagcctgggtgacagagcgagaccttgtcttagaaaaaaaaagtaaaactaattaaaaatacgttaaaaataaataaaataaaaatatttattgggtaccttttatgtgctcagtactatgctaggcaccaggatacaatagtgaacaagacgggcaagatttttgcctttaaggagcttccattctgtcagggctcatcagacactgaacaagtaaacaaacacaacaactgcagcctggtctgtgggtgccactaggaaacagagactccttgcttgaggggcagagtcctcttgctctaaggtaagaagctatgggtgatgtttatgcagggaagaaatgggtggcgtttaatctctcggctctgtgtgtggcacacacttgcattgtttaagacaggggtcaggagttcaggctctggaatcacacaggatttgcctcttggttcctcttcctagtcttctgcctttgggcaagtgaatccctatgcttcggtttcttcatctgcaaaatgagcctaatgaaacctacctccttggtttagagtagaaattaactgagggaatagatgcaaatggaggcttgacacagtcctgaccatcatggccagcctctgatgatagttaatattattctaatcagcagtcataatggtaataaaatagtcatggttgacaattgatttgaccaaatggccccaccacttttgaaaatctgcttgtgacctggtttccatccaatgggctggcgcaggggcaggcgtggggtccagatctagtctcctatgctggcttggagggttctgccttctgtgtgtttcctttagcagtaccttgggtgctgctggcttaccctgtatctgggtgtgtatataatacataggggagtatgtcatacataagacttcatagagaaatcggtgatgggctgcatgttctcattcataggtgggaattgaacaatgagaacacttggacacagggtggggaacaccacacaccggggcctgtcgtggagtgtggggaggaggaaggatagcattaggagatgtacctaatgtaaacgatgagttaatgggtgtagcacaccaacatggcacatgtatacatatgtaacaaacctgcacgttgtgcacatgtaccctagaacttaaagtataaaaaaaaagaaatcggtgatgggctgacagtgagataagacagctgccaagttaagaggctggtgaattagatgatgtggtaggtgggagttcaaacatggctgagggatggttctgagtttgtattgtgttagggtatcagcccctgcctcctctctcaaaggttctcagtgtgtatggctcccagggtaggggctgaatgcacagccagagatggtgaaagatcatcgtggccatcagctgggccaaaccattaattgaatggtgagtcagcagacccagagaagtgaagtgacttgcccaaggccacagggactgattagtgcaggcttaccttatacctggcttaggctccacataaaaggtctgagaaggctggaggctgtagctgtgatggggtagaataaaggtcacaaacctacatgtttggccttcaaagtgctggttggcctggtgaattagttgccaacacttacaaatccagtgatttcacatttctaaaaatttggatttttggactttcttgggaaaaatcagatctggcaaaaccaggcttatatcctaagatggcaaacaccagatcggattgagtaatggctgcctcctttagccagggcaggtgctggtagtaaagcaagcttactgtccacacctgcctcactccctaaactggtcccagcctggccctttcggcccatttatgatgcatagcgcagaaaaaagaaaagaaattggttcttcctttcatctacttttcctgccagtgtttatttgctagcccatatgttcctgcacagggtcactcctattgtgaaataaatgctgaataaataaaattggtgtcaaatgaatgaactgtcattgctagagcccaacttgggatcagaagctgaatcctgacttcctcctaacagctgggtgactttgaagaaatcatatgacctttatttgttgtcttccttttggggaaaggaggttaggggagtcactattgcctttacatttatttatttgaagaagtaaggcattttcatgtttctgaattcaaaaagtccaaaagggcttatagagaaaagacttccctactgtgtcgctgctacccagctccttgccctaggggaaaccagtgttatctgttgctggtttgcccttccagagacattttacgcacatgcagtgaaaagggtaaatgctctttttaatcctttttacatagatggtagcataatgtacacgtggctctgtgtttagcctttctttcattcaaggtcggctctttctttcttttttttttttttttttgagacggagtctcgctctgtcgcccaggctggaatgcagtggcgcgatctcggctcactgcaagctccgcctcccggattcacgccattctcctgcctcagcctccggagtagctgggactacaggcgcccgccaccaagcccggctgatttttttgtatttttagtagagacggggtttcaccgtgttagctaggatggtctggatctcctgacctcgtgatctgcctgcctcggcctcccaaagtgctgggattacaggcgtaagccaccacgatcggctcaaggtcggctctttcttagagctgcatcaccttccagtatatgggacaccatagtttacatatggccagttccctgttggtgagcacttatttccagctcattgttgttataaagaaggctgcagtaaaaacccatgttacataagccacttgacgtgccttgaataaaattcttggaaatacatttgttggtcagagggtatggcctttgtcacttcggtagatcttgtcacatttccttccacagcagtcaattcagactgctctccctccagccatgcgttcaagtgcctgtctccctcaaccccaccacccatcaccttgcaaagcctaagagggttttgtgaagaacacaatgttgtataaaaatattaatactaactatagctttttgcgcccctactcagggcgaggccgtgatctaggttatctcattttcatcttaacaacgtgcacataagcattacaaccatttgacagacaaggacactgaaattcagagcctatgaggaacatacgcaggtcatccagctaataagctgtagaggctggatttgaagccaagttagtcagatttcagtaccatggtgtttacccatggtgaagccccatgtatttttttttttttttttggtagagttttgctcttgtcacccaggctggagtgcaatggcacgacctcggctcactgcaacctccgccttctgggttcaagcaattctcctgcctcagccccctgagtagctgggattacaggcgcccgccaccatacctggctagttttgtatttttggtagagacgggggtttcgccatgttggccaggctggtctcgaactcctgagctcaggtgatccacccgccttggcctcccaaaatgcccatgtaattttaaatgttgatgttctgagccgacacctgcttatggttcctgtctctcagcaatgatgcctcacacacagctggctcatttactcattcagagaatatctgtggaattcctgcttcactaggccctgtgctaagccctggggatgtacctgagaacatgacagacagtgcctgcccttatgggcctcacaaacctataacaaataattctgtagtcatttattaaggcagattatgacaagacgacaaaggaggtggggagggtgctctctggggtggtggaacctaatcaggggtgaggagaaaggagggtgtctctgagcaagtgaaggtgggctataaagggggtgcaggtttgaacctggagagttgggtgggaaatatttcacatagaggccacagcacatggaagggtcctgaggtggggcagagcaggtgctggtggaagacatgaaggcaggccaatgagcagacttcagagtggtgagaagtgagcctgtgaggatggagtttgtgaatttattctaagacttgtggggaacagttgaaggcatcgcagcaaagagtgacataagcgttgtgggctatggactgttgggttctagttccagcatcgtttctcatgagatgtgttacctgagacaagttaaacactctgtacctccatttgcctttctgtaagctggggctggtaatagcacctgccttctggtggttgtaagatcagacacaggtgcttccaaacaggtgctttcatgtagttttgagtgccatatgaggtatgaaataaatgaggcattttaacccagtaatcatgaataaatttattttctccaaatgtgatgcactccgatattttctattccatttcactaaaagtcaagaccctctaagttcatttttaaaatgctgagataatacatgtcaagtgcccgcctcacagttggcagtcagtaaatggtgctatcatgatcatcaaggttgtcattagaaagaccattctgactgcaattagagaatggatcagttgagtttgaccgatcattatctaaatcctggtggtgtggaaggacattgggtcattcctgtgttcatggtccagggaaggatttgcacgctgggctttctgactgcagaagcttccgagggttgtgtgtaaaagaggccatctctcttgtttccgtggtaactagtttctccttgttttccaggcaggcacatcagatggcatggctgttttctttgacttctttgttacttacactcagaatggctttttcctggaagcctcagagttattataagccacccacttctttattttaagttgttgggccatgattctacttcccttttcagagtcaaaggttggagccctagtggaattcatttgcattttccactaagtgcagcatcttcctctacccactgccccagcaggcagggctgtgccccatctccatgccctggcgtggcagctgtgaggagaaagtgagatgacacattctttttctcctagaaacacatcttggaagtttttgatgaaactcatataagctgagtgttagcaaggcctgtgatacctcccagtaaccctgtaactgccaccgaatttcccggacccagggcctgggctttccagataactgaagttaaccctttcagcaccaaaacttttaagttgcttttgaaggggatttttcttaatgtaaatggcattggtccttccgaaagaaatatggaccaaaattctagtttctctaacttggagacattgggcatagaatatttcttttaatttttaatttttgtgggtacttagtgtgtatatttatggggtacatgagatattttggtacaggcatgcaatgcataataatcacatcagggtaaatggggtatccatcacttcaagcatttctcctttctttgtgttacaaacattccaattatattcttagttattttaaaatatagttgactgtagtcaccctattgtgctatcacgtacaagatcttgttcattttacctaactatatttttttacccatttaacatccccccttcctcccaccacaactaccccttccaagtctctagtaaccatcattttcctgtctccgtgagttcaatcattttaatttttagctaccacaaataaatgagaacatgtgaagtctgttgttctgtggctggcttatttcacttaacataatgatatccagttccacccatgttgttgcaaatgacaggatctcattcttttttatggatgaagagtactccattatgtacatgtaccacattttcttcatccattcgtctgttgatggacacttagattgcatacagattttggctattttgaatagtgctgcaataaacatgggagtgcagatatctcctttgtattctgatttcctttcttttgggtatatactcagcagtgagattgctgaatcatatggtagccctattttttgttttttgaggtacctccaaactgttctctatagtggttgcactaatttacattcccaccaacagtatatgaaggttcccttttcttcacatcctcaccggcatttgctattgcctgtcttttgcataaaagccattttaattagggggagataatatctcattgtagttttgatttgcatttctctgatgatcaatgatgtattagtccattttcacactgctgtaaagaactacctgagactgggtaatttataaagcagagttttaattgactcacagttccgcatggctagggaggcctcaggaaacttacaatcatgggggaaggcaaagggaaagcatagtgacaggagagagagacagagagcaaggctggaactgccacacactttaaaaccatcagatctcatgagaactcactcactttcatgagaacagcatggaggaaactgcctccatgatccaatcacctcctaccaggtccctctcctgacacatggggattataattcaacatgagatttgggtggggacacagagccaaaccacatcaaatgatgttgcacatcttttcatatacctgtttgccatttgtaggtcttcttttgagaaatgtctattcaggtattttggccattttaaaatcagattattatatttctttcctatagagttgtttgagcttcttatatgttctggttgttaatcccttgtcagaaggatagtttgcaaatattttctcccattctgtgggttgtctcttcaccttgttgattggtatcttttgctgggcagaagctttttagctcaatgtgatctcatttgtccatttttgctttggtttcctgtgcttgtggggtattactcaagaaatctttgcccagtccaatgtcctggagagtttccctaatgctttcttttagtagtttcatagtataaggtcttaggtttaagtctttaacctattttggtttgatttttatatataagataggggtctagtttcattcttctgcatatgaatatccagttttcccagcaccatttattaaagagactgtcctttcctcagtgtatgttcttggcacctttgtcaaaaattagttcactctaaatgtatggatttgtttctaggttctctattctgctccactaatctgtgtgtctgttttttatgccagtactatgctgttttggttactacagctctgtagtataatttgaagtcaggtaatgtgattcctccagttttgttctttttgctctggagactttggcaattctgggtctttcatggtttcatataaattttaggatgttttttctatttctgtgaagaatgtcattagtattttgattggaattgcattcaatctgtagactgctttagatagtatggacattttaacaatatcgattctttcaatcagtgaacatggaatgtctttccatttttgtgtgtgtgtcctagaagaggcaattcggacataaagagaaacatcaagggcatgagtgcacagaggaaagaccatgtgacggcatggctacaaggcagccatctgtaaaccaaggagagagaccccaaaggaaatcaaccctgctgacaccttgatcgtggacttctagcctccagaactgtaagaaaacaaatttctgttgtgtaagccatgcagcctgctgtattttgtaatagcagtttgaacgggctaatacaggggtagtactaatggaggcaataaaagaaaccataggtagcatttatcaagcacttgctgtgttcaaggagtattctaagccctacttgagtcatctcatccaatatcttgcaaatcctaaatcacctgctcaatgccccacaggaagtggtgacaccagcctgactcgggtgccttttctctcagcctccactgcacctgtgtctagcacctatacagttccaggaaccatgcaaagtacttcatagacaatctttctggtcatcacagctctccaaggtaactcttcctattctcacttttcagatgtagaaactgcagctcagagatgtccaaggtcacactgtgagtttattggtttcttgtggctgctataacaaatgaccacagccttcatggcttcaaacaacagaaatttattctttcatggttctggaggccataagtgcagaattaaggtggggcagggctgtattccctctaggggggaatctgcttcttttctctttcagctcctggtggctgcattactccagttcctgcgtctgtctccatatcaccttcttctctatgcgtgtctgtgtcttctcctcttctgtctctagtaacttctgcatcccctttataaggacacatgtgattgcgtttatggcccacctggataatctgggaccagcttctcttctcaaaattcttatctgaattgcatcttttgccatataagataatattcacaggttttggtgacaagtgtatgcatctttgtggggggtggggagatgtttttctgcctaccacagtgagtgaatggcaaagtgaccactgattttagggtttatctgcccccagagctctgagtgatacacatttgtggctgtacatccttcagagctataagcattatacttctcaacatcttttctgcaatgctatttctaggctctggtgggggtgggtattggagtcataactaagaatttctggaccctttgattcagaagttccattgctgagaaggcaccttacaaacatggtcatgtcatcccgaagacccacagattcgctcattctttacagtaaccacaaaaggggaaactccctaaatatctacccataggggactggttaaataaaatgtaatatctcctaaatggaatagtcaagctaccattaaacataataaagtagatcaatatgtagtgatatgggaagatggccatgacgtgttattagaaggaaagaaaaacattactcattcttaggatattaataagaatgtgtgtgtacacatgtgtgcagctattaacaattaaataaaattaaaattcagttcctcagttgcactagccacatttcaagttctcaatagccatatatggctagtggctaccatattggacagcacaaatacggaacatttctgtcatcttgaagttctacaggatagagctgctctatgctaagtggctagaaagaggcctttcactatgtttgttatagagttatgtgaatgcttatgtttgttataataaatgaccaagtatgctattatcagaaaaataggggcacatagagtttccaaggtaacattctatttcttaagtaggtactagttcatcattatttatttattagttattttttttaatagaaacagggttttgcttcgttgcctagggtggagtgcagtgacatgatcacagctcactgtaaccttgaactcctgggcccaagcgatcatcctgccttagcctcctcagtagctaagaatatgggcaaacactaccatgcctgaataatttatttttatttttattttttgtagagacagggtctcactacatttcccaggctggtctcaacctcctgggctcaagcagtccgcccgcctcagcctcccaaagtgctgggattataggcgtgggccactatgcctggcctattattattatttaaaatgtatgtttgcgtgtgtataaacttttaaagtatgtttcataatgaaaatattttgaaatatataggaaaaaagaaaaaaggaatctcctggcaggctcaacagtgagccaggcgtgagtctgggacacttccggccggggctgaagccctgacctgacagctttccaagcttggccaagtcaggcgcctgctcaggcctcagtttcctaatttgtgacagactgtctgctccatctgccttacaggactgaggtaagacttagaagcacaccatgtgtagaaaaacactttcaaactgaggaacttgctacacagagatgtagggtcagtaaataaggtcatgagttattaaagggctaaggaggcaagcctgggtgcactgtgatggggatggcggctcagaggacttgtctgctcctcagtggagtatttccagacgctactgcgtcaccagaagcagagggagctgctgttgtattcccactgctatcatggcttggcaatttagaaataactacgacaacatgattttatttattgaacgagctcttatgtagcacttatttgccaggtacagttctaagtgcttgacaaatatttatccatttaatcctcctccaaccctcaggtagtcactcagggtcatttcatgtgggaggaatttgagactcagagaggtcaagtaacttgatcaaggtcacacagctcatagggagtgggtgtctaaggcagctgttctttctcctttcatcctttctcaccactcctcttgccccatcaaatatggtcatagagttccttatgccagcttatttatctcaggggcatgagattgaacttttgataggaaatttagttcctaacttagtggcttcaattctagttttctggctgagtttggtagcatggaaaagtgggaatgggctggagaatgaggcaccagtcaatgatctgccacacactagctgtgtgactttgggtaggttacctaacttctctgatgttcaagttttcttttcttttttttttttttttttgagatggagtcttgctctgttgcccaggctggagtgcagtggcacgatcttggctcactgcaacccctgcctcctgggttcaagcgattctcctgtctcagcctcctgagtagctaggattacaggcacgccaacacgcccagctaatttttgtatttttagtcgagacagggtttcaccgtgttggtcagtctgatttcgaactcctgccctcgagatctacccatcttggcctcccaaagtgctgggactacaggcatgagccactgtgcccagctcaactggtattttgtgagggttgagtaagtttatgtattgtgacaatgcttggcttcatgtcagccaggcagccgatgccttttttttttttttttttttttttttttttgagagagaagccttgctttgttgcccaggctggagtgcagtggtgccatcttggctcactgcaacctccacctctcggattcaagcgattctcctgcctcagcctcctgagcagctgagactacaggcacgcaccaccatgcccggctaatttttgtacttttaatagagacagggttttgccatattgaccaggctgatctcgaactcctgacctcaggtgatccgcctgccttggccgggattacagacgtgagtgactgtgcctggcctagccaatgccttcttaattcttttccttcatctttttctttcttttctttctttttttgtttttttttgagacgagtttcgctcttgttgcccaggctatagtgcaatggcacgatctcggatcaccgcaacctctgcctctcaggttcaagcgattctcctgcctcagccccccgagtcgccgggattaaaggcatgcgcccccatgcccggctcattttgtatttttagtagagatggggtttctccatgttggtcaggctggtctcgaactcctgacctcaggtgatccacccacctcggcctcccaaagtgctgggattccaggctaagcagtgagcttagtcttgaggatatagaggtgaataaagcccgatgcctgtcttcaaggaatttgcagaatggcctaggtgggagctggggaacatgctcaaacaggtgtcggggaatagctctcacagtcctggctctcttcctgcctcgagcaccttggatgtgtttctttgcttctttgctatacctttgtcatctgtcaatgggacctggactggccccactccgaggccccatctgttctgtcattttctgacttgtcagatataggtcaggacaggcccgcgcctgccgggccagcgctgtagcaggtgaacccagggtgtatcagcgtttccctttaggccactcttgtcaatgctcccaacggcctcctccttcctccctgtgctgctctggggaggtctcttggctctgcccggcagtaggaacagtggagacaaagacagcttcacattctcttcagctgtcaggattgagagtggcggattcgggaggagaaaaatgagtcagtggcaactcgttgtgtgtgactgtgcagtttatctgagtccgcgggagccatagtcgtaggctgaaaatgacccttatttaagagaggctgagtgcgtggttgtggctgcccaggcgctttgctggactaggcagcctgggaacactaactgagaagtggacggggacaggagccagcctgcggtcctcagtgtcttacagtttcctggagaagtggatgtttcggcaggaagatggtgggtaaacacctggaacgatccattctgctcacttttctacttccctgtaccagtgccatggaatgagaggcagctccattaactcgtttaagatcctcataaagggagttaatatcctgtaattacacaggtgaattgcatttagcaggtccatttgaagaatggcagcgaaatggatcctgtcttagtagtgtgacctttactgggtgagttaaatcccaaagctagccaatttaaggatatggaaggaccttctgtggctttatttcttcatcacctcattttttggtttgtgtagatctttccacgttgcagtggcatttatgaagctgctgaggccttctgaaacttgacagcctgttatgcttcttttgttaataaagtttaacaaaactgttgaactcattctgagcagggggtgaaggggcaaagactgtacaggaaaacaggacataagtctgctttccttaaaagaaaaaagttaagagacaggacaagccatttcttttctgcctcttcgtattacaagttccttgttgctatgcctgttgcctgcagatagctgctaacacctcccgtgccctctcgatggcttgcctccatgcccatctgagtggcttaactcactcttctgaccacaacagcatgtttgatttggaggtgagacttcggttcctccttcttcaagtgctaaccagctggagctgcaaaaatcttctcccctggcaacctgaaggttgacttaaggctagaatatctttttcttgcatcattagtttttgggacatagcagagttagctggtgagagagatggcagtgaaaacacttctgggctaaacctactaaaccgtcaagtaaaaagtgactatgagattcgtggtgtttccttttgtccttcactctgctgaactctaattctcgccttttaagtcattcatttagactttagagtcactaaagaataagagactgaaattacaggtccaaaggtgtaaaggaaagaaagaaattcatctgaatggaaatagccagtccttgaggcccatggctccgccattctgccagccatgtcacatgatctcatttcatctctccagtcctggaaagtgggcattagtaacagctgaggacttcagactcagtgtgttcaaagtcacacaacttgggagtggccaagttaagactcaaacctgaagccactgcctttaaccgcgaagccatgaagtctcccagcaactgctacaaggggacagtgtccttgaacccaaccctgcagggcgagttgggtttaaataagcagagggaaaaaggaagagaattctgggcaagaggagtagttggtacgagcaaaagtgtgggggaaggactgtgcatgacatagaagagtgcctgctggttgcgagctccacggggcagggcaccagggcctctggagccatcttatatctcccagtgcctgagtggctatgcatagtagctgctcaataaatatttattgcatgagtgaatacttgaaaagactgttatcttctccataggctgagtaccctgagagcagggatttggtcttagaaatctttggatgttctgcaactcacagtggttaataaatagcaaacactcagtgagtgtgtcctgatgaaatgagtgaaggaacagcaggtaagggaaggtgagatgtgcttgagtgaagagtcactgatactttgagaaaaactgagcaatatatgcagactggcttggtaagggcatatcatggatggtcatcaatgccaggatgaggagctcttgtgtcctccttgagacattttttaaaaatccatctcttactgcacaacatcgtgggccacaggaacccaggcagtgctcaaactgatggctgcatattggaaccagagtctagcacagcttagaaatcatttttctgcaggactggccttaggctggccccattgtcactgtcttcccacttgagggtgaccacactgttacaaccgaaaagagccctgtgcaaacttgtgaatgggaacctgccagggaatagatgctattgctgggtcccgcagttgttttcggggtagttaggctggaaagtcccagccaacttcctctaagaggtgttctcaggccaggagttctcaataaaagcttccctctcttttcaggtgttggctacgtttgtggttttaagaaagcctgagggcctgaaggcagcccctggagaagccctttccgagggcattcggaaccttctggtcctagaggtgaagctgaactgtcaccaggacttatgacccgcggcttcgctcccattctgcccgtcgagttccacaagatgggctccttccgcaggcctagaccgcgcttcatgagctcccccgtgctcagcgaccttccccgattccaagcagctcggcaggctctgcagctgagctccagctcagcctggaacaggtgaaggaggctgcaggatgtggggtggagggctgccaagggccatggcagggagggaggcatccgggggctgactgagcttctgctgattctgggaaggccgtgattatgggggtaaataatgacgagagcaaattttctttttttccttttttaagagacagggtctcactctgtcacccaggctggagtgcagtcgtgcaattatagttcactgcagcctcaaacttctgggctcgggcgatcctcctgccccagcctcccgagtagctgggactacaggcacatgccaccacacccagctaattaaaaaagcaatttttttttaaagagatggggtctcactatactgcccaggctggccttgaactcctggcctcaagggatcactcccacctcggccttccaaagcgctgggattatgggtgtgagctactgcacctggccaagagagcaagttttttttaatatccagcgtgtctgttagctttctttgtttcagtagccagaaaatagaccactgagggcctctggcctgttagagtcagtttaccagactgggacagttgcactggaatttacggtcactattcatgctcattagtcacacctgaaactgtcagcctatccgagagtgggcttctataagaaaccttaagtaacctacttcccacttgggaagataaaacatgtctgtgaaaaattaaatgattggcataaacccaagattatgaagacctgtgagccacaggtgcttggaagaggaggcacagagttttgttaggtgtctagccaaccttttgtgcaccaagaattgagcagactgaatcagcactatgtcttatatgcttgtgggctactgtttttcaaatctttgcagacactgtttggagtaattaaatgcatcattattttgaagcatgactgaattctttgtagtttggatcgttatggatcttttctcttttttcttttcttgagacaatcttgctctgttacccaggctggagtgcagtggtgcaatcttggctaactgcaatctctgcctcccaggttcaagcgattctcctgcctcagcctcctaagtagctgggtttacaagtgcgtgccaccacacctgactgattttgtatttttagtagagacgggatttcaccatgttggccagactggtctcgaactcctgacctcaagtgatccacctgcctctgcctcccaaagtgctgggattacaggcgtgagccactgtgcccagcccattatggatattttaaatgaatggacacagaaagcaggactctgatgatagggatggagagagggggctccaaaatgttttggtgttaaatggatccctgttctttaaaggaaaggccaggggccttaatatagacaagattgtaagcagctcctttgctgaaacactgggctgtcgtcccagaggctgtggagtaagccctgatatggcctctcaagggactaactctactgccggtacacctcacacgagtggacatgtgaggagcctgtaaggctggcctgcgagaaattcttccaaggaaagtgctgttaaaaaggaaaggacttaccggttcatgttagctcaaggccaccaagcttccctgtgaagacagtggctgtgaaagaaccgcaggcatgggtcagcttctgcttgcaggaaatgccatttggaatctcccaggtccatgcagtttcctgcgatcagatcccactggctgcctttgactgtggctgcaccagcagggccgccagcgaggtgagggaggaagacctgctggcttgcaagaaagcgggggctgcttttgagtcctttcgcctttggtcttcctttctctccaaggacactgaggaaatggaggatggatggagagtgtggccaggtttgtgctatgagcttcctggtcactccacacaccttcagccctgagctgctattgaaatggcccaagaagggagattctctaaccaggggttattctcttttcctgtagcgttcagactgctgtgatcaacgttttcaaagggggtggcttgcaaagcaacgagctctatgccctgaacgaaaacatcaggtatgtggcaggccagacttggtgccattttcccctataaacctgagcaggggcataggggctaccgccttaggagccttaagggttttttttttttttttcctgcttgattcttattgcttcttctgtcagctatgctgctttcatggctgttgcgttctgagacctgtgtctgtctagacttctgatccatagagaatcatttgttcagtatgtagtgtgttttgtaggggaaggggtggagagttgatagatggcagctgtcatttattctgtaagcatttattgtgcccttcctaaccattaggcaccataataggcaattcagcttagttgttggaaccagactgcttgaggttttattgtgttcttccttttactaagtgacttaccagcaaacatttgagtgcgtctctgttggccaggcactggagagacagcaaggaccaaagacagacatggaccttgccctcctggaatttatattcattgggaagagaatcattagtcaactagccacacatgtgaaatgtaaacatgcaactaagacagctactccaacacagctgctgtgatgaaagcatatgttaaaatgacttgatttttgtcaaggaggccaggaatggtggatgtgatgctgctgctgtgatctgaaacatccatggaaattacctaggtgaacagggctccagttggtagaaactgcgcatgcaaagttcctctggttgcaatgagcaaggaaccaaaagaaggcccatccatgtgcatagagcaccagaagttgagtagttgtgcagttaggtctatgttttggtgaaatgagagcagcaagtcaggcagggctcagagcaccaggatcttctagggacaggagatcgatccatcaggtcttttttttttttttttttttttaaacggagtcttgctctgttacccaggctggagtgcagtggtaccatctgggctcactgcaacctctgcttcctgggatcaagcaattccctgcctcagtctcctgagctgggatcacaggtgcccaccaccatgcctggctaattttagtatttttagtagagacgaggtttcatcatcttggtcaggctggtcttgaactcctgacctcgtgatccacccacctcagcctcccaaagtgctgggattacaggcgtgagccactgtgcctggcctccatcaggtcttttcatgtcctggtattcattcgtttctggatatgttaagtgcagaacttcaaggctaaagacccaaccctggagtgggcagaacaataaacaagtccattgttctgttcctgtttactgttagttaaggcctgcattaaggtcattgaggtgttttaagagctctactttcattaaagtctttagaattgtattaaatttccatccatgttcttgaatttcacatcttacttacataaatatggaaaaagacaaaagatatctagcccaaggcctcattttacaaaggaggaaactgaggccccaagaagttgagtgacaggggcaaagtggggtcagccaacacacacgttgcgaagtttcatttttctccaagaactaaaattctggcctttccatgaggttctttagttcacaatagaagtataaataaataaaacagtgactcaggaatgtgctaattgtttttcactttgggaggctgatcctgaaattgtacttaaaagctctgtttgtggacagctgggagaggtacaggtcaagccagatttcaccagcccaggtagcccaggagctgctaactcaaaagacttcaggtaccaagcaggtcttctgaatgggtgaagctggcgtggatgcctggcagtgagatcgtgccctctgtcaaaagaggattaccctggtagaacacaggcccactgatacatctcttatttttcaagaagaactggaaattgagatgtttatgtaaattttctgacttttaaatgttggtaaataatccaaatttccccaaacattggtgcaggccaaacaaaacacatctgtggattgaatatggccaagaagctgcccttttataacaccagccattgcatgcattggggaggcattgctgcttcagagtgttgagtcccagaaaatgctaggtgcctttctcctccatcaacacattcaaccctccccacagccctttgttatgagtagttgataaatgagaaaatcatgcattagagaaattaaataaaagtcacacagcaatgagcagtggcaaaaggatttgaactcctttctgacttagatacctgtagtagtctaccggggctgccataacaaataccatagactggatgacttaaacaacaaaaatttatttctcaatgtcctggaggctgggaagtccaagatcaaggtgccggtcatttacattcctggtgatggccctcttcccgactggaagatgtgtactgtgtgtacacatgacctcttttgtacttgatggggagagagagctctctgatgtcccttataaggacactaatcatgtgggccctactcttatgacctcatctaaacccaagtatctctcaaaggcccatctccaaatcccatcaaattgggggttaaggctttgacatataaattttggggggactcatagcaacacctttgttctttgcactatattgtagtgtcagaaagagaggtcttatgttgggagaaggattaagttgatggttcctgatctttttttttttgccatcgttcctttcccgaggtctctgtgagcccatctcttatcacatcctgtgactaacactcatcatgaggagcatgacactcccccagccctcctttccagtgttggggttagggctgctagatgttcctctgtgtcttgactgatttttcagactagtgggaaatacatatggttgaggtttgaaactatgtgcccagatataaattgagcccagaataagccaaagcttaaaaaaaaaatcagagctttccttccccatgtttctgtaccttacattctagccacactattttagagaaggccagaggatggagataggctttcacatcagagacacagaatataactgaagatgtgaagtatctcccaggcattgacgtgacctggatgtctcaagttgaatgaagctagccctcccacatcagcaagtgcctgtgtggaggtaaacacagctgcctttattccagcatcttaaacactgaaataggctgctctctggttacattcaagtagacacttgggttttgattttccttttggaagacttgtttgcagaacagatctatcaactcaacatggttgaggcaggattggtggagagggtggggcacaggatggtagggatgtcagaaagagatgtgcaaacagagaagcctcagttcttcagcccatttttcagttgtgacagtcctgttatatgcaagagggtttgtgctaagtttaatggaaatttttaaccaaagagagcagtttctggattcagagagaccagggatcaagactgggctagctgtgtgaccttgggcaagtgacttcatttttctaagtctgttttgtcttttatgaaatgaggataataatagcactaacctcatggtcattgggaggattgagataatgctaaaagcatccttagcacagggtctggtaatttaataaaggtttaataaatattagccatatgattcttattactgtgaacagttaagaaatagtaaagtgatacataatgggtgagtacgaggcatgagaacacaggccaacgtgatgaattgccccatgaatagtgctgtgtataaccctctccaggccaggtgtcatgctcccacctgtaatcccagctctttgggaggctgaggcaggaggatcgcttgagtccaagtgtttgagaccagctttaatgaaaccccagtttctacaaaaaatacaaataaaatgaaaagctgggcgtgatgatgcatactgcactccagcctgggcaacagagcaagatcctgtctcagaaaaaacttctccagcagtttggatgaggtgagctcactttgaactagagagtctgggacagaatcctcaaagagtggtgcctggagttgaagtttgggtgaggctaagttcttacaaggagagccagctgtttctcctttccacagagaaaagaacaagaggaaatgactttttcagttctccattctactgaacccaaatggtaataaactttttgatggagtatccaagtctggagtcaaagcctaaatcagattctttgggtcactcatcccagccaccctggccactttctatctgtagggttagtatgtacctgggaaatacaaatttatttaaatagtagccaatgcaaaggatgactaggaaggtagatgttttatgtaactgagtcttgtaatgcagtcattattataagtggcctttccatttaagacatgtctttgaaaatagactctagtttaaatgttagcagatagactttgaagtaattatgaggaagaacttgggactgaggatggtcaaattctaaaacacagtattggatccaaagacaggtttctccaccctttaagaataaatctgtcaggccaggtgcggtggctcaccccgtagtcccagaactttgagaggccaaggcaggtggatcacctgaggtcaggagtttgagaccagcctggccagcatggcaaaaccctgactctactaaaaatacaaaaattagccaggtgtggtggtgtgcgcctgtaatcccagccagctatttttgggaggctgaggcaggagaatcgcttgaacctgggagacagaggttgcagtgagccaagatcgtgccacactgcactccagcctgggggacagagagagaatttgtctcaaaaaaaaaaaaaatccatcagaaacgtctcacctcaatatagcggccaatgttgtcccatgtaaaagtcagggcacatggtctattgatatgaaaaccataaatcagaatatttcccattgaaactgccttaggcacagcttgcacattgtaatatctctcaaggcaagaaaatgacctttcagaatagacgtattctagctaaatccccaggcatcccaatcaacaattctggcttccctaaatttccatctgccagagttcgggctgattctgggagtcttcttgttttgaattctcaatggggtgttagtgcggtttttaacacccctctccagcctcacccctgatgtggctgcattttggcagcgaggaaaagtctgggttagaggtttgggtttcatgagcccttccaagaacaagagcagctaagctgacacaagagcacactctccctaaacagtcttttctgccacctctcccactgattttatgtaaccgagaagaattagaaaagtgtgaaaaaagcaagactgatgtttgctggttctttgaagaacctgcttgccaatgttcttataagtgctttcagtctttgagtgttggggtgtgtgtgtcgaagcaggggccattgattcattgatttatttattgaataaatgtggagtgctctgcccagtactgggctgtatactggggtggtcattgagtaggtggtttgtgtcttggagatcttacagcagaatgagagaggaactgggcaggtagttctcaggcaacgcttttagaggggtgatggtggaatctggagtgctgggggcatgtggaggatgggcacacaattagacctaggagaaaatgatatccaagttgaaatcagaagtgggagcaggcagaaagggcagttgaggatctaacgttcttgccaccaccactcactccatgccctcctgcctcctcaaactccctgggaggactttttctcggcagaaataaatgctcagagatgaagtttccggaaaccagagatcagttatctgcagccggcctgagacaggaaacgcacattttccttctctctccaaccaccctgcttctgttcttgttgggaggggggaggtggtgtgaagaaaaccccagagattttcaaggaaagaggaggttccaagaattgtgtttgatctctgacaggtctgagttgaaatatcttccttctgagtcagttggttgcctgaaacccaaagggaaatccacctccgatttttccatctctttaacagagtgttgactgtaagagagggggacccacagtaggggggaagagctgggaggggacgggaggaaggtgagcctggatccagctcacaggctgatgccatagaccagtcccaggcctgatgccacgaggtaatgataactgcagacacttgcttagccttttagtatatgccaggttccaagtgcttcatatgtgtcaactcttttaaaactccccacaccctgtgagatagatactgtatccctgtcttacaaggaggaagtacagatacagagaggtggaataactcacccagagtcatgtagccagtaagtgcctgagctgggatttgaacccaagcctcccacatgcttaaacccttagtaagtgggctgcaagagccacacagagctggcattatccagatttgggcttgatgtacctggacataggttcatgaatagatcatgaggtaaggggggcattgcccttctgaggagcctagttttggagggattaagatgagggctcttcttggtctgggtgactctgcctgatgatgtgttactaccttgtacctgctgtggctgagaaacagacttggctttcaggttaagaagggttgttagaaatggcagattggaaacccatggggttggcgcatgtggtttggcctaaaagttgtttagaaatctggacatctcacctagaactccaggtttccggcctctctggaaaggtcagatctgggcactggactcacggtctggtgtggagcctgtcaggggagctgaggcctggctgctggctttagagggactttcttggtccttacagtacacactcacttgcctcccttctttgcctgcctgcccctgtggcatggggggtaccactgcctgattaggttggcctccatttgagttgggatctaccaatgtatggcccctggcaaagctctgagcatcgatcttatctgcaaaatgaggatacactcctacctgtgaggctgttggagaatttgagattctgtgtgcagactgccgagcatagtgtgccacataactaggagctcaataaatgctcttcgtcagtttcctccatgtttctcactattcccactgccacccactaggatgccgacacccgaagggtgtgagtactccatgtcctgagtcaaggacaccacctcccatgggctcccatggaatggaccagagaaggggagggggcctttctatctgttcctgcttaagagaagctgcctccttgaaacatatcctattgcagaagtgaggtgggtgatttcagagcattcagcagtcaggctagatgggcactgaccagctacagcactgggcacaggactctggaggacccctgctgttcctggatcttgaggcggtctgggcggatctcaccaaagggccagggtgcagggccagagaacttggggcaaaccctacttgccagatggcgcagaaatattaactactgatatggttattccaactcatcttggctaacctgcagcacttcttgcaagctgcctcatcgtctttaacctcatgtgggaagagagttgggacaagcagcgggattttgccaccttgggtctttctctgtgtgcaaggcagactgactccatccgaggtgatttccctctgtcacttccgcgcttgcccactctgctgccatcctgctgtccctgcgcctctccaccagcttgattccagcttttagtaatgcctcctttacctttaagcccacagaagtgggaagttgagttgacaagacggtgaggcgtgagatcgcaggtctgtgtaataacaggaaatcctgtcaactggggtggtgtctcagctggtcagcctgggagggagaaagggtgagataatgtagaccagtcagtgcttccccattttttccccctgttatggctccttttggcttctggctgaacttcacgcccagtttctcattttggtcaggccccgtgtaagtgtccccttcacattaccctcagctcccggcttccctttttctagctcagtggcttgtggtggtggttggtagcagcagaattctgttttcaaatgaaaccaggcatggaagtccaatatgtgaaacagatggcatatgggggctgctgaggctgaggggttgctttcatgtcagttacacgtcccggcaattcttttctccaaagctctgcctccaccttcctaccttcttatcctttcatcagctagtctggccctacctaacatattacctgctttatgaatttctcctgggtcctcaatcccagtgtaggaaatgctagtgtggctatacttgtaggaagatgcgagaagcagtgggctggagttttcaagacccagggcttcagagtcctgggtgaaatcatagtagctcatgcttgccaagccttgctgtgggccaggcagcgttctagcaatttgatgaggattaacccattttacttgtgcagtaatcctgtgaagtaggtatccttatcctccccacattctaggtgaggaaactgaagtatgaagaatcagtgaattttcccgggtcattgctaacaacagctactaagtggctgccaggatgcagagccaggcagctctgggctccctgatctcaacaagacacttgttatctctggcctgtgcttgcttgggtcagtttccttgtatattaaaattgaggatattattgctgcttacagttctgttttaggcttaaatgtgggaacgcctacattgttgacagtggtgtccagcacccagcaagtgctcaataaactttaattggagaaaaaaatgccgggttccatcctaggagcaatttgtttattattcgttatgatgatgatgattgtttgttctaacaagtaattgcttttctgttgacagggcagcaaccctaggatagagtgggaaaagcggaaggaaggctgccagattctaggcctgagcctcaaaggagcttatggcctaggtattaggaatcgggattttcatcttccctgcatctagggaaccacaaaccacagcctctttaatttggctgtctctctccagcttttctcttctttcttgttctttacaaattaaattggtaaaagtaagtcaggctacagggtgaattgtcccattgtgattttggcctaggtgtctaatgccttgatattttttactgtcatcttttgggtaagatgaacctcctgtgccctataagagagtggcccagatcactctctcatagggcccaggagaaatcattgagctctgtttcatccttttcttctagcatccagaaccatgtctaacacataacattatgttttcagtaaatggctaagattcaaagaattaatgaatggggtctccactctgagttcctctttttttggtggggggaaggtagcttttaagtgaggaagcgtctgccaagttccactggagatggtgtatcggaacagaggtgtggaaaatccccttctctcaattcagctgagacaagaatagaggtttttttcagaagcattctttccttataaaccaatgcaagcagaataaacagagtatatacatggattgtagatttgtaacatgactcagccacagtctgctcacaggctggcctagccagcactgctggggactcctggccccctttcctcatctcttcactctctatagtcctgagaacaagggttcttgggttaccagcttgaggcaggtctggattggtggattcccaggacttgtgggattctctgttagctggtacacaccctgcttcctgatgtcatgaccttggtagggacttactcctgcgattctttctcgggcttctggccatgctgcggtaaccttggtggtggttattaacttcagaatcttaaaaatttgtttctgaataggattgttttgacatggttcaaaaattttacgcatatagcaagggtatacagtagagtctccacccctgtatcccagaaaccagttttccattctcttttccttaaagataagtattagtaacggtagcttattgggtattcttccagagtttctttatgcatgtataaggaatacatatggaaacacagctgatgatactgtatactttattttatttatttctattttttattttattttattttattttattattattatacttttagtgtacgtgtgcacaatgtgcaggttagttacatatgtatacatgtgccatgctggtgtgctgcacccattaactcgtcatttagcattaggtatatctcctaatgctatccctcccccctccccccaccccacaacagtccccagagtgtgatgttccccttcctgtgtccatgtgttctcattgttcaattcccacctatgagtgagaacatgcggtgtttggttttttgtccttgtgatagtttactgagaatgatgatttccacttttatccatgtccctacaaaggacatgaactcatcatttttttatggctgcatagtattccatggtgtatatgtgccacattttcttaatccggtctatcattgttggacatttgggttggttccaagtctttcctattgtgaatagtgccacagtaaacatacgtgtgcatgtgtctttatagcagcatgatttatagtcctttgggtatatacccagtaatgggatggctgggtcaaatggtatttctagttctacatccctgaggaatcgccacactgacttccacaatggttgaactagtttacagtcccaccaacagtgtaaaagtgttcctatttctccacatcctctccagcacctgttgtttcctgactttttaatgattgccattctaactggtgtgagatggtatctcactgtggttttgatttgcatttctctgatggccagtgatgctgagcattttttcatgttttttggctgcataaatgtcttcttttgagaagtgtctgttcatgtccttcgcccactttttgatggggttgtttgtttttttcttgtaaatttgtttgagttcattgtagattctggatattagccctttgtcagatgagtaggttgtgaaaattttctcccattttgtaggttgcctgttcactctgatggtagtttcttttgctgtgcagaagctgtttagtttaattagatcccatttgtcaattttggcttttgttgccattgcttttggtgttcagacatgaagtccttgcccatgcctatgtcctgaatggtaatgcctaggttttcttctagggtttttatggttttaggtctaacgtttaagtctttaatccatcttgaattaatttttgtataaggtgtaaggaagggatccagtttcagctttctacatatggctagccagttttcccagaaccatttattaaatagggaatcctttccccattgcttgtttttctcaggtttgtcaaagatcagatagttgtagatatgcagcgttatttctgtgggctctgttctgttccattgatctatatctctgttttggtagcagtaccatgctgttttggttactgtagccttgtagtatagtttgaagtcaggtagtgtgatgcctccagctttgttcttttggcttaggattgccttggtgatgcgggctcttttttggttccatatgaactttaaagtagatactggatactttctacagggtctgtggactagactgggttctggtgatgtggtgtttgtgggacagcatcttcctcaaacttcagggaatcaagctggctaaagtgttgtgttgccttacgtaatttccagcaacaacttcaagcttctccaaggctttacatgtagacatagagaagaggacacacaacccagtgcttctttacatatgatttttaaaaatgcatctgtgggccaggcacagtggctcatgcctgtaatcctagcactttgggaggccaaggtgggcagatcacctgaggtcaggagtttgaggtcagtctgcccaaaagggtgaaaccctatctctaccaaaaatagaaaaattagccaggagcagtgttgcgcgcctgctctcccagctactcaggaggctgaggcataagaattgcttgagcccgggaggcagaggttgcagtgagctgagatcacaccactgcactccagcttgggcaacagagtgcaactctgtctcaataaaaaacagttaattaattaaaaaataaataaaatgcatatgtgttctctgtgtttaaaaatcaaggagctatatatttcaattctaagggcctatggggaaaccccttcatatagtaatacagacttgaacagcaagttataagagtggaattgaccaacaaatatgttagtgttgtgtaaactaaaatgtgtattcttatttttctcttcccattttacaaggtagcctgttgtatgtacacactgttctgtatcttgcattgtttctttgcttactatgacttagatctttcatattatttagagcacttcttcacaccctttttaaaatagttgcatagaattccattgcctggatgaacataatctttttattagcactttattggtgcatatttatgttgatttctatattttgctgcaatgaaaaactctgcatatatatatataacatgtgaccctgtctaaccatgttatcatgcccagacagaaggcaggattttgtaagggataagggcagtgtagcttactgatttgcccaggtagagcaatagaatcttgacttaaattattaagaaaggtcttttctgttcagataattctatgaacagtacctagtggagaaggttttgcattctggattttataaaaggacaagtgtgtggttctcctactgtacctggctatggcccattacatttaaagtatataaagcagattaccacatcgtgtctggttcctcctcagtaaagaaatggttatcactatcagcatggcgaaaggcccctcttcatgttctacttctttattcctaaccattaccatctcatcccccctgttacagctgcttctagcttcagagtcctttctgctaagtctttgtcttggaagttgcattgtctgctctttagcttctgctctgttattggctgatttctacctagacttttctcttcctgggacactctgcagaattctggccttggctgtggcttgctgcaccctagctgcaatgtaaggctgctgtgcttccaccctccctgtagagtgaagccccttcgtgccctccctgataggaggggaggagatgtcttggattcctcaactgggtagcatcaggatgcttttctgcatcccgctgtgagatgcctggggcaacctttacttgttcagtcatatctagcccaaactcacaattattacaccatcatagatccctcctccgtgctgctctccaggagtgtgtccatagttttttattttgaagtcccccttaaccccgacctttttctttttcaatcttacccatggcatcttcatgagcatagtgttttcccactgtgggttccttgggacaccaattccacagcgtattatttgatctcagaagcacattagtccctcagcatcatgagtacccaagatatctccttgggaagctctctcctaagtagcctatcagtaggacttgtttttccacttgtgcgcaaagcttggcttcttcacctatggttttgagacttcccaaggatgacgaagactttgttaggaggtgtttctccctcctgtggtcagaagcaatctccttacctcttcctgtttcaaagcctccgtccacttggggctgccccataggttgctgtttcctgtctgagagacatgtctagcctctgcctcaaagactagtgatgcccaacccgctcttagtccagtggcttttgatgaaggcttccctctcggatcagacctgcccacatctgagagaactcctgggttgtgttgacagggtggccctccatgagactgcctttaaattggccctcaaaatgcagcatccacaacagacaaatattctgtcatgggaaaaggaaggtattttctttgttcaacgtgtgtttgtggctttccagggctttttctgctacagtaattcaaatcatgggtggttctctattcttttgtcttaattttattgtgcctgttttctctgcacataacatcttgctgtaacctcctgtttatccttcagtgacatgagtgaacgtgttttgggggagtgaatactcagcaagcgtcgtcagaaacttgagcatttgctccttaatagccatagccaatgggatgagcaaagaaagtcatttgaaatcatgaagggtttactcactggatctggggagccagttattcttgctttttgttcccttaccttgtctggatcaaaataaagaatagtatggatagttccattatttgtcacagggaaaaggagagctggtgtcaatatccctattttccatttgtattttattagcacttaagattcgttgaaatcatcttgtgagtatatttattaacgtgctatctatccatcagcccccaagaagagagcagagaccttgtctgtctcattcacctttgaactccttgtgctagaacaacgtgtaacacataaagagctgctcaatacatcttcgttgctggataaataaaatctctctattgtccctgctgtggtccccttggaagactgcctcagtccattgggcatgggttgtaagaccacccaaaccatggtaccaagttgaattttaagttagggtgaggggagggggttctggatttggaggagagacagggtggagttatgggaaaagatgttgaatttgcagaaagtctgggttcacatcttggctctgccactgacttattttggggaactctctgaggcataattttaaaaatctgtacaggaagaataataattactactacccgcggtggctcacacctgtaatcccagcactttgggaggccgaggcgggcggatcacgaggtcaggagatcgagaccatcctggctaacatggtgaaactctgtctctactaaaaatacaaaaaattagccgggcatggtggcgggcgcctgtggtcccagctactcgggaggctgaggcaggagaattgcatgaacccaggaggcggagcttgcagtgagccaagattgcgccactgcactccagcctgggagacagagcgagactctgtctcaaaaaaataataataataaataattactcctaccccaccccacatacattttataatccttagttgaagaatgtatgaaaaatgtgttttaaactataaagtgctctgcaaatgtggaggagtgcaaaatgatgatctttctcttccttctttttgcttcatataaagtcaggtgccctggcctgcccctaccagctctgctagaattaggatttcctttggccagctgccctcttcacagtgctactttctcagagtgaactgaggaacgcatctccttctaggcttcccatcactgcaattccatgataacaatgggggaagggggaccaggacctaagaaagtgccctcaagatctcagacctggccccaccccgtgccactggtgagcacattgtcaccatgagctgtaccatcaagggctgcttgacggtgtttctcttctcccttctccccaggcggctgttgaagagtgaacttggatcattcattacagactattttcaggtaagctgtgtggatctgagcatccatcattatcatgcatgtgggggcatggacctaaaaggggtggccaatactgtacagttggacattccttcaacagacaaaattacgtatctcaagtccctgctgtgtgctgcacgttgcagaggggcaccactcctgtgtctcccagcagttaatggagatcacagtctcatgcagcagttctcaggcattttggtctcaggacccctttacactcgtaaaacgtattgcttatttgggttatgtctatctttaccataatagaaattaaacctgaagagctttaaaatatgtcttaatgtatttaagtaataagcctattacatactagtgctaattacatttttatgaaaaacaactcagaataaaatagaaaggagatctctgcattgtctggcttcatagaagacagttggattcttatatctgcttcactttcaatttgtaatgatattgcatgccacgtagttttgggaaaattccactgtaaactcgtggagaatgtaagggaaaaaaacaaatagcttagtattaccgagaaaatagttttgaccatggggatcccttgaaagagtttgggtagtgggggtcccccaggggaccctgaatcataccacatctggatccattgtctggatcagtcagacttctcccctgtctatacattgttggtataaagctagtgagtttaaggttccaggaccaatcagaggatagtttctaattcacagacgcaagctgttttcatgactctaaccaaaggcatatggtggagagggaatggggagtgttgagtgacaaggagtcactgactggacggcaccttagtgaagtcagaatccctacttctcactcatttgctgagtgggcaagctgtttcacctccctgtgcctcagtttcctcatctgcgaaatgggactaaaaatacaacttaccttaaaagtttattatatgctttatgtgaaataacacatgtaaagcactctgtacgtagtgtgtaggggggcagtatagggtagtggtcaagatcacagcctttagaggcagagtgcttgggttcagtgcccagcatagccacttactagctatgtgaccttgagcaagttgctttacctctctgtatttccttttctgtgaaacagcagtaataggaccaaaccttatagggttgtcgtgaagactaaataagttatttataaaaagtgctcagtgactagcagagagtaagacagtaataagtgcttattaagtttatataagtgcctatgtgttattctaaggtgtaatccatctcttttaatgggaaagtagcatgaaatgcctaacatcttggtttcaagttagcaatgttattctgtgtccaaatagagcatacttttaagacagtttaaagagattttaggttttgaaaacagtacaggcatccttttataatttttctttatgagattcaggaagcttaaacttttatgtgcactttaaaagaatgacatgtcagttgtttaaacacacacacacacacacacacacacacacacacacacacacacggacagctcctctaaatctggacaaaccaagacccaacagaagcctggaattcaatcgggtcatatgtctcagctgcttggaagacagctcctgttcagggagagacaaacataaagattaagagagagataattagtcacaaatgtgaatcatttcagtcacccttgactcaaaggtcagtcttggcctcactctcttctcttgctgtctctactgattgattttttttaaagctaactacagagaagtggtttttcagtcagtcctggagaaacctgctgggttgaattgccttcctccttgacatttaaaagctccatggtttggtgtggtttcaatcaggttttaaatgtcatttgtcttttggtgctgggggttacccctaggacagataggaaagggtgtttgggtggggacttgtttatctgggaagccttgaggtttttgggggcggttaatactgcttacgaagcatgccagatgcttaacaactaataaccacttgtcatttcctaccgggaacataatcagaaatgctgctttgtgaatacagaatctcttgctggggtgtggggcgagaactagttttcacagttttaaatcgaagtttatttaaggtgctgatctggaaagaaggctctcctagatacagttttgtttttttctttttttaatagattttaagtgtcatgtgggcacacagcttttttttctttcttttttagtcttttggttccccactccctacaaagttcctggaacaaagtagatactcagtaaaccttcctgggagagagggagggattttctgccacagatcactgaaatgattttaggcgatgcgtgcaatgacattaaataacattagggcttgtggttagaaactgctctcctcttttattttcctttcgcccttgggattgtgctagagaggatcttgagttgtaccatggtgtcctctcccctcctccaggacttggaaatctccctcgtttgaagaaggaggagcagtcctcgaacttagtgtcttcagctagggatgctgactagttaggatttcttaacattattttgttggcattgagttgatcattgagttccattccacttagtgtaaattatgttgctgtggtttctgttttaaacgtatttacttgtttaaaaagtggattgatataagaaaaatagtatgcaaagaataatcatgtaggtggccctggctctggccctagtcatgcaggtggttcaacagagactcagatttggaaagcccattaccaggcactgcttaaaaatgggctggtttcaaaccattcactttacagaagaaatctccatataaggagacacgtcccagagggaaggcttgtagaggcgagcttagccttcacatttgactgtcagatgtcgtttcaggagggaaagtcaggaggaactccagaaagtgtgttcctccagtaaaggggcagaaggaaggcctggagacagatgaggaatggaacccaggggtggacaggaaagtcaccaaaaccatggacctggctgttgggaaaggtgaaagatgggcttcctgggtgctgggctctgcattgcagaggctcagatggccatgcctagacatctgcattcagcagtcaagtctgtctcctcaccctgacccccaactctgagcttgccactcatacagccctttctgtggctctgcttttgaaagcgaacattctcatttacattctgtgagtcttaacacagaatgtcctgagtggggaataatgaaaatgaccccaggtgaggccaagagaaagcaggtaggaaaattgtgcttatctcatgcctgcacacagagaagacaagctgtgtgatctgcagaagcccagctacacgtccataaggcactggctggaaaagtctctgacatttccagtattgatttttttccctttccctctgttttgaattgtgtccggaaggaaaattggggtttccgagagaaacactatatactagtaacagctctgagggataattggtttcttgtaatttttgaaactgatgatatgaaacgttctggattttcctatttacctcattaggtatcttggtggttcagagcatgggtgtgtttgcagattgcactttctgctattctgtatctactggctttgttttgtgtgttataagcttttgccccaagcccagaaagttcaattccttttgttggaactggagttttgcttgatatagaaactcaggctagagtcagtggctttgaatgggttaatactaggaagagaggaaacttagctactaccgttgtcaataggtcatggatacctggtaatgtgtgagatacatttgtgtgcatgtatgtgtacgtgtgtgtgcatgtatgcatatatatgtatttttccatttgctgctcatatctgcaagagtcccaggaggccagtttcccctagagtttacagcatatggcagagagctgaaggagtgtagcgttaactgaagacccggatggatggcaaagagtttaaatcaggcccagaaaaggcaattatactttgttgggacaaaggtaggacttctaaggattcacggcaagctggatggagagaagatcaagagtggtgaaggtaacttttgtgatttctaaatccaaattgaggaggagagagaagtttcagctgttctttgatcagctggacaggctcctctaacaagcaggactcccaaaatggaaaaagagctaattgggtgaacagaaagtagtaaaaggaattccacatacactctgctttgaaggtaaaattggggcctatctacacaggggggctttgaacaagtggagcggggatctggtgagaagacagaggagaagttatgtttttaggtgagaggtcatcagaggttgcattttttgatttggccagtacttagagaagaacagcactgtggaatctataagctttggggtggcctagaagctcccactggccactgtgaggggcgagaatgagggggagccagactgggggcttcgagaagcacccctgggtgtcttgggctactcgctgtggggctcgctgcctgtcagaggtcacctctcagcagctttgccattcttaatctccttagcaattatttgaattttgtacaattagttgaatactttgattgtacttttatcatactttatgagtctccgtggaaaaaaatggatcttgacattgatgaccacaggtcttaatataattgagataaagatgaaaatcaataggcttgcagaagtggcaaatctttatcctcattggactcaggttattgcacatcagttgtggaagaaaggaacacatgggtaccaaaggctgaaaatatatcacccgaaaatgagctctgaagatgaggtgtaattagggattttataatcctttcaagctctatgaggacagaattcctcctaaatcatggaagtgtggtattctacacaagtatgtatttgcaagaactcattatatatggaatttggtgatttactgtagaagagaaaggaatggcaggagccaggcttagggcattgatgggggaggcataaaaggtaggagcagatgctggaaacaacgtggtattaaaatagtggaaacactcagtgattcagtgggcatgagaagtagaaactgagttggaagcgtcgggaaatttttgttcaatatggaaagcaataaggtgactttctctgaggctcttgaagagctataaggagaacagaattaatgataatggtagtgacggctaacattttcaagcacgtacatgctgggcattgttgtaagctgaaggttctcaaagtatggtccccgaaccaggagcttcagtatcagctgggaatctgttagagaagcaaagtttaatggattcagaaactctggggttagggcccaagtgatctgtttttttttttttagacaaagtcttgctcttgtcacccaggctggagtgcaatggcacgatcttggctcaatgcaacctccgcctcccggattcaagtgattctcctggctcagcttcctgagtagttgggattacaggcgcaccccaccatgcctagctaatttttgtaattttagtagagacagagtttcaccatattggtcaggctggtctcgaactcctgacctcaggtgatccacccgcctcggcctcccaaagtgctgggattacaggtgtgagccaccgcccccagccacaatctgcgttttgatgagtcctgcatgattgtgaggcacgctcaagtctggcaatgctttcagcatttcccctgggctaactcatttattcctcctgataactgatgaggacggttctgttattacatatccctcttttacagatgctgccactgaggctcagagatgggggttatttgtctaagatacaaatacatacagctagtaaatggtggcatgaagacccagcccaggtcatctggccacagaagaaaaatctcttggattatatttaaaatgccctcaaggaatctccaggaaaaaacccaaaaacccaggcaggaggagttccagggttactttatttgttgttgttttcgttttgcatgttcagcaagtcagacatggactgtcttccttcttccttataaacataacctttttaaggccccaatgcacgctttaactatggctgaaacagtgctaaatgaagaattagcattagcaccgaatttccacttcttcaatctccatctggggacttctcgcgggtctcatcacacccacacacaccaacattggcttattaggaactctctgggcctgggagtaagttgtgtttgtaagactttgttgtttatctaggaaggcatccaggttcacaggagatgtgcacatcattagaggtgatggctggcctttcaaagtcatagaggaaaaaaaaaaactggaagtggcctataatttgcagccctgggtttatgccaacaacaggaaccttctaagacattgatatcaccagaagcaaatgtctggagtgaaactggttaacacaggttctgggaaggcagagcaacacagctgccacccctctggggtaggaaagaatatctcacttggaaatggaatccactcgagtgccaggcactccccttgctagatgttgaatgtggatagtcgagaggaaggcccagctgggtggaggccctgtggcagaacccagttacatggcctgagattgccaagccaactgccccagtatctgaatctgtaatggatcccatctgctttctcctctgggcaaggacataggacacctctctaaggcaggagagcatgatgtctaaaagcaccagcccttctgccagtaggtctgggttctaatctttgttagaacacttactaatctaatcttctaatctttgttagaacacttctaatctttgttagaacacttactttgttagaacacttacctcagcctcgttacttagtctctctgatgctcagttttcttaatagtaatccaggtggaatcatgggaactacttcatatggttgatgtggttactaagtgagatgacgtacacaaagtgcctgattacatagtgagcagtcaacaaggtataagtatttgtatcagtatttttattactattgctaagtaaaccagaagaatataataggggaaagatatgggctttggattcagaccaaccttggtgcaaagtctggtctcacacttgctagttgcttctttgagcctcaagttctttatttgcaaaaagtggataggttgtggcgaaagtaaaatgtgagaaggcaggaaaagactgtaagacagtgtctgacactgagtaaaaaccaataactgactccactgacattcttactgcattgtcatcaccactaaaacattaaaagggacggtagctagcagccttagtgtttacagaattcctgcttcctggtctgtgtggaaagttcttcctgctgggaagatggggttctccctgtacctagccttcttggttatccgtctcatctgggtccatcccaccgggttgtgaaggtgcctgcttggcaggaggcatgcatcattggtagccccacaccacccatggccaccctctgctctgttctgcccacctttccaacccaccctctgtgatgacccgggaggagctgggtctttcctgtccactgaagactgggtggttttagacgcctttccccaaacatcttgtttacatttttcctagctaagcctcatttttctgtttgcagcccgtttttctatgtcttaggaaaattagatacgtcagctgtttttctttttcacttccatctcctttgccacttcattatagtgcgacttgactgtgtccaagttcatttatggggtggggagaggatgcattaagtaacaatgggcccagttccaagtcccaagttgcttcctgggtggttactatttagtaaccatttttggcttagtcttctgcctggggaggtggtggggttggtgccatcaggcaaggagtgggacaagagaaacttgggtcatctccagctctgttaccatacagctccatcactacagctcagcagccagcaaacactcagaaacttctggagtcaggcattggtcaggggatgggaatactgtgaggtgaggtccaggaagactggacacttaggaagaacaaacaatgcaagatggctgcctgaaacccaaggctgggtttcgccccgccttcaacccatttgagcaggcttaagccccacagatgtcaagttggcctatctttaggtgaagtgacagggtgagcttcataatttgcagagcccagtgcagaaggaacatgtgggtactcagcattctgtgcaagaatcctgaatgccattcttctcaccacctctaatgtcaacactggtgtccctggcttcttctaaaacaactctactcaccagactggtgtggggatgccaatctccccttcccactggcctgccactgcagctcatagtgggcaggtaaccccaagagattgcacatctgcactgggcactcttggtacctagatggagagtgggcgagaggtccccattgagtcagcagcaattgcactgcagcactgccagtccagggagtgcaggatggctggcactatgcctctccccacaacattgcagggtgcatgccaagtcctgactctccctgtaccggtgcggaggcctccaccaacatgactctgtcagcaccttgggagtagggtgacattggtggtggagcccaggcaccaggggtgaggtgtaggtgcctgaaaatccctcctggggaggtggtgaggaggcagggccatgggtgagctggggctttagaccccagtgcatgttctgttatcccttcagacttcacttataaaacataaattcaaagataaaaatactaagaatcaactgcagagcacccaactgcaagtggaggccttcagagtacaagggccttaagaatgcaagaccctttggggctccaattctctagagaggagatttggggttcagtttgagacccattagcaaagctggaagatgcagctgtggctcggttgttggagcatgaatggatgggcacagctccattgggtggatggcagtggttccccagtgaagagagtcctggggcttggctaactcaaaagatccttactctgatagtgtgtgctgaataaaacatgagtagtagagagactgagcctcactctcatgtcttttattggaattttggagagggagaccctacttctagcctcggtttatacagctataagataagagcaaaatctacagactcctgggggcagggggttatataaggattttcaagatgcctttgaaaggtactttagcctcctggaaaatggaaatggatctactaaatatcatcaaaatgtgtgtgaccaattgattttgactgtaggactggggagaggagagaatgtatagatgattcttaagaccccttctaacctcaagtttgtgtttctcttattttggtctaagctatagaatttccatgctgtgtattgtgacaaattttaaaagagtattttctttatcatttctccataatataggaataattacttttccttgaaaatatataaaaaagattttttttcctaaggtctccttgaagggagaagacctagaaaggagaagaaaggaaaatccaggccatgatttgaggtttattccataagatatggacaatgtaattttcaaatgattttctaattcaaatgaagaaaatggcaacaaacttagggaccctatagcacttattcttctttaaaatattctgtcttttatcttggcttcttaaaaataaaaaatctttatcactaaaatagccagtatatatattcagtaaatatttattaggcacctactatgttctaggtactataccaggagccaagggtactaactaaaatgagatatggtcctcactcctaaggacctaaaattctaacaaatgaatggtttgaattaatttctgttaactcatgctatcacctggactaggttttcatttctgtccatgcctcagttccccctatcctccccccatgtagataattatagtgatagaacaaaatgatgaaaattgaatcacagaggcgatctctattacctctataggtgcatctcagaaatgtgaaattagggagggttaggaaagttgttttaatagaagcctggaacatcagtgttgacactagatgtgctgagaagaatgacatttaggagcccatgcacagaatgctaaggggacgttctgagaacctcacctggactaggtgaaagggaccaaccaggtggagactgcagggcacaaatgagatttgtgctaagaagcattcaggtggagtggttgccatctgaacacacctccacagaccactcatgtccagctcagctgtcacaagatgtcgatttggtgctgatgtattttcttgctttctgacccagaaagtcttgccatgacccagctgggattcatgaacttggctggaagctaaagaacaggttagggctttgtctttattgcctgtgtgtttcacaattctttgtgaaggaattgcttttttttttcctttaacaaagttggtgtattcctatatggtgtcactgtaactttgatttggtgttctatctgccatcttgaaactacatggtggctgggtgtggtgtctcacacctgtaatcccaacactttgggaggccgaggtgggcagatcacttaaggtcaaaagttcgagaccagcctggccaacatggtgaaaccccgtctctaccaaaaaagtacaaaaattagctgggcatggtggctggtgcctgtaatcccatctacacaggaggctgaggtgggagaattgcgtgaacctgggagacagaggttgcagtgagccaagatcccactactgcactccagcctgggtgacagatcaagactccatctcaaaagaaagaactacctgatgaccagttactttttcaaattaggtcatattttgtaaatcttaataggagtatgaatttggttaatgtgtatccatcacagaaatgggatagtacctttgataaaatgttctattagtacattttataaaggcccattcactactgactctcagcctcccactccttttttgaagaagttgggctgagatagcagctattactattcctaccaccagtgctgattactaaggacataaaatactgtgtgtatgtgtttataatgattaatgtgtttataatgattataatgaagaatgttatggtattgctagtattatgccattttacatatgaggagcttgggactcagggaaattaaatacaaaatcgcacagctagaatgtagctgagctggaacttgaactgatacccaagttctttccactctgctccatatgcttcttttatcattgcagtaggatctagggttttataatggagaaggctaaagaatgcattaggtactttggtaagatacatatcacctttgcagctgcctctcccataatcataggcctgggtaatctaataatatgacatgagtgtaaagacaccagcccgtcattgatctctgagcttctgtgacttgcagaagtcttagggggccaactatagcctttcaagggaagaaaggggtctgggtgggaagacttgctggaaggcagcgaagtggagtggaaagaacatggcttacagacccaggaagaccaggtctgtctgccttgagcagtctcttcactaaccatcagtaaagtgaggacagtagcaccaacttgataggattgaattaaatgagatgaaggatataaatcttatgatgtagacaggacgctcaacaattgttagttgcagttgcaagaggactttactttctctttccacaatttcccatgcacacattcattgacagatgcatattcactgctgcttaagattttgcacgcagtctctttcatgctagtgtgagaagccctaaatttatctttttttttaaaaaaaaatatgttatttctgcatagtttcccattgcctcaatgcttccttttgtgagtttagatcactaagggcctctaggacactgggtgtcaacaatagcgaattcatcccaagtttgtgtcatgcctcttccctcgtctgagggatgagggtggcggttgggtttgcctcttatctcactcgttcttttgctatgggaagtctcactgtcttctccggaagccttaaccttccaagaggaaaaaaggcttcttaaactccgaggcacggctagaacacaagtgcctagaactctgtgcccttgcccactggaagtggaagagggttcatcacttacgctctggagttgtccaaattcttatgttctttgttctcttttggcagaaccagcttcttgcaaaaggactgttctttgtggaggagaagatcaagctgtgtgaaggcaagtacaagacagccctggtagactggggcctctgtgactcagtctttgatgtctggacggctgagatgcttctgtccagaaggggcaggctccaagcgagtgattcaccctgtccgtttcctccctacctaggcagcagcactttgatttgagtcagctgctcacagcagtgcaagtcagaactgtgtttcagaaaaatgtagtgggacggggtggtttctttggagaccttgttcagggtttttttttgttttgtttttgtttttgtttttgtttttgtttttaatgggatgcaggctggtggtcacctttgaaggtataagttatactgtgaatcctccatgctatttcctctggtctgtcccgagctatttcctacaggcctttgtaatatttctggggagtcatagaagagaggagtcctgtccatttgcaggacattaggctaagcaggcactcactcaatagggtatgatttgatagataaagggaaatttcctgatcttagagtttaaagtccaactgacaggaaagaaaggaactgaatggagatagaaacaggttccaaaggcaagaattagccaaccccatgactctaccaagggctactcttagctcccaccaaagtggggcttgatcttagcttgccacctccttcttgggtgacttttggttagttactagtttctccaagtctcagcttttatcatttttgaagtgataaattggggtgaggggttgtagggaatataaggcacatgagtggcataacaccatacctggcacacaggcgaacataccggaccctttcttttttttctgctccagcctaatgaaccgtagatcaaacttacttccagatccagacttattaggtgtcatgtcatcatccttttgtttcttcccattccctgggaaagacacgagtgtgtccaggaaaggggctcctagaaagacaaagtaggaaggaaaatgagaaactgacgctggaaagttccaaggtctggcaaacagttaatgcttaccaagccttgggaagaatagaggttagaaattaacctttgcacatttgagagttggctgaacctgtagccattcttcccttgaatacatcgatgacatttttttttcaaccttataaatacccaataacccaagacctttagaaaaaaaaatttaaattgtggttaaacaaaaccccacacaatataaaatataccctctttataatttcagtactttacagttcagtagtgttaattatatttacattgttgtgtaacagatctctagaactttatcttgcaaaacagaaactccacgtccattgaacaactcccaacattgccccctttcctcagcccccgacagccaccatcttattttttgtttccatgctttgactaatctaggcgtcttataagtggaatcatatggtgtttgtccttttgagactggcttagttttattcagcataaggtcctcaaattcatgttgtagcatgtgacaggattcccttcttattttaaggctaatattccattttatgtgtatgctacattagctttatcctctcatgtgtcaaaggaaggggcttattcttaggtgacttgctttgaccaagaatttagtggctcttttgcttctttttttgagacagagtctcacttctgtggcccaggctggagtacagtggcatgatttcgtctcactgcaacctccacctcccaggttcaagtgattctcatgcctcagcctcttgaatagctgggattacaggcacgtgccaccacgcccagctaatttttgtatatttagtaggcgtttcaccatgttggccaggctggtctcgactcctgacctcaaatgatccaccgccttggcctcccaaagtgctgggattacaggcatgagccactgtgcccagccctcttttgcattttggagtcaggctagtacaaaaatgtggaagacaactgcgtggtaaagggagggaaaggaaacattatccctggccatattaattgtatgtatgttatctggggagttattacaagctcctggaaatgtggaaaaacagctctatgaaaaagaaactgaataaaaccagaggttcaagtgcccttaaaaggggaagttgaatgtctctcacccaagtaaccctcatcatagatacactcagagtgaaaactcagaaatggggctagacaggatgaacaaagttcatccaagattctgtccccctgccctggcatggcctgagagcaccaggcctggcatattctctgagtctcttctagtcttagagttctgggtgttggggcctgttctgtacagtgaataggcatgtggggaacctttaagggactctgccatcttcaaccaggcatctctactttttaattttatgtattagaactccaagaaaaattgtgtttggataaaacttgctataaaacaaagtttgaaaacaattaatatgatccgtccagtcactgaacaaactcctctttgtcgacatctccgcttaggtacttacatgtctatatatacacaccccttctttactgatgcagaaaagacaggtggctgttcatatccacttattgctgttttgtgggcagaagatgccatgttaacttcaacttttccagagccttagtgaccttgagtcttaggaagtttcttatacttacctatatacttctggtgacctaaactgctgcgttacattagagggcagatttataggacggtcacctagaaccatccatccaacccccttcatttttgcagggagctaagtccttgacttatgggctgtttctggaagggaaggcacctgtgttctttaactctttctcccccagggctaccctgttgctgggtctgtgtctgtcagatgttcttctctgaacgctttccaaaacctcccttactctctgaagtttgcagccagcaattagacctgggttctcgggaggcgtcttactgctgctgggttgcagaattaccttgtgtgccaatgagcatcctgtcttggcattgaaagggggagtaagtaggcaccagtgctgacctgcaaggttctctcttcttcccctccttcaggtcaagagggcctctgcttgtcttggttgtagaaggcttaagataagggacatcaacaaagaagctggagtaaccttttgccctttggggtaaattatccaggtgctggagttcaccttggttctaggaaccagggtgactcagattgtgagagggtccttttagacttccccctcctcctccctgcagtgaaacagcatagcctatatttgaaagaggatggtgactgcttcaatcaaatgtttatttgattatctactatgagccagtactttgctaggtgctggggagtcaggaatcagaaaaaccatcacagcattacaggccctcatggagctcacacatgaatcaaatcatcaccaagtataaaactgtacctaggacaagtactaagaatacaatctgcagcggggtggtttgaccaatggggagagactttcccctagaagtgatgttcaagctgcaactagaaagataaacagaagtaggttaggtaaagaagggagagaaagagcagtcaaggcagaagggctagcatatgcaaaggccctgtggcatgacagagaatggtgactgaaagagggatgattagagcccaaaggctgacaggaatacaaaagagaggatcaagacccaggaggaggaggcagattctcctgggctgtgtagatcatattactgatgttttctttatcctaggagcaaaggaaaatgttcatgctaactattaagtcctgttctacactgtcccatatttgggttaaatggtaacctccttccactcaccagccccagtatctgcaaaaatctatacacttggcactttccatccattcacgcaaagattttaaaagattgatttattgaagtggctgcaccatgctaagcactatgatgagcaagacagatggggctccattcccaatcccgttccagtgacgagacagagaagaagtgaataagctgttccgataaagtgtgatcagtggtttgcacaggcaagttgagggtgccctggatttgcattttccccctgtgaatttcaccctgacctttcaaaatctgcacatctttggacctcctggctactagtcatgcccttgttctattctctctccccagccactgcttttattgcccattaaattaatagacgggaggcgccaaatgaatctttcaagatttattcagtggaactggcagtgtcttgccaaacgcgtctctcagtgtctaatcttggctgacccagtttctctgcctgggatgagcagaggcagtgaccaatatcagctctgatatctaggtcattaaacagcaaatgctgtgcaggctcctctttgccagggcccgtctttcctggaggtgcagagttcctcacacagccttctgatggcactgggtgacctgtgtgctctccagcctggggtagcagggacacttggccatagcttaggcttcctgatcctcaaagtgagtagggacagcatcaggaggcaggtgctgtgttttgcagatggccttttcagagaatgctgccttcccagttactgtaaagtgggtggaggaaacagtttccaagttctgtttctgcctctctccattgacagctgaaacccagaataaagccaatatcttaatgagtaagaaaacaaaacagtatatagctgtgcacatgatcttcctggataagattggccaagagcatgggttctggaatcacagctctgccttcgagctgtgtgactttggggcagttagttggcctctctgagcctgtaaagcgggggtattagagtctagtcatgagatatcttataggtaagtaaactagcatagtgctggataatgttgtaacaattcatgtaataacaattactatgtgattttaagatgtcagctcccttttctggattggaggatggaaaggcatatttgcatattttcagttgagttctcccacccagtcctacatttactatagtaaaaccttgtagatcaaatgtaagtaatgagctctctttcctccccacacctaatgctgcgcctcccattcagagtcttactagtgaagactagtaagtttagattacttattagtaagaccagagagttaggatcaatacgtgcacccttgtgagatggaatatatttctgccctgagaatctctgttggtcttagcctggaattaagatcctgtagcaccacacctctgctctctgggctttaatagctcctggctgcaagttttttagcatgtgcagcttgacattttatgtggaactgtcttctggcctctcctacaagtaatgacgaattcttttctttcttcctcccttcccatcttctcgccctcttgtaggtgaaaatcgcattgaggttctggctgaagtctgggaccacttcttcactgagactctccctaccctgcaggcaatattttatccagttcaggttagtctcattggggaacacttcctgccatcctcagcgatctgtcttctctcctggcccttgcggcctgagggctcctggtaaatgggagaaaacttggagattgggcgcttgtattggttaaggagtttagagattgtttaagggctctctggttctatatttagggcctaacttcaagtgaagaagagtgcctgcataactagcaatttgtaggctcttgttaccctcttggttttgagtatgtctttatattcttggagtggtttgtttttcttagttttcagaagtacagaagatgggggaagggagatttcttgtttcttttctttctttctcccctgcctctatctttcttctctccccctacttttttttgtgaagcataattttaaagcaagtttgccgtcacattcaaattatgaaaaaggagtaacattccgtgttcctctgtaagggatcctacgtgatttagtaggaagaatgctcgactaggaatctgtagacttagattcaagagtgtgggcttgggcagagtcatttatcttctgtgagcatagctccattgtatctcctacaaaataaggaatttagaataaaatgtgaatgacacctctagtattcttattctgtggcctctactcctaccatttgtgttgatacccttgcccccttgtctctgtagagctaataccacgatggtcactgccaggttgaagccaccgctaagggaggttgacccatagatgttcctctccaaaatacatgtctctctcacttaagctgcagtgtactccctcttctctcctcccactggggttgaggcttcgtatgtaattaggtattgttgaagtgtgggcgtcgtatgcagaggaacacagccattaagcaatgggtagaatgaccttataccacatagattgtttggtctgaacagtgttttaaaggaattttggattgctgaaaacatttgtcaaatatttaaaacctgggaggttatgcttatagattccattttccatgttagacccaccccataacatttccagtaagatagtacagatagaagcttctgtcctgtagcctgcagaaaccttccccttccttacagtagtcactcatcagccatcagtaagtcttgtctcaggaagataggcatggggataaggttgccagatgaagcaaataaaaatacaggatgttggccgggcacagcactttgggaggctgaggtgggtggatcacttgagcccaggagtttgagaccaggctgggcaacatgatgacaacccatctctattaaaaaaaactagccaggcatggtggcttgtgtctgtagtctcaggtactagggaagctgaagtaggaggatcacttgagcccagacgattgaagctgtagtgagctgagattgcaccactgcactacaacctgggtgacagagcaaaaccctgtctcgaaataaataaatactacgggatgttgagttatatttgaattgcatatataagcaaataatgcaatatttgggacatatttatactgaaaaactcttcaaatttaactgggcatcccgtgttttatctggtagccctactagaaggggtgtgcaggaaagacctgcatttgtaggtggacaaaggggcatgttgaatcagtacctggcgcctcctgcgtttaaaggcaaactgaaccagacccaggacagcaacatggtaccaccatttcgaggggccctgggtctctcttcaggccatttgtgtagggaattccagggtgcaggtgtccagatggttctagaatggagagtgcaggatctgggtggacatagccccagtatagtcaagagggcaaaggttggggaggggggttttaaaagctcagagccaggcaggagcccagacatgtgggtctaaggatagctctgtttcagttctcttggaagatggtaagatctggcaacaattaatattgcccctgttcacctcctcactccccaatgactgacttgaattctgcttctcttctcgagtttgccatggcccccaccttgctggcttcccttttcctgtcaactcctgaggccattcgcatgtgctaaccctgctttattcaattagctgaattgggtttgggtgagatgggcatgtccatattcagattgtggacagggaatattccggggaggtggcgaagatctgcagcaaatggtcatcagaggtatatagcataccctgaaaaaggcaaactgtgccttcctcctcctttttgttctcagctgatccaggttcacatatttatagttttataggactgtatctcttaggctttactttttctttgtgcttagcctagagaaactggatggcatttgggtaacagggatatgcactgttattttttttggagtacgtaggttgtgaggagacaggcttggttttgttatgctttccccatcaagcctaaaacaagaacagaaaagtgaattctggattagtaggaattccttctctgattcattgtgggcctaagagatggctaagtcctggtaacaagccagtgctctggttaatggccccaaatgaccctctaagaaagcaatgattaacttgtttatgtggcaggttggtataaaccgggtaccccataccctcccttaaaagtattttctgcttgcatcaaaggccagattctgcatatagaaaaggcctttatgggttgggaaccagcgaggagttctgaagataaaacctcccccccacctatgctggggaggaatttagatattgagagattgggatattggagccagttctaacataaatggttgtggcatgttgctgtccttggcccggttaaactcacctttaaacacaggaggtactaggtactgattcagtatgccctgctggtcacttataaatccaggccttttcttctgagagtgtaatgtttaaccatgggcttagaagtcccaaaggcaaaatccatcatgttctccaggtgagtgctataactacccatgcccagtctagacccaaatgactacaggtatttcatatgaagaaatgatggcaacagaataatctggggaagaaatgagggagggggagcagcgccaaagaggaacaaagtggttcaaagcatgagctgcagagttagctcatgactgactgtgttagtctgtttgtgttgctataaaggaatacccgagactgggtaatttatagagaaaagaggcttgtttggctcatggttctgtaggctgaacaagaagtgtagttgccagcatctgccccaggtgaggccacagcaagccttcactcatggcagaaggcaacaggggagccagtgtatcacatggcaagaggaagcaagagacagggaggaggtggcagactttttgaaacaactagctctctcatactaatagagtgagaactaatagagtgaaaactcactaaagagtgagagctcactcattaccaaggggagggcaccaagctgttcatgagggatctgtccctatgactctaccttctactaggccccacctccaacattggagatcacatttcaacacgacgtttggaggggacaaatatctaagccatattttctgcccctggtactccaaatctcatgtccttctcacatcgcaaaatacaatcattcctgcccaatagtcccctaaagtcttaatttattccagcatcaactcaatcagaagttcaaagtctcatctgagactcaaggcaagttccttgcacctacgagcttgtaaaatcaagaataagttatttacttataagatacaatggtggcacaggcattgggtacacattcccattccaaaagggagaatttggccaaaagaaagggacagcaggccccacttgagtctgaaacacagcagagcagacattaaatcttaaagctccaaaatagtctttgaccccatgttccacatccaggacatactgatgcaaaggatgggctcccaaggccctgggcagctctgcccctgtggctttgaagggttccagcccctgggtctgctctcacagattggagttgagtgcctgtggtttttccaggctcagggtgcaagccggtggctctacccttcttgggtctagagggcaagaacccccttcccacggctccactaggaagtgtcaggggctccaaccccacatatccccttggcactgccctggtagagtctctttgtgggggctccacccctgtggtaggcttctgcttgggcacccaggcttttctatacatcttctgaaatctaggtggaagctgcaaagcctccttctcttgtactctgtgcacctgtagacttagcactatgtggaagccaccaaggcttatagcttgctccctccagagtaacagctggaatggtacctggggcactttgagccactgctggagccagagaaactgggatgtgggcagcagtgtcctgaggtagcactaggcatcccctgagcgtggcctccaaaaccattatttcctttaggcttctgggcctgtaatgggagggactgtcccagaggtttctgaaatgacttcaatgccttttttaaactctggtcttggctatcagcacctgtttcccttttagtcatgcaaatctctctaggaagtgattgttccacagctctcttatatttctctcctgcaaatgccttttccttcttcactgcatggccaggctgcaaattttccaaatttttatgctctgttttccttttaattataagttccaactttaagtcattcctttacacctattcctgatcttaggctgttcgaagcagccatgccacatcttgaatgctttgtttcttataatttttttttttttcgagacagagtctcactctgtcacccaggctagagtgcagtggcacaatctcagctcactacaacctccacctcctgggttcaagctattctcctgcctcagcctcccaagtagctgggattacaggcgcctgccaccatgccagtctaatttttgtatttttagtagagatggggtttcaccatattggctaggctggtctcaaactcctgaccttgtgatccacccgccttggccttccaaagtgctgggattacaagtgtgagctactgtgcccgccctagaaatttattttaccagatactctaagtcatcactcttaagttcaacctcccacaaatcccccgggcatggacacaatacagacaaattatttgctaaggcataaaaagggtgatttttattccagttcccaataactgcctcatttccacttgagaccacctcagcctggcctttgctgtccctatttctatcagtattttagttattaccatttaactagtctcaaagaaggtccaaaccttcccttgtctttttgtcatcttttgagccctgagccctccaaactcttccaacctctgctcattacccagttccagagctgcttccacaccttcaggtatcttcatagcaacattctactccttagcaccaattttctgtattagttcattttgcattgttacaacggaatacctgagactgggtaatttatttatttaaaaaaacaaggtttattatttggcttacagtcctgcaggctgtatatgaaacacagtaccagcatctgctcctggtgaggcttcaggaagcttataaccgtggcagaaaggtgatggggagccggtgtatcacatgatgagagaaggaagcaagagatgggggaagaggcaccaggctcttttaaacaactagctctcatgtgaattaattgagaactcacttatcaccaaggggagggcacctaagccattcatgagggatccgctctcatgacccaaacacctcctgctaggccccacctataacactggagaaaacatttcaacatgagatttggaggggacaaatatccaaaccatgtcactgacctgggttcacattgtcagtctgccacttatcatcttgatattcttgggaagataactttgcttctctgagccttggttttcttctagaaaataataaaacttgcttcacaggagtgttaagaagagtaagtgagataatacttgaaaagcacttaattttgcatatgacacacagtaagggcttaagaattgtcgccatcatcatcaatatcattattattctctgcacaataaaatgtgttggaatcacagcagataatccagttatttggatgagtttttcccacgtcatgggctgagcagatgagttgacaatgggtgactgttgagtgtctaccatatactggcactgttatggaagtgtgggcacagctcctgagagttgcctaagtggggttatgacctgtattttcctagtcatcctacttaggaaatcatccccccagttggtgtaagacagtaggctctcttatacactgttgctgggagtacaaatggatgcaatctttttggagagcaacatggcagtatttttttacgactttttaaaggcatatttggattgagtaattttcctttgcaggagaataatctggatatgctgataaaatatgcccaacgtggcatggataaatatgtttgaaacacacacacacacgtgtgcaaatgaaagcatcttggtcaggagatggttggttacacacagtgtgttcacacagtggtagaatattacgcagccttacaagtgagggaggtcaatatgtgctggtatgaaaagatgtccaaaatatacaaagtgaaacaaaagcaagctgcagaacagtaggaggggtataatctctgtgtgggtttaaaggttttatatgtgattttgtggatataggaactttctggagaaattcagaatataaataaaaacctcaaggagcagttaccagtgtggagtgagaataagagattagacgaagaggacttgtaactttaccttaagccctttttctgatctgttttaatctttgcctttaaatgttttataatataaatacaaaaccaaaaacaataaggcaaaataatcgtctatttggagtgcagttcaggggaatgaagagtccttcgggatgccttgatgaccttctagggaattcctaaataatcagttctggaaagtgatttggcagttgttggagcaggaggtcctagaattgtttccttttgctttgcagtctttccttcccaccagaattgctgttctagtttctagaaggttgcctgccccagtcttcctttttctctcttcccacattctatagtttaaatcagacagttctattgttcacttccctggaaggttgtgaacaaaaagttgtttatgtcccctctgcttccagcatcacaaaggaccaagagccaggacctggccagaataatgctgcctaatgctggctctctcctgttgcctcagcatctctgtccatcaatccatccaacagaggtagtaccaactggccaacttttaaaagatattgaaggaataaaacccagtcaaagtctctcattataagataacttatttaaagcacccaacataatgtgagctctatttataattttttatggtattgaaatgtatgggtggtgattgtgtgtatctgttggatgtggggggtcaggggatatggagatagcaaaaccactcttgaccatgtttctataaaactctatggagttgcaggaaatataaaacatccttaaaccttggtcagcttgggagggtaccctaatgatgtctttggttctaccaggaacaaccggcttttagtgtgcatttgtatgtatgtgtgcaaaggagagtctgaaaaattcaccctcttttctcttttgttcttgaaaaacttgagctctaaaatcaagaagtttgggtttgaaaccctgctctactttgggtgtattatagtaagtctctgggttttcaggtgtttcatctgtgaaatgggtttggctctaccaagaacaactgatttttagtgcatgttgtatgtattgtgtaaaggagactgaaaagtgcaccttcctttctcttttggtcttgggaaacttgagcagctctaaaatcaagaagtttgggtttgaaacgcagctgtactttggttgaattagagtaactctctgggtttttgggtgtttcatctgtgaaatgggttttataatggtacctatctcaaagggtggttgtggggattacacaggttgacatctaaactatgtagaatcatgcctagcacatagaatttaatacatgttagcttatttatagttattattttcaccttctgctccctaccccatccccacaattgaacaaatcccttttctcctactttcctatttatttttcttcctaaattacagtatttatacaacaatctaagaggtcctgtgttttccttctttatttgtatgatagatgttcagatatattatagatgaagttgagaaaacggccttgaatgtagggaggtagtattgatcttctctttgtttctcccatctttctctttctctccttcgtgaccactcatagcacttataatagtgtggccctgattatatgtgccttgtattgtctttcggtcatttaggtaggcaggttgagtcatgccttatcttaacagcattttaattctagaggagccaggtctttggctctttgaaagacacactggcccttgcagacgcctcatcccatctttggtgctatataaacatgtgttgtcttgaaccccacatggtcggtggcagattcagtaagctctcacctcccggccctctctcctctgtcccctctagggccaggagctgactatccgccagatctccctgctgggcttccgagacctagtcttgctgaaggtgaagctgggtgacctgctgctgctggcccagtccaagctgccctcgtccattgtccagatgttgctcatcctgcaggtgaggctgtgctggagacttgccccaaggcagagggagggagcgagggaagagattgcctttctgagatgagggggaaggaacctagtgaccagagcaccttagcttggcttactactatttagtttgttggcccgtgttcattcattcattcatttgttcatttgaggtgcattcactgagcacctgttaggtcctggtgctgtgcttggtgccaggaccacactggggagtgagggaagcatagtctttcattcaggaagtagatgcccttttcccctctccagtgatgccagggagccacaagttgcaagtcacagcaaagaatacactttggcctagcttaagcagatgaggaactccctgaaaagctcctagggcagatggacttcaggagggattacaaccaggaatgaggctgtctcaggccatgaagccaccatcctttctctactttctagtctctacttgtatctgggctactttgtctgtcttcatcttatcctatctttcctggacttggtctttttctccctgcaggcttatgttctgtgtttggtttgtacctgatcgaatgtgacacctcacagctgatgtgcttccagtaagagactgcccagtggctgcctagtgtcactcaatcccaattctaaatcaatactaggaatttgagctaacacatattggtccttggctatgtgccgggcacaggccaaggacgttaagtgtgttgtttccttaatcagataatccagacaatcactgtatgaagtaggcattgttattcccattttagaggtgaggaaaatgaaacctagtaagtttgtgtgcttgcctgaggtccctcagttaggaagaggcagtaagatttggaattatgcacactgtgcttcctccccagaggaaataatttaattggtccagcttgggctagatgattcctctttgcccaatcagccatgacccttgaataagatcaagcagtataaacatggccttggcaaactcattcctatgggtgggggcacacaattctcgacgagtagggtttttggctagggacacccccaagaggtgactactatgcctcttcacctctgtaacaagttcagatgctgcagcattagctctgagcccttcctcagggaagatggcttcatccttgatcaggctagtgatgaccccttgctgccctcacagcagtgatggaatgtcaggcattggggccccaatccttcccccacatcccccagctggtgctctctttcagtccttgaagctgggccatccttctgggcattctccccctttcctgtaattagagaggaggaagagttgcctaataggatgagggtgggtgtaattggccggaatgccaggtcaagtatttttatggaagagatggagaaggagggggatagaaaaatgcatgtggggctcgggtctgagaagccttaattagagcatgcttcctgaataaggagtcttgaaaatgagccctttgggattctgataggaaaattcggaaagttgggctcccatcttcccatatcagtttataatagtttagggctgagaagcgattcctttgtgttttgggcggtggcggtttgtttggttttgtgggaaggagaattgatccagtcctgcaggtgaagactctcacctgttgctgctggaacaggagggcctgtgtctatcacattccaacattccgggccctgtgccaggtagccctgcagccatatgagaaagctgtcatcatacccctgagtccccaaagacaggtgagactgcttgcccaggagaatctaccctcatgcgctctggtccccacccccatttgctctccatgggacggcctcaaactcttcagtggtttccaatcgatcttagaaaaacagcccaagtctgtaccctggccttcagcatctcccacccttccatccctgcctggaacctgacttactcacttttctggtcttcttggcttctcctggctgccgtgggatctttgtgatcaccattcctcctgctcagaacactttgtcttctggggtcctcaagcccctgtctaatcaaggcaggtcaatgttttctccttgcccttgtgccctcagcacccagcatagtctttggcacataataggtattaattaaacactgtccagggaatatagcaccagctagtagaaggttgagcaggactgatgctgggtccctgacctcacacccatgttggtgaccgtcatgtagggcttcttctcttggcagagggaagtacagtcaaagaagctctgggatcatggcgaatttccagaaagtcaggcaaggaaatggttcctcctgtgtctataccattatttttcccatctcacagctgagatggaggttcagagaaggtggcgacttttctcaaggtcttgtactcatttattaagagagctggattgctccccatcccttagcccttatcttcctacctccacttagcctttctaggcaactactgcctcccttctgcagtctcccagggtacttggaaacgccccacaggcatcctacagaccattaaagatcgtccctctctcctgcagggcatctggcatcacttcccctgagggcttcctgggaatgttgcctttggcccatgttcttccttgccaggagctctagagcctggggctggggatgtgactgtgaagaacccggatctttccccggcccaagtccatcttgagcagcaagggcgatggcctctggatctgaatggaacttccaggtggcactgccctggggccatatctgctacaggaaatttgggcctccgtacttagaattgtccattctctccctagacatgcactttccacagtgccatgagacctggggctgatatttttcaaaactacctgaccctactacagagaaaagagctctttcttaggccttcagctccgtcttttctgtcgctcttccacaatgtccctgacccaactccacccttcccaagttgtacaaatactcctacagtgggccatgtgctctgccttcaaactgccccagtgagaggcagaatcggagatattgaccactgtgaagatctgtttcctcccagctgatgcagacaggtcctgagaccaccggaatggtgcattctcaggggccccagccaggcagggtgtgcagcctgtactcagaggaccctgagcttggttttattttctcccatcagcatttgacactcttaatgatttttgaacacgaggccctgcattttcattttacgctggaccacacaaattccatagctgtttggcagccaagccaagggctgaggacagcaccttcctagagggctgtgcacaagccaagttctcagcagcaacttttctgagagaaaaccatctagctccaaatcacgtgttcattatccattttcttcccaccttttgccacttctcctttttctgtggtccctccctgtttagcaggtatggaaggtttgggggagaagccactcattttctctgcatctcttctggccctgtttctacctccaaatctgcaccatagccccatcctcagcttccttgtatttcctgaagctgtgtcctctctcccccagcccctggccgcacccatctcagtgtaatggtaccataaaggggccaaggaagagcctgtttccttggcagcttacatctccccctgggattgccaacatgcaggagtcagcccttcctgcctcattacctgaacagcttccccttcaatccctgaaacactgcactggagtggagtctactttgaaagtgaaagtgatttagagtctactccatttcgagaatttgcatgttaaccccttgggctgggcacagccccatggagatttgtttctttcctggccagtcccctctcctgccaggtggtctttgcttctttgcagcccctcaacatgacagcatgtttgagtcctttccagcaagaagctgaactccccaggagtctgccagttttctagaaaacattggttactggctcctttctggttttgaccattctttactcagggcttagctctgaggactcctgtcatgccggggtttttaattggctcttcatcttggcgctaaaactattcctggctcaaaaagaattatccctttctcttatagccctgaacttttccatattctttcctctcttcttttctagcctgttagcaagtggcagaagaggggatcagagccagatagcctgggttccagttcagggtttttgccatttactggctgtgtttttctgctcaaggtatttaagctctctgggtctttagttcttcatccacagaagggggataataagagcaccttcctctttgcattgtcaggagacctccgtgcattaatatatgttaaatgtctctgtgctgtttatgaaccagtcacgatgacagtatgggtaggattattgtctttgagaccagccagatctcagccttggaggtgggacacccacactgcattggtggcccagtgggagaggctgctgtggtactaaccatgcacagttctaattgcagtgacccatgacaagtgactaaggcttcaggcctcagtttccttcatcctaactgcaaggatgctgcctgccagcaacacagccttgtacattggaggaggacaatcaggatttgttgagtgagaacctgctggtcatggcaatgaacactgacctttgtgtatcttggctgttcattttccagagtgttcacgagcccacaggcccaagtgagagttatttgcaactggaggagctggtgaagcaagtggtttctcctttcctcggcatcagcggggaccgtagcttctcaggccccacgtacacgctgggtaaggagtgcagctctcaagttgtcaagaggcccagtgatcatgataccagcactgtttaactgagcactgtttaactgagcactgataccagcactgtttaactgagcacagccttttgcttcctgtgcgggtcagtgcaaatccgtgcatcttaagcactcacattcctggcctctggaggttgcagtaaccttctcccccttgatgattcctccccaaggaccgatactgtgcctttgcggtggtgcttgtctgatccacatctttgatcagtggctttgatcattttggtgcgcctaggacattaatctttctgtatctgacaccagaaactgtgctttgttacaccctccctctggttgagtagagaaacctcctgagatagatttccctttgaaaccaactggaaatgtcaggccaacttgtatgcatggccagatgttatcgagttgctgtctcccactccatttctgtaggtaccaccacatggcaaggaaaggggctcttgcatttggggacaaatcctgttggggcctttttttgatggctgtaaacctagcatcagtgagtgtcaggctctgtaccaggcaccatggaaaatctggagatgaatcagatctgttccttctctcagtgacactgcagtctagatgggttcagtacaaatatctctataatacaaaatagctctcagaccagtctttgtagaaatagctgtatgataaggcttccaataattataataataaaaaacccagttattgtctgaaatataaacgctcaaaatgcagaaatgttttattcattgttctgtccccaggaatggtgcctggcgtatagtaggcactcaaaaaatgttagatgatggcagcaacggtacttcagggccaggggagccagcacccatggagagatgcagaggcagaaatggattactcaaattgggaacctgatgccccctcttctcactttaatggagttgtaatagttgagcttcaaagaaaggagcgtcctccagtgaggttcctgccccttcctgggcctctctaccacagcaagagccagggccagctggcagttttcaccaccctgctcatgtttttctggagacaccagcttaaccacagccaccacagatcggagggtgctggccccagcctgctgcctgctggttcttctccttcctccctcccttcctcactcattcctcccaggagctggaatgggccagagtttcaatgacactgaaggaaaacagtcttctgcagccccactctgagctggggtgccatgttgctgcggtctccctggagtccaccttcctgctggctcagctcactgaattttgggggactggggcatccagggagctgtcaggacgtcagcaggttagctgggccatggcaggaacgctaccattgtttgggcctaatgccagtgtagaggaagaaaaacagtttttcttccaactctcctaagctcttagttggaacagaaccctgtaacacattaacaggagaaaaacaaacagcagcttattaaaactgtatgtttcatacatacatgggtcacacccagggagtcagtagttcttaaatacatggctttgaattccagcttatatagcatcttcaacaacaaaaaataaatttctagagaagtgataaggcaaagaaaaacaactttgagtcttcaggggtggcagcttgtggcaagggaaatagatggcagataagggctggttagtgaggcttgttcatgtaggtttctctgttggcattgctggctgataagggtctaaaattgtcttcagtggttaacctttgctctccctggtagaagtgggatgggataccgtttgtctttatacatctatatcctgcctttaagcaaatagagggaggacagagagcttcctgtatctgcttcttaactgccttcagttcataaatccttatgcccaagaggcatattttgtggtggcatattttggtgtcctatcccaggaacaagagtcaattgggaagtttgttcagtgaggactcactctaagaggggatagctttagctttctagctaaaataagaataatgcacacttttgccaaattataaagcaaagactcaaggttttattcttgtacctaggacagtccctgcctctagagagttgtcgcactaggggcggggagggaaggatgtgaccctcttttggttaattttaaattatcatttcagcaaatgtgtactaagaccctgtcctggcacactgggaggtgctatagctatatctgtaaatgaagccaacccatccctgccctccagagcacacagcccagggaagaagtcacaaacaaggcagtgtctcatcagtgtacacatgttctgagggggaaagtacaggggccacgggtcccagggcacagggatttcatcttgactagggaatcagggaagactacctggaggaagtaatgatgtctgtgatgggacctgcaggatgaatataagttagctgagtaaacagagagggatgactatccccaggccaaggggaggagcttgggagggtttggaggacaggaggtgagcaagaggaaggagcgttagaggaactgaaagggcttcagagttgcaaggaagctgatggcaaggggagctactggacacagacctcgtcctgggtatggtgctgggggtgctggatgctggaccatggagcagacactgctgttcccaggtttacaggggaagcaagtgaggattaaggtaacatggagccaggattccaatgcctcaagctgtggatactttatcagctgccccacatgctctaccgccacccccacccccactgaccgctgctaactttgaggaggtgactttattaggggacagcccaggaggtgttccttagcccaagagggatcctaagccagacatttcaccccatgtctctggatactaagaagctaaaatggtcacagcagtgcccatcctgactgaggacactgctttccagataaagagaggtctctcagggcctccgtctaccccttagtaaaaggtttattttgcctgtgggaggagagcattgagatcgctggctgaagtaaaaactaaggagttgggttgggggtgataaacccctttacctatgggagggctttgccgtggctcacttgggccggaggataggtaggcgtggtcgtaggcagcggagggtgtgggggccactcatcccttcagaagccaccactcacgctggattactgaccagggttttggcgcgtaactcattccatcctccaaggtactgttgtgctttcagtctccaggtcacccgcagggtaggtgaccagagccagagaagcggtttattcccggggctccgcactgcacccacgcgcccgcgcctgtgtttgactgcacgaggattctccggaggtgtcccttcctgccagccaggcctcacccctgggtacgcataggtcagaggcccacgatgagagtgagagagaacgtgccgctctctccaaagcagccacttttctgcaacagtgggagttgctgagggaggaggaagaggatagtgaaacttttttttaaaaggccgactcctcagaggctggcctttgccccatctttcaagtccccgaagtctccaggctgtttccctgatgtttgcagggccctcccgagcacacactcagcagcacgctcgacttctcccacacaaaggccctggcctcccacaggcctccctccattgtgtctgcctgggggagggcccttctccttcaggatactgtagcttctctgcgtgacaagccagcattcacggctttcaggtgccagcctggagagggacacccaccacgggcttggtgtgctggggtcacaatggccttattatggcggtcgctccggtggggcctggccagggagcctgggagatcaaaagcctgggaaccaagtccccaacaaaggacccgaggacggccttatccaggctttgcatctctctgggggtttgaaaggagctgctcttgctggctccggtgcaggggatgaatgccagtgaatgccagtgttcagcagggctcctggtgagtgaggagggaataaagcctccccttggcctcaccccgtgtgaaagggaagaggaggaggcagaggtggcctggagatgccagctgaaatggcaggacccggccctcttcccgctaaaagggcaccactgcaagggaagggctggtttggagccccagggggtacccacagggtaatcagtcccttagtgggagattcccttccctgggtgacagggccctgccttcccgggagcagagaagaaaaagattggggaggagaacaagaagcaagagtgtcggtcgctgtctgccagccccgggcctggcgttcagttttaaggcctcccaaggggcccagcaggcctgacctcccagtggggacacagctgacgcacttgtctgaggcttggctctggagtctggcgggaacttagcaaggaaacgctgtctgcccgggggactcaacacagccttgcggtccctgtggtcctggctctgcccacacccaatcttgggaatgaaaacattccacccagaaagtagaaggaagagctgtagcctctcctgtgagtcatcagcagggggagagaggctgaggcagctgtggagagagcagggccttggaaaccacgagagctggggctcagctgtgtggcctggagcaacttctgagccacagagggctgagcacagaggccctgtccttccattcaggatcagcaggaggaagaagctgccctgtctcaggtaagggccaggtagagctgcctgctatgttatggacgcccagctaaaggtggcctggcgtccgtggaatcactccccggggaggttgtgtgtacctccccaatccctcccctggatcccaaaccacatccttggccttgccttgctgtattgccatgtcctatttctcagcctctcccttacactgagcttgctcgttgagagcagggattttgtatcccaggacctggcacagacctctcctgtgagtgagtggttcagtctgtaagtcaagcctagagaagcacagcccatctgaaataggctttgtgacttctcttccttctcctctgaatttccagggtgctgtcgtctctatctctgacctgacatttgccacactgacctgttctaacagttatttgtgtatgtgggtcacaagctgggcctgtgctgtcagctctgggtttgagtcctggtttcatcactaactatgactgttgttattccacatctcaacttcaggttcttctgcgaagtggttagaagccatcagtggagcacctcctttttggtacagtacctagcatatcatggatgcttagtaaatagttcctcctaagaactcgtgcccctgacatgtgaacatacatgcatggaggtacacaagtgtgctgggctcaagcccctgttgggggccccacatcagatttatgtttcttttcttctctgcagctagtgcagcattttgcatgtacaggtagtagtgtttgttgaaggtggggacaggtggtgttgtggtctcctcctccagggcagcccccctctggctccagctcttggcctgtgagcagccagagtggcttctcttgtccatttgctgcctgggccctccaaggatcactggagacacctttccctggctcatcccagtgggctgggacctgcggaaatcatctgacgaattctcatttcctacaaagatgctgcatgtgtctgccaagcaagttgatttcctgttctctcgatttaccctctgtcttctctggtcccagcctttcttccaagtttcagccatgttataaaatctaacattaatactgtatctttccagataccccttccccaaagagaggagtctcccatactcttataaaacattatcgaggccgggcacagtggctcatgcctgtaatcccagcactttgggaggccaaggcaggcagatcatgaggtcaggaattcgagaccatcctggctaacacggtgaaaccctgtctctgctaaaaatacaaaaaattagctgggtgtggtggtgggcacctgtagtcccagctactctggaggctgaggcaggagaatggcgtgaacccagtaggcagcgcttgtagtgagccaagttcgcgccactgcactccagcctgggcaacagagtgagactccgtctcaaaaaaaaaaaaaacaaaacaaaaaacaaaacaaaacatcgaaatctctagcaacattagaaataatgtcactactgtctacctctttgaccctcccctttgcacaaacccctcctggcaggtaggtacccagtctcagaggcccagacatctgcatgaagcaaatgctccctaaacaggtctcgtcctgtctcctgctagactggttgtagggttcaggtccccacatgggtttcccaacagcaatctgaagtgtgtacttctatcagcagtgagagagaaatgaattgttctcaagggcattttttttaaggacagtttttcaatgggatccttgctgctctgaactcttctggtgcttctgttttatagttattgattttggagatcataaaagtaatacaggtattataagaatgtgggaacattatagaaatgtgtaacttggagagtacgagcatccatgcttcagaaagaaccgctgccaatgcctggtgtattcttggttgctccttggcgttttgtctcttatctccaaagaggggcgccagtgtcagcttcttgtgtagcatctgctggggggcagtgtttgctattacttgacttcagtgggtgggctgcttcaaggaacatgtcttctgagggcagcagcagtcacctgagacacagcagcgtgtagtggggaaagtctgggcactgccatctagaacccaagagaaacggggctgagcctcagtcttcctcatctgtgcagtgggcatactaagaacaactctgttttggagggagattgggactaaacagcgagatcatgggtgggaacacactctacactctaaattctatgtaatatcctttgattttgaaaaattgttattgtcaccaccaaataggccccttgggcttctgagccagtagactcaagatttagtccaaaggtttagaatttcattctcttcattatttatacacacacacaacagtccgatgacgggagctgctgtgagctttgcagatggatgtaggcaggtcttgctgtgatctccttccaggagcattggctctagaagtggctgacacacgtgtctagggccctccagatccactggaagagcagagagtaaactaaagcagcatgagccacgtgtccccatgggccagtctgtgaacagcatggtttgctttcctcttggaaagtggggtgttccccctcctgtccaagtgtggtggaaatactgataccattgggccccactccctttctccccacagcattgtcctgcctggctggcagagggaacacctttctcttgggtcttcagggtgtcagagatatgggcactgtggaaggcagagacaggtgaaatggtgtatgtgactgggaagctgggaagaggtgtgctctggcagaaaaggaggctgaaaagaagaggaggcccagaacagaatccacccatcccccagccctttgaagctgtgtttctcccatggccgtgccttcaaatttactctctcccaggccagaccggttgcagtggctggaccatcccacgcctctgcctctctcaggtccagagccgctcagctcgtgacatgataccaggcctaggtggcagaggaggcagcactgcctcaagaggagcatgagttgggggacttctctgggaccaagggacccagccttgtcatggtgcttactctattccaaactctgtgcatgtttctgccctagcgcagcccatgtgaaggtgggagagcagaggccctgggagctggggtgctgctgtcagatttgcttcctctcttgggactctactcccgaggcttcagttatctgagttttttggttcttctcctgcctctctgacccaccctagggtttccttccttctggaaaggcaatggggcttacccggtttttggaggctgccatctgtgctccagtcccagctttgcctcttctttgcaatgttgaacaagttatttaacctctctgtgctttagtttccccatctgtaaggtggcagtggtgatagcagtacccagctcattgggttgagaggatttaattattcacagatacaagatgctcagatcagcaccgaacattcttaagtgctatcctgtgtgttagctgttaatactttagcccctctgaaagtggtgctgttagcccctctcattttatccacccagcataggtgtacacacgggaataatgtagtcctttaccccatcttcattttcagagaggtcacatttactcggagggccccagccattactaagttccagaggactttgatttttcatatcctaaaatgttttcttcttgtcgtaaaatgcccacatagggaatgaaaattttaaagacgtatcaataaaaagataatgaaattttaaaaatcaccgggtaatacctttgcccagagatgataactagatattttgatgtagcatttcccagtttttatacacaggtgtggtgggtgagtacaacacccagtataaccccagttttgcttaaaaagggacaaaatgcatataatactgttgtttatattctgcttttgtcaccaaatattatcaacatttctcactgtccttaaatattatttgaaaatgaccaaatttctgtctttagatagaaacttcttttcccagctcaaaactgcatgtctgtcagccggtggaggttgccccttcagcatctcagacgcgatgtggccaggacccggcgctgggtctcacaagctgcctcctctgcatcctccccatccttcgcccctcccccaagtctgccgttcctttgttctgtcccacagctcctcctccctgccccgctcccatgatctcttagttgtggggttctgtagtatctctgtagtatctctgtggtgtctctagcggtcatcctcaccttactgtcatcaccacaactccacttcctttcctgatcacctctcactttgacactgatgttagcattaccttttttcacatgcgatccctatttattatggaatataatacctgagccttctccctggctttcctcgctgctggcctcgctggctccagcccattctgccacacttctgcccaaggaagcttcctgagcacagtccatcttgccctatgaccttcgatgttaactgcgtccccgcagctgtgctgtgacctggtaccacaggtgcttccatctgcctgccggggcacctctcctggagtctgttccagccaggctgtgacctgatggtgcacctgtctcagcagctttctcaggctgctgccattgctcagaactctgtcacccctttaccgcttctgggagttctgccatcctaaaggtccatctccagtgtacatcctccaggcaagtttcctatctccagatgggcatgctttttctggcccttgaagcccctccacttggctcatccttcccttaaggtatttcacctaccctagttatctgtgggccttggatgggcagctagaagagcaagggtctggagagagacagaccttgtttgagtcccagcttaaactaccttctatctatatgaccttgggtaagctattccctctctgagactcagttttctcatctggaaagtggaaactgatacaataccatgacttaggttcagttttgggggggattcaaaagataaaatgtctaggtttagcacagtttttggaacatgatgagaattcaaaagcagcagtttaggccggacgtggtggctcacacctttaatcccagcactttgggaggctgaggcgggtggatcacctgaggtcaggagttcaggaccaccctggccaacatggtgaaaccccgtctctagtaaaaatacaaaaattagctgggcatggtggtgggcgcctgtagtcccagcaactcaggaggctgaggtgggagaatcacttgaacctgggaagcggaggttgcagtgagctgagatcacaccactgcactccagcctgggtaacaagagcaaaactgtctcaaaaaaaaaacaaaaagcagcagttttataattagtatccagccttcctgtgtctgcctccttggggtgatccatggaacctagcctgttctttgatgatgctaaaggctgtttgagtccaggagaattgacttgaacagaacataggtctgagacccttcacctggcaggagatgagggccattgatagtcgtggttctgtatgatttgcaagatagtcctgctaccttgggtttgacaactgaggtaactccccagttatctcttcctctggatttcagcttaggaagactcttttatatcacctgttggcatgggagaggccactcctgcaggaagccagggtgcttcttttggaatgctcaggtcctcagaggacattgattgaaagggaattttagggcaaacccaatgaagctcaggcagcagctgaaaaacacaccagattcccttgactcttatctgtcaaggaaagtctgttggtgaccacctaatatgtggggtagggttggttacaggcaggatctggcataaacaggtaaagttgcaagagaaacatttaggtatcaccagattcctcccttgcattgtggcagggctgcacctaagagctgctcctaaaggttgagcaccttgttcttttcccccagttggattaggagcttttaagcaccaataccccctccccaataacagtctttgctgatttttctcttgcagccaggcggcactccagggtccggcccaaggtgactgtcctgaactatgcctccccgataaccgcagtcagccggccactgaatgagatggtcttgaccccactgacagagcaggagggggaagcctacctggagaagtgtggcagcgtgcggcggcacacggtggccaatgcccactcggacatccagctgctggccatggccaccatgatgcactcgggcctgggggaggaggccagcagtgagaacaagtgcctgctcctgccacccagcttccccccgccccaccggcagtgctccagtgagcccaacatcactgacaaccctgacggactggaggagggggccaggggcagccaggagggctcggagctgaactgtgcttccctcagctgagtcgccacccctgggcctttccatctcctgttttgcaaccaggatgaggacccctccatctccgtggattactgaggggggctcttgctttatgcgatgctgccttatttcctttagggtactgtcctggtcaaaatgacctaaggggaaaccgttgttgtaaacctctttattttggtgactgtgaccacttctttgtagccaccaattgtagtgaccagttgcctaatggtcactttctgactccagccttgccagcctgactcagatcctcatctctgggcctttctccctccgatgttggactgcctgatgctcccaatgacatatccaatgctcctggcatttctggagcaggaggttgtcaggacaacacatataaccaccaaggatgtgttggcctttggagttcccctttaggttcctagtgatgtggaggtttatgggtgaaaaattagtggagagggaactcctctcccccattttgtgtagagtgaaaatagcctgaagcccctactcagcagggctctgggaatgtgccttccttattttagtttcagaattgctgggaaagttaccccactggtgggtgaggatctatcctcaacctacatccagatcctatgtgctgcttgcacagaggcctttggcttttgacccaggagggccgcgaggctggagctgccctgtctttcattgagccttagcatttccctctcaggcttcctctcaagctcaaggaactcacccccagataagaagctggtgcctcttgtctctctcatttcagaaacggactttctcatcatgctttcctatggtgggtatgaggggccagctgataccaaccaactggcctgtatctatctatctggatttgacttgaatttttaaaatgtgtatcgtttaaaaaaaaaaatgtttgcaaattttgcacataggatcttgcactgttcattttcagtggggtgagtcttcacactaaaaacacaagcagagctcctgggaaaagagactggaagtggttcaggataaagagatccatggtgggcagggctgttaggtcacagagctctagaagcagctggacttgaacccacaatggcttgtgtaaattcgtaaatttcatggtttctaggaaaagctgcattggggtggggagacccagtttgcctcataggcagaggattctccaggaagcatggaaaatggaatgtttccatgctttacagtgctgggagagaggggagatgtgggcaggaccttttggaaggatgtttattctctgtggttaaagaaatgctgagaatttctagcatgtgaagcacttgggggcagcaggccttggcacggtgctgcatccttctactgctccctccaggtctgggggcttttatccaccttgaatccctatcctcctctttgtagttgtcggtctcactgataacagctccagaaaaaaagacaaggctccccctctgacccttcctgttggtatttatgaaatctcaaagagatgagccaccttggcttccaatatggcaagagggtgctgggagaaggtgaagatcagtctaagctgccacggtgatgagaccttctcattatgtaactcttgatggcatttcccttctgagtgaagatttgaaatatgattgattagaattgtgctcttgatggctgggaatttagaaattttattttaagagttatttcattttcatcctaagagtgatgggagagaaatgtccaaaagagatctgctgatctgctgagagtttcaaacaaacaaaaaaataatctctatgtatgtgttggataaagtctacagactgactaacatgcattagcaaatggagcatcagtaggtagcaacatgataatttatgtaactgatagcttctgtccttattagtacacttaacatttgagactagtatttattgatccaggcaaagtaattaattaatcatgcttgggcttactttttcagtttgtaaggttaagcatatgtgcatgcgtgcgtgtgtatataaatgccttttccatatcttaaatgtccctgatgaggagagcagtcatcaattaaatatataagctcttaaaatgagaatggaagtgtcagtatagacccagtgtacttaagtgctgatgactgttagccagtttacaactttttaccatcgatgtacacatttgatatttgtgcagtaaatagactgtacctataaaaaattttattgatgtttatggtcatgttagctatcagagagctattggagtgagagctgaggtgtccttaaccactttttctctcctagattcattttcattatttatgctaggattttcttatggttgacatttgatgacaggaagcaatcatgactcttcaagtgagctcacagaaacctttcatgttgtctgtttccaaaatggattcaataaacaacattttgtccatgttaccctattctcatgctgggtgccccaggggtgtcttgatcgaatttgcaagtatagcagtcaaatcagatcttttttttttttcctcaaattagatcttgatgcatctttccctcaaactccctgccccaacttctgcctcctcttttcttgttgcctctactccacagtcagacagcagccttagctcagccagtcttccctgggttttgtttgcaatcctggactggattggcaactcatttcctggagaaacatattgtggagctagaaaatactgaaaaaagtctgagaagccaatactttttctaaaaccagcttggcctttcttcccagagtatttgacctagagggaacagttaccatatgtactcatggatgatctcatatattcccctctgattctgtttggcagaggaaatttatgttttactctgcataaatacttctaggaggcttatagcagcaacagtctgagaccgctaaagacttaataagagcctttgaagaggtgtgactgattagtcatcctgtagggtgtaaaaggagagtgtgtatgttttggttgagcctttgcaggtcataactatggtaaataaccactgagcattctgcctcaacaggtttcatgtcattagtgtgcccatgacatagcagtgcaccatcatattcattcatccacccatctacccatcaaacacttgtggagtttccattgtgtgtaggcgcttttcttcgtactagggatacagtgatggacaaataaccaaggtgcctgctctcatggagcttacactataggggggaaggctggaaatcaggtcaacacaagcatcacaactaccaaacaacactggatgaaatggcaaagtgccagtgactggagagtgaagaaaggatgacggtgggtagaatggccaaaggaggtctctctccaagtcaactgactcaagagctgagtgacaaggagccagccttacgatctgctttgtttccgatcactgccataactatcacagacttagcagctcaaaacaacatatttattattacagttcgttggctggaagtctgacgggtctcactgggctgaaatcaaggtggtgtcaaggctgcattcctttctggaagctttaagggataatctgtttccttacctctgccagctcttagaggctgcccatattccttggcttgtggctttcttcctccatcttcaaagccagcagtgaatggtgggttgagtccctttcacatggcatcactccaaactacattcggcctccctaggacccttgttgattacattgagcccatccagataatccaggattatctcccaactcaaggtctctaatcacatctgcaaagtcccttttgccttgtaggatacattgcaggtactgtggattaggatgtggacatccttgatgggggagggggagtctttattctgccccacagaataatgattaccacataatccttaggttttgctgctt

SEQ ID NO: 488 - DNA, 489383 bp, Homo sapiens
  source 1..489383: mol_type = genomic DNA
ctatagtcccactggtgctgttattaactgtgcaatacagagaatacaacaggatacaaaaccccccacctccagaggacaggcagctgacaaggagagattcgtatttgagtttgtgatctgagagactgaaatagacactcttttatcaactaagatgaaccctgaggttaagggaacaaatttatctgctgtggaggctttagggcctgactagcacggcccctaaattcctatggctacaagaaaaaccacattcttgataaactccctaacactaagagctacagacaaattgtctgaccctttctaactctgaattattaatacaactactacaatgctgattggaaagaagaccagccttacgaacattctttcctggtaagaaactgcagagctcaaaccagtttcagcaggttctagagactgtgcacaaacttagtatcctataggccacctttcaacatgaagagccaaattacacctcattttaatgctaacaccttgccctaaaatgaacgtagggtgtatgctatgcatatatttacctattgcacatgcgctcggctccccacatacatatggatagcttttcctccaaacccactgctgaatatgtatgactctattgtgtaatacaggccctgtgaggcataaaaaccaaccttcccttccctctttgaagagagaggaccttcggtatacttcggagaccactctccgagtttgcaaactgatatggccaataaagctctcctttctactagtcagccatcctggtggtcttcagacacatttcacattccaagctggagtgaaagcgaagggatggtaaaggatatagctctcccaatccccacaatgctttgatttctttgagatttacacctcatagcaattttgatctctgccatacatcatgttcatttgtgctggagaggctgtaaccagtgatcttgtttcaaaaagtccaaatcccccaacataagacatcctttctaatatttagaagtgaataggatggcattttatttttgaatttccaagtcaacggatcttacttttaacattaggtttgatgaaaagagtaaaaaggtacacaccaggcagagtaaggcagtgatttggagatcagcatttgcattttaggacaataaatagctgcatggtctctttgccttgatgagaaataaatgggaatgcaaatggctcttgaaattgcttctaaaagtttattttctcctcccctgctcaaagccccttagtgaagacaacagatctctgaagtgttcaaacacaaatcttcacagaaatgtgtggaggtgagtcggtgttagtctgattttctcaccactgtgttcaaccactctggtggcatctttcaatgtggggcttgcggttgtgtttttatggaggcaggcagagtgtggtgttatttgatttttaaaggtattattatagctgcttaaataagcaaataaaaacattccctcaaatgattgaaatttgttggatttatttctttctaaagtttgtacatttacatgtatcatatacatattttaaatccttcactattttgcgtgatttctattacataaaaaccatttaaatgcaataaattttgttgccgtaaaacaacaaaatatccccaacttataaaaacacaggaacaattatattcataaacatttacacaataaatgtactctatatatcacagcttctatacatatcagatgactcacttgtctacaaggtttagatttacttgaacaacagtgaaatagggtaatatttatatacaactattttaataaaaaataaagcaattgtaaaatgtaaacttaattgtcaaaatattctttaaacactttaacaatatccacacaaattactgttcctttcaaaagaagaccaccacaaacgccatcgttttctagaagacggcatttccagaatctggtaggtggtgatgaggaacaggtttccagtacgtgttatagtaccgccagcttacccaaaactgctaatgccgacagtttcgccattgaaaaggagcaggctgctattttgtcactaattactttcacaatttgcaggggacatatggcaccaggactgcaatagaactgaaatgattggtggagaaaactttgaaggtaaagaaatgttccacaatgccaattagtttgagccacagtgaatataactcagttattataataggctggaaaagttaaaagcttcttttatattaaaagatacaaattatcgcctttctgcctgtcctatggtaatcaaggctgacaatataaattctccgctagtgtacatttagaaatgggttcctaaagcttgagatataagagactgcagggaggtggttaggcctttacctaacagctctgatctggactgaacaaagctgctaagctagcacttgagtattcctcgacccttcccctagaaaggaaacgttagccatttccaggaatctgggtgtggaggcaaagatatcgtccgtccgtagttagaactcagggtgccagtttgttttttgcaaaggtaaaatacgtggtgttaacttcactcagagaatctttgtcatgacgtttgttcatgtgccacgctcagtgactcagtcactctcggagttgataccttgcctcagcagggtcacgctatcaggacacctggatccctaaagcaggggaagtggcatttgaaacccaggctgtccttgctgctcagtagaagcctgagtgaagtggcggccgggggagaggttcctctttgcagagatgatgtgttatcaccactctctgcagggctctggtgttcaggactcagagcagtgagcctcagacctgcagtgtggtccttaatcgagccttgggctgggactcttctaggagcgcctgaagacttatttatggcgaccgatgggaaaatattaagtgaaactccaaaattctctccattaaccaacattttcaggaattgaagttagggtgcttatttctataacactattcctaagagcttagctctctgccctgcaaagggaaatgcattttagttcggttcctttccatttccatcctcgctgttgttgctgatggaaaagtgctcaactgctcagcatgttcagtcggagctctcttaccagtaaagctcagaggggagtgtggacaaggcacatcagtgctcctacaggaagtgcctccttgtttcttcacttgtactcctctctcaaaggaatgatctgcagagcaagcagctctgccaccttggaaaatgatgcacaccagcttctgggacttcacccaggctacggagagatgctggagagctgctgcttgtgaattacaagaaagccttcaatttggtggtccacaagaaagaatgtgatatggatcccctcatttatgtgttaaaaatataatgcatctcaaagtcagacactagagctcagattccaccctggcccttggaaaacatctgtgatgcagtttccaccccctctgttcatcacctctttagaatattctggctctttgcatcttaaggtcttatgtttgtataacttaaaacattcactgtgtgtgcatgtgtgcaagcatgtgtacacatgtcagaggtcccagacatgtcaacttttctccttatacacctaaggggacagtcaactggttctgaatctcaggaggagaggactaaccacatgcatggttaccctaaatggaaagcaaccactttactgtcccctaagcttcaatttggtctaattactcttgttcctacagttttacaaaagtatcttaacagcattaaaaatcaatgtgcatatatatactctctctagagtagatattattatccatatcaaatggttacttggctttataaactccatggctttatgtttaaagtccaaacatttcaaatggttaaggcccaaaaatgaaacgttttgcttctcctactccttttctacatgatttttgaatcaaatggctgtttctgcagatcacaataattcttagaaggaaatactctcgcaaaactaagaccctgccaatcattcacagagccagtccactgcacgtcaagaaccaattaggaaaaatgatatatttgcaaaaatagtttgagactatagagttaattaacaacaacaaaaaaatgcctcaagtgtaactaccaacacattactgcagcctggagctgaagttagtctcccaccccacaattcaaactctctgaatcagctacaaagacacgaggcagtgtgtttaaacaaaagacactgcactcagccactcactcaaacacactcagtcactgctttaaatataccaaacatgctggttaataaaattttagtctctagttacctatttacactctataatataagcagtaagctcaaacaactaaggccagtggctcttctttggggagaggcaggaaaaagagacctaagtataaaaatatttaaaataaagtttaaacctggtcctgaaattcttttacctgtgacactagatgctaatttctgcaactgcaaacctaggatacagtacccaatcctgggatgccctgatatactttagtgcttgtgatatttcttccaagtcaagcgagtacggatgcggcaccacgagagtggtttgatctcccgtaaaacatacacaaatacataaatgatatggtgggtacttaattcttccgaaagctatattttttatggactaattacaacaacaataaagaacgtgtgctttaaagcatcacattttgtaataagcccaaaattgtcagtttgactttaagtgctcttaatactaaagttactaagactgcacaggctgcctttttttttttttttcttttctttctgtatttcccaaattacagggagctatgcccttggtattgcacacagtacactgcaaaagattcacaaggttagttgaaagtcatttttgccctggtgattcaaagctcaaagaattttctagcataaagtcttattaaaaattttaatcaaaatattatttgagtttaagtttaataaaacaataccactatatatactctcaacaacttcattatataatcagtcctatgaggttgtacttgcttttcatatcacactgattaaggacaaaaataattttgatgtacatgtaccatacactgatatgcaatctacacactgatgcatttacatacatacaactataaatacccacaaatacaacaatggcaggtgacagcattttctttgatgactgacatactgcctgtaagaatagtctccaaaagcctgcaatactacagatacacacacaaattacaaaggatgaaccgaagagacttaagaaaacctactgtatatacaattatgtaacttgcaaaattttcctgctgttgcattcaagtcaaactgtcatgcagattcaagtatttaatgacattctctctatgaagacattctctctgcatgcaatgggccaattattgtcataagcagaaggctgcccacgtgggttctggatactgtaggtacaaaaggagaatgcctttggatttcagtccttcctttatggatgagagatggaaaaggaatctgagagaaaaatcagtgacaaagcccctctctattgctatcaataatctatcacggggttattctgtgatgatttgatcatgtaagatgctataagactggtggaaagaaatttgctgacatgtggcagagcagtggcatggcctgggagacaagatggccagaaagctgtggagcaaggtaggaggcccagaggcgcatctgcctgcaaagctgacttaccattttctgtcagaataacttagatgctttgagacaaaagcagatactatttaaactccaacttggacaattcctcataaactagacttcaggtttaacaactcttaggatgccactttggttctttgttttacagtgctaattttacaattggaaaaaattctgtcatttgaaaagtcaagggatgactcactgctgaaatgaagagaggtggctcccaacctgctgaaaactcgaccaagtccacgggagttaaattacagagattcaaacctgcaaagctaaacttctgtgaattcaggatgcaacatgcttaactgatgactgcaaggaaaaatgccaaaggaactcaatttcaaggacaattaatgaaacccaaaaggttttgttagtaagacaatggagaaacttctttaacgtcaattttcttccaattgtcaatgattagttaaaaagaaaagagtgcagctcatgacaagcaggccctgcctctcatccttcccagatctttacatgatagagggagcaataggcaaaggacagtagaaaagctcagtgtaactttgtgtttaggcagtaagaggcctctttccctgctggttgcaaaaattcttccacaatctcagaagttctgtagcttggccacagggtgaaatacaaacctatcttagccttggaaagccacccagattttcctcttccagagtaaattcctcatgtcacttttgcccaggggccagtcctcattttctagattaggataacagttggagacgcatagagggtcttgtgtttgccacaagaccactgcaccaaaaaatgctttctatcctctgcatctaagaggaataaaaaggttacacataatccagggactacatttccatcagaggactctctcccatcatggttttgctgagattaattaaaattcacaaaagtattgctcagtttaattagacactgctgagagttagcaaaatgatgtttcaaaaaagtgcacttcagaaatgcctacgggctggcgataaagtaaggactctgcatcccagtaattaagttttgattgctaatgaggaatcccagacacctccctgtaaaagccagcatgcgaggtggggacaaacccctaaaattcagattttatacatgggccacctgtatggtcaattttgcaacaacactatgaccaaggcattctgatagctgtcaagattttctgtactagaaattaatatgaagtgtattgacgtgaagaagaatgatttatcatatggaaggaagtcccaaggctcctgggcgctgaggtgggcgacggaggtgggtggcgtaccttcagaggaaagggaaggggtgctcccttgtaccgtgaattgggcaacaggcttggagcagctgtgaaaggaaacatcctcaatttcttctggctagatgccacaggaaataaattatcccaaaggaaaatgtggttggctatgggccagactctcagaatctaggcaaatcagtgactgtttcctcccatagcataaactcttggcctccttcatgcactcatgacagacagcaaccttcagaagcctcagggaagaggtgttctcagcccatgcgctaaagatggacagcatcatgctacggcagtctgagatcctggctcacaaaagaacctttaaagttgtttttaaagataaactatgcaaacatggtatactgaagcttcaaaagagcccttcgtatccaatgatctattagcctatccagaagtccctggagttaatattagtgactcatatgacacggacagtgctatagtggtgctgatgctagccgagtatttcaacactactctaaatgtcagaaatactgtagcaaggtaccattcaatgtatattaaataagtaaaatacatacagacattctatatacatagatatagactgtgggcaaacacattcaagccactcagggaagttcctttttctttagttactgaagcttgtagatgacatggtctaggtacctctctcccctcggcttagtataaacatttaggcagaaaacaaatatcctgataatttagattatcaggtagaaagacagataacttgcttgtggatatgttggattcagtgagaggctacaaaaatcaatctgatacatgggccatattggtaactatcctgtttgttttgcagttctgaaacataaacttagttactgcctttacccaaacaaggcagagagttaaaagtgaggtttttttttttacaggtgtggcaaaatacttattacaaagaaagcaactgcaaccctagagaggggtaagccttctctgggcaatagtcatggacatttacagaggggaaggaagtaaacgttaataaataattctgtaaataaatgctagtacatcataataacataccacttagacactaccatggctttacagcaggttttctctaattcactggaaccatgctattcctgtagagcagctgattctttggtcatagtaccttcaacaaataaactatagaactagagaaactttctaagggaggaaaaagaaaaatcaaagtgatactattagttctgaagttgtgccacttgcggagattttaactttagggattacagagtttcaaggttaggaaatcacaaagctctaggtctcagtgggctaaactttcactcctttctcttcctctacagaagaatattctgtttatcaccctgaacttcaaagggactgtaactggaacaagctcatgactgcaaagttaatagaaccattttgagtagacagaaagaaaggactgaaaatagatgaagtatttttaggagaaagttgagtagtagcagagtgaagtggctatcaaggagactgagacaagaataaacaaagtcactttgcacctgcaaccagaagattcctcagttttccaaccataattcattctgactactactttcagatatattttaaagaaccaatatccatcgtggacaactgcagctacgttttccttccttattttgtcttaaggacacaagaaaagctgtttcattttagtattaatttgttaggaaggaagacctcaatatcacaaccaggacacaaccccatgcccacacacgcacacacacgcacgcacacacacatatgtagagtaagaaaaatctattcctggatggaaggatatcaacgatagagatgatggatttctagtctagaccctgtgggagtgaggtaacaattcctgcagactgagcacatgcctactgctgcagctcctcaagggccgattattgcccccatcctttagcaaacaaaattaactgggtatcaatctttcctcagccttcaaaggcaaaatgactccacttcctctttcccttgcttggctgaaatggaatcagcacttcaagcaagctaatgtgcttccctaagttctcaatcctacgatcttcacgcttcttttccctgcttccagcagggtccgatctcaacaacaagtgctaagctgcacatgaagctgcctcatattggagcaactagattcccagcactgtgattcttactggagcatctgtgagtgctcaattctacctctgtgactgggcaagatttcacatataaaggcgtatattaactccagctagaatttactaaaactacagtttgtccagttaagtgtttcacaatggattaaattctttaaccttaaaaaaaagtttaacagttgatatgagaatacataaaacaactgagcagactgcaaacaagagaaaaccaaaagagaagggatacataattcattctgaaatcacgatcccctcctcctcacagaaaaggtgcattagctatcaagttgcaaaaatcatcaaagcaaaagaaatcaagagcaaagacaatctgtacagaaactaacaaaaatatacaatagaaaaaattactaatgcaccgttttgtcacagactttttttttttaaatatattcacggattaccagaaagatcttgaaaaaccctattttgctccatgaccagcacttcctggccgcagatggactctaagtaactttttgcttaatgcttggtgtttcaggtcggtgatccttcctctctgacacgttacgcttgactttggcagtgattggagaagtatccgggttcagcgaaggactcgagtgcgacttcttcagtcctgcagcctcgctttcatcgttactcagtagctctttgcctccttccttgagaatgctgacatacatttcatagcgggttttctgaaggcaaagccagagaacaacggtagtcagaaaactgttcaaaatgcacgtgtgcagcacacttgtgtattacccacctggagagtgtgaatggctgttgaagacttcgcttcatttcccaaactgacaaattacttgggcacttactgggcacatgagaggcaactacagagactgtcttatgtagataagaaattaagttagaattttagttctcatttgttctagattctgacagaatgtcaacttggagttgctggctaccagatggaacaccatgaatctagaacactcaggcatgagaagggtctaagttggaggagctgtcacctctggttttcggcggctgcatggctcttgtggctctgtaccaaagtcacctgagcctccccaggtagtccaggcctcacaagaaactggcttggatatggttgtttactctttttctgactccctgtaaccctacaaaggcttgccttgagggaccattccgtggctaatctcctggacagtcagtcccctatgagaccataccaccttctagaagctgctctgggtttccctccgttgcttttctgcaaggattacccacttctccggttattatgaacaggtgctgctatgaacagtatgaagctggcagaatttcaagttattttctgatgcttttccaaatcaacaatattcattaccaactatgtactgagtacctactatgtttcaaacagttccttgattcctccgtctcttggatatctaagattttttttttctttttccatggctctggcactttttttttcttccagtttctatcccaatcaatatatagaactatcatatatgttgcaaattagagaagggtctcagattcttaatttgacacattctggtaaagtaagtattccaccatcctgcctcaacgcatgaagaatttatagaaagcttaaagtgttttatttctaaaccaaagaacatgtcagatataaactgtcccaacaaaggcaggcaaattctgttttgactatacatccgtcttagggatttttctagtcagattggggttttgtacgtgtcagttttaagttagtaatttagaagtgctaccttttcaagctgcttcgtttaacaatgggaaaaagctgctagacattcagtatgttctggggttggccaggattcaagtggggtgtgagcgctggttgccgatgatgacatttattgagtaccaacagcttaacacaggtcattcacacaatattcatacacaactgataacttaccatccctgctttacagttaaggcaacaaaggcaaagacaagttcaaagtcaaagtaaggaagaaatgaaactcggatttgaaccaaggcaatctgagttcaaaacccacggctcttaagctatattacctccattgatatgaaaatatagattatatgtatatagattttaggatgactcctctgacagacactgttgtttggccagtcaaaggccattctcaactccttctactctcatgtgcctttcactacaaagactgataaaaccagagatacttactttcccagtctctcttgtagctaagttgggccatgtgatattgtgaccagtaagacgtaaggaagagtcttttggggggcttctgggaaagagattttgctttctgataaaagggacagactttaaggagaagtcactggtgttagcctctcattcttttttttttttgagacagagtctcattctgtcatccaggctggagtgcagtggcatgatctcagctcaccgcaacctccaccgcctgggttctagcaattctcctgcctcagcctcccaagtgtctaggattacaggcgcacaccaccacacccagctaatttttgtatttttagtagagatggggtttcgccatgttggccaggctggcctcgaactcctgacctcaggtgatccacccgcctcggcctcccaaagtgctgggattacaggcgtgagccactgcacgtggcctagcctcttactcttattccctccttaacatggacatgactcctaaagctgctgccccgtgacatgggcagtaggtatgaggaaataggacaacatgctgcacctgaggaaaaatggaaagacggagagagccatgttgacatgatgagctggatccaaccctaaggctacaacctctggaatcatgttaaatatgaataataaatatcctatgggttaaaccactgtttatcaagtattgttatttgcagtttaaagcattactaaacacacattccaatttcaataaagaagtaacaaaatacagaatagcatgctaagcattatctcagaaggccacatgatagtttcataaggtttgctagtaaaaaatgtcatcagtatcacccatcagtagatgcactatgaaatcagaggactgaacaagataatatccacaggacataaagattctaaacgcctcttcattttatgaatttattaattaatctactcctaaactgccttggtggcaagattaaaaaacagaaaagaactacccccaacagaaacaaagtttggtaaaatagtctaaaggtaagtttaaaaatagattcaggaaaccagcgtaaggcatacgatttcatgaagctggagcgttgacacaatgaaaagagaatgaagaaaaattgtttagatcacttgaaaggggacaaaaggagaaaagatgatagggacagttttccagtagtctttgaataaagtgatactactaggaaaatccacctgaaaaatacatgaaggaaagccatctcatccactcattttacagctccagctgcaaagctattgtcttaaataaattacatcagtgtgtcaatcaacaaacaaaaggcacagcacagaggtgtggcagtgcatgagtcatcagatcagaagtaaagacaaagcagaaaaaagggggtgagaggggccagaaaacaaagcctgccctgctgttaaggaagccttcgagggttgatgagtttgcaaacgccgtgccccatttctgacttaaaaaaggcttatagggacacaggttacaaaacccagaaatgtagctttgcattttaccagtctctgagtctagattttactgaaccaaaccaaatatacctcttcaaaacattttaggaaaacgtaactttaacttcaggactaaccagcaggtattagttttagccaagtatctctaggattacagactcaaccacatatgtaaatgctatccagaggatttgaggacaaaataaaattgtctcagaataaagaaaaataactctgaatgatgctctggagagcaagggcaagaaacataactgaaatttctctcttcattgatttcgcctcatattctctttctgggcagtaggaaggtcatatttcttaactatgcaacagcatcatttggagactttatttcctttcttcctttcagagaagatgtgatttgcatcttttttcctaagaccgattgtgaaatttaagttttaaatgaaagctggtgtgtaagaaaaagtaaaggagcagcaagaagtatattagtaaattactttttttttttttttttttgagacggagtcttgctctgtctccaggctggagggcagtggcgcgatctcggctcactgcaacctctgccgactgggttcaagcaattcccctgcctcagcctctggagtagctgggactgcaggcgtgcaccaccaagcccgactaattttttttgtgttagtagagacaggatttcaccatgttggccaggatggtcttgatctcctgacctcatgatccgcctgcctcggcctctcaaactgctgggattacaagcgtgaggcaccacactcggccagtaaattactttttaaaggtttgacacaccagctcagagactgaaaacaatgatcagtgttcaagtggtcatcatggacccaagaagctcatcaatcatattgcggcagacggtgtttcctgcttcctgaacagcctcttctttcgtactaatggaactgtgcgctttattaagaatgccagcgtgcccagccccatgagaggaattatggtttaaagcaggcgtgatgacccttgtctctgttagtttccactgctgccctgtggcctagatttggcccctgacatgtaagtagaagtctgctaggacagtttatgaaagcagcttcttttgctattctgatagaaggtggtaggcaataaggtattttaaaattaaggtacatacattgttttttaagacataatgcaattgtacacttaacggatgactgtatgctataaacaacttttatatgcactgggaaacaaaaaaatttgggtgacttgttttattgtgatatttgctttattgcaatactctggaactgaacctgcagtatctcaggtatgcctgtgtctgtaaccactttcaggttctaggaaatgattagcactctagtacttagggagaaagcttagggataattcttaagtggtgaagaaggaaatttgacaataaaagctttgctccttcactcttctttttctctaatgtctcacatcctttcagtcagcaggttttgtccatctatcttcagaactgcaccatttctcagtacctctcccatttctagtctggaccgagctcatcaccttgcgcctgggttcctcccacagtcgcctgactgctctccctgttccctccttgccctccacgtgcactcctttcaaaagacactgccctgttaaaacacaagacagagtgtgtcagctctgcccaaagtactccagtggtttctcatccttaattctcatccttaaaacccttctcaaccaggaatccttaaaatgccctagaaaacccatgggccacccctttcccgtggcccagtctctcagttctgtccctgggcttgaatctgcctccatggcacacactcctattcgaggacctgtggaacttgctattctctgtccaaaaagctcttcttccaaaagcccacaggacttcctccctcccctccctcacctctttcaggtgtgcactttaacatcactttgacactgaggccttccctggccatcaaaatctaaaactggaacacctactcttactgctttatgttttccttagcacttctccccatctgtcagccttatattttacttgaaaaaaaaaaaaaaaccttttgatttcctcctttgccccccaatactagataccatcacatgagggtaaggactttgcgtttgtttactaatatatccccagggccaagaacacacagtggacaaggaataagcgccactgagtgcatgaacagaaagaggaggaacacatttttccatacacggtagaaaatatattttgaactcgtaatatggcaaatccagaaaaagaaaaataacacggatacccacgttgatggcagatgcctgatgtgttcctaattcaggatcctctgggaacacacctttatcttcagtatcccaccgttccaatgatgtttttcacaaaaatgctaaggtctgaccctgtcagtattgaagctcataagccaccacatgacaaaggcttgtccacttccactgcatattctcttgacctctgttgtcaagatgccacacgtgtcagatcctcaacagtgcactgaggtatagcctgccttgcttaggactggggctttttctctctctttagagagaaacgtaggttatattacacttttgaggttcataaaacatagacccattttctgagaatctttttttttttttttgagatggagtttcgctgttgtcacccaggctggagtgcaatggggcgatctcggctcactgcaacctctgcctcccaggttcaagccattctcctgcctcagcctcccaagtagctgggattacaggtatgcgcgccaccacgcctggctgattttgtatttttactggagaacggggtttctccatgttggtcaggctggtctcaaactcctgacctcaggtgatcctcctgcctcggcctctcaaagtgctgggattacaggggcgagccacctcattcggccctgagaatctcttacgtagtagtacatgaaaaatagactttattgcccactgtgagcttcaaaataaagtgagaaactggaccactgtaggtggactccagtgagtcctcatttggataattactaggtctcattacaattcattacaacatgaagagaatgctctacatttgtcttctaaaagcatacattaaaaagataaggatttgtcaaggattatttatatctggaatctacttgcctgatcattctcacatgaaattgacatgtaaagtatcaggagctcatttacctttggatacataattccatactaacctaagattctaagttctctgggtcagaggatattagcctcatcaacatgaattcaggacggaatctgctgttggtactaaacaaataataacaatattcaagtattatatcttcgctttgataattttttatagccagatggtagaaaagggaatctgaaacagcaacaatatgttttaactaatataatttcaggccacaaagtaatcactacacaaaaattaacatagttccagatagggcacattaaaaatgagatgggatgtttaataatgagcccatggaaagcatggtggcggtaaaaagaagagtcttgcagtcaagtagcctgttgttgacaatgcctctaactaataagactggccttaattcattctctgaaattgttgtttagtcttcataatgtagccctttcaggtatgtgtctttcatttacaaggacaaagacagttccagaaaaatgcgtgcctcagggtcagttttgctacctttggttatgttattaaagattttatctttgtctctgcagattcattctcaggtcaattctaaataatttcagagccccacactcagcttccttccttaggaatgctccaacagggtaaatagagttccagcagtgtaagcataatataattccactatcagaaaaataacttgggatggaattttaccaaatacaactgcaatggcagatctctgctgacaagaatctacataccgttttcttggacctggcccattcagtgagctctctctcttaattaactaaaatttgctgttttgataaagccttttgtgaccaccaagagccaaaggcaactcaagtgtttaatggcgcctttgtctactcaagtaaaattctttcttcagtgtgtaacccctccttattacatttttttgctgtatttctttattaagctgatcttcgattatctgtaaaaatacttcccaaatatggccaggcgcggtgactcacacctgtaatcccagcactttgggaggccgaggcaggcggatcacgaggtcaagagatcgagaccatcttggctaacacggtgaaaccccgtctctactaacaaaaatacaaaaaaattagccaggcgtggtggcaggcgcctgtagtcccagctactcgggaggctgaggcaggagaatggcctgaacccaggaggcggagcttgtagtgagcttagatcacgccactgcactccagcctgggcgacagagcgagactctctctcaaaaacaaaaaaaaaaacaacaacaaaaacaaaacttcccaaatatgtagggaaaaaatcccttttcactagcatcaatgtctacgagggataaataaaaattatcgtgtctaagaccatgtaaactgctacttgggttgaatgttaattgtgttttgaaaaaaattacaactattgatattctttgaaaagtagtttaatcatatccacacatatatttacatggatctcactgaacagtttctctctagagccctgcataccattttatagaataatatctccttttgacctctgatacatgaatacgatagtaacaacctgaatgaaaatacagctgggctgcaattttaactgactgctcctatttgcattcagacctcactgctctagcaaccaaatcctgaatacatatcctccttacatttcgttttctcatgcagacagggcaaaaggccatcttaagacaaaatgagcagaaaagcaataatctcatgtacacagcaatacactttgctcctagatctctacaatggaaaacaaagaaacaaaccaaaaaaaaaaaaaaaaaaaaaaaaaaaccaaacaaaacaaggagcttctgaaggaactgcttattcaagtaaggactgctcatctcccttctgcgtactacgagatgatggcagaattgagttgcagagactctccttgaccaggtggcccacccaccactacctactgacttaagaaagcatctgcattcaaaacagagttcctgtatgaaagctatgctggaaataacatttttaaaaagaaaatgttcaggtttttttttttttcttttccctatgctactcccatgtcaggcttcagagtacagtagtaacctactgcctaaatatagcaaataaccacacatttttatttatatagttcgtgttcgtggctttctgggaaatccaaagaaagtgtgaattccgttcttttgattcattctccctttctgccctattgctctctaaatgaactctgtgactttcatttttttaaaaattaaacattaaaaagcttactttttaatataatggtacaatcagagctcaacactagcacagtccaggaggcctgggtctgtagaaagtgttctgagaacttcatttgtctgcattctgttcccacacctcgccccaggaagctctcataggaatctgctcttgactgtggactcagctctatcttactcttcagtgcccctacggagtttcctggacaggcccttcagagaggaaggagagctgagtgaccatcagtagacgctccccacctccaggccctgctattcctttcctcagggtccaaccagttgccaagaccaggagtagaaagcaggtgcttttacctttgaataacaacactgttgtctttgtggagaagaagaaggagatatgagttgttaagaagagtatgcaattcctgttgaaaactcattttaaaatactatgatttctctcattctttacactgtttctctagctctcaaaattctttaaactcagtctgtataagtattcagcttttcatctcttttttgaaactaaaatgaacattctgtaagtctacaaagcttacttagaaaataccacacattttattttctaggtggaaaactcaagaaataaattgtccggttccaaaccacaaacagagcaaccttacgaagatctgccacccacaaggcctctggctctggctgtttccaaaggtcccacccagcttggccttgtgatggttttgactatagctgagtataaaattaaaaaagaaaacacaccctgatttgattaatgggattaccgagtttgttgttcaacaaaatggaaaaaaaaaaattagcctctgaaacacaaggatagaaggttaagcttccacttacccaagataagtaatctgggctaaagaggtactgctatctgggtaagagactaaattttgcctaaggataaaagtttgtcactcattaagtttttccctatgtaatttacatcttctaaaacaaaaaaggtagcttgttatggcaacattttaatatagggcacgtggttaatcttttggtttacactttgcttttccttctgattgtactggaattccccgaagtcataccgggtatccctcagaagcacattcccagagttctccatgtcagcttgtgtgtcacactcacagctccaaaagggctaatgccagtcttaatgggacagggtcagttcttccaggaaatccttaaagtgtgatttgaggagcagctgaaggaactatgatctaaactaccttccccagtgatctcctaagacatttcatcacctacatttatttattccttttggacctgaagtagtctatttattcatttatttttgagatggagtctcactctgtcgcccaggctatagtgcaatggtgcgatcttggctcactgcaacctccacctcccaggttcacgcaattctcctgcctcagcaagtagatgggattacaggtgcccgccaccatgcccgcctaatattttgtatttttagtagagaaggtattttgccatgttcgccatgctggtctcgaactcttgacctgagatgacccacctgtctcagcctcccaaagtgctgggattacaggcgtgagccaccgtgcccagccttgaagtaattttaaactttctgaatttccagtttaagtgatcctttaaatgggaagtatcataagtagtcatcttaccagtccatgtccaattttgagcttgtcttggtaaagcgccttccaacccaaggagtcagtgagccataagttatgtgtgactatgagacatgccaaatggggctagactggattgagctatgctgcaggtgtaaaacaaacactaggttttgatgatttaatatggaaaaaagaatgtaaaatattttggacatataatgtaaaaattttaaaatctcactacaattaatttcacctgtttcatctatttattcattatgttgagaatatttaagatctattatcctcaggaaatttgaagtacataatacattattattaaatacaatcaccatgttgtacattaggtctccagaacttatgcatcttatgactgtacatttgtaccttttgatcaacatctacttatttccctccaacccccacctcaacccctgatgaccaccattctaccctctgcttctttgtgtttgagttttttagattccacatataagttgcacaggctataactgctccatggttcggggataagaatgccagggacatatttgctggcttgtacctccagctggaggtgagagaacatggtggttctgctggctcaagagcaggtatgcctttggtgggtcatctgggctgtttctctagacaggggcaggagcttgcattaattcagccagcctgggattaatttgtctcgtgtgcaggatctgagtccacagttgttcctgggccctagcactgggcacccacccatgtaagcctggtggaatgacggtggagacccaagattggtggcacacagaggctaccaaccctcagagcaggacacactctagcagtggatctggtttcaaggtggtgccatatcatggtagcttacataaagagggtaaagtgagggatgcacaacttgtgctcctaatctgaagcaatgtagctgtgtgaactacaggcagctccccaaactaggctcagggcttgctgcggctgtggtatactcttgtagtaagaactgcaggtctcttcagtggcaatggaagctggtggggatcttttgcttaccttttcccctcaagggggtagtccctcttgactccaagctaatctcagcagggaacatgagctggcagaggcagggtgccccatcaccctcactatgctgccttcctgggcttctgaacactacagggaatctcactactctcttgctacactttaatgctttccctctgacactctaattgagtttcagttgttttttgtgaggggcataagtggcaggtatgtgtaagccatcttgcagacatcacttctcaactccctttctttcctgctttcaagattctctatgtttaatttttgacagtttgattataatatgtcttggtgaattcctctttgggtggaacctgattggaggtctttgagattcatgtacctggatattcatatctttctctagatttgggaagtattcagtctttaaataagtattctttaaataagctttctgccatgttccctctcttgcccttattacagtctatgatgcagcaattggctctgttgatggtgttccatgaatcctgtagatttctttctcccttccttttcattctttttccttttttcccccatctgattaggtatttttaactgacatgttttcaagttctcagcttctttcttctgcataagaaagtctgctgttgacactttctattgcatttttaaaatgtcattcagtatatgcttcagctccagaatttgtttgggttgttaaataatttctcttaattgaacttttgttcttgtattgtttccctgatttcattgaggaatcaatgaactcttgtattcttatctttgtattctgtggcctactgagttttcttaaaataattattctgaattctttttcaggcaactcatagatgtccatttctttgaaattggttactagaatattattattattattttttgatttttacaggattgtgttacttaacgtcttgcactgctgtttttgcattagaagaagcagttatcttcagtctttactgtctttgggtgaggaatactttctccaaacagccaagctagggattttgaggctctctcagaccttttctatggacatatctactctatacttctcatttcaattagtgggtaattcttacactgtacgtgttctcttgatcctgcaaggctgagtgctgagagcctcccatttgcgtgcccttggccagtgtcctctaatgctcaaatttgtgtgccctctctgaatcccaccgaattgagctcagtgactgtatgacaggtagtttgcacttgctatctgcagtgcatgcattgggagctggcttggggtggggatgggagtgtgaggtgcatggagcatttggagtgcctgtggaccacctgggggaaaggatctgtaggtgaggcatcccatgcagcttggggagaactttctgatggaggtctacagagtagttagaagcctccatggcctctcttccctgctttcaatctttctcaaccactcagctgtgctggttgccttaatattctgagtgggatgtcaaacagtttagcctcttaggcagcatcctacacgtctcagggagccagacactcactcattacactcccactttccccagtggaagaaatcacaggtcatggttgcagggggctctcttggcagtgacctttctgccttgaggtaggggtgacatagataaagtgaaactgttcttcttatactcattattctgtctattctcagtttttttttttttttttttttgagacagagtttcactcttattgcccaggctagagtgcaatggcatgatctcggctcactgcaacctctgcctcccgggttcaagtgattctcctgcctcagcctcccaagtagctgggattacaggcatgtgccacaacacctggctaattttgtatttttaacagagatggggtttctttgtatttttaattgagacgggtttcaccatgttggccaggctggtcttgaactcccgacctcaggtgatccactcacctcggcctcccaaagtgctgggattaccaggcatgagccaccacgcctggccctattctcagattttataatctaatggtgtgctaaaacttctccactggactcatggattcccacaaatgtactcttgtctgtggtatacgtctaaatcaatgcttctgcagggagacgacaacagaaagctcccattctgccatcttgctgatgtcaccctatttacctgtttctttcaatttttaaatgtagctgctagaaaatttaaattcacacctaggtggtttacatttatttctaatggaaggcactgatctatatcacctgacattcctgaactgaaatatttttgttttatgtttaacactcatagaaatctttgtgaaggtgacataatctaaaacaaattgctgttaatgtgtcattctcctaaaaatacagagttggaagggatcttatcagctaattcacccaatcccatctcatttctatgacgaggaaactgaggttcagaaaggataaggtcatgccaaatacaccaattacaagactaaaatggattcccaatctagtcctttttctaattttatgatttttgtctctcagctttcttgtccttttcctgaagataatacctttacccaatagagtgacccttatcagagcaggcatttcagtaaatgattgatgaaggagggatttaaggacagggagtcatttcaaatcacatgattggctgcttattcttccttctcaggaatggccctaattctttgcaatcatctactaaaaatgtggctcaaagaatcctgttgctaggctccgcttctcttcaaaagcagctgttatcatttaaagattaaaattcagagctcttagtcctctttcattatgtaatacaaaatgcaattccaaatgacaaggcaaggatcatgtctgtattattaactggactcagggtataaactgttgatcttacatctctagcttttgactcataattgtaatacagaatctctttgacttgcaatagggttatatcccagataaacccattctaagttgaaaatatcgtaagtcaaaaatatatttacaccacctaacctactgaacatcattaacttagcccagcctaccttaaatgtgctcagaacatttaatattaacttaggtgggcaaaattatctaaccccaaagcctgttttataataaaatattgaatacctcacgtaatatactaaaaactgtactgaaagcataccacttttgcactatcatcaagttgaaaaattgtaagtcaaaccatcttaagtcgggaaccatctgtacttagtatcccacgaaaaaaagaaaagtcttcaatttcctcaataattctattaacctacactatctcagttccagatccagatgtataatcacctctgtcatgtcttctgtaaaggagatagcatttgattccacgctagactgacttactaagattgagacttttgctactaatcttctttaactagtttaacagaatttctcccttgctttcgctaggaagaccaagggaaataatggctatctttgcacttttatgatccagaccacttgcagcttaattgctagaaaattttgtttcagagggtgggtttgccttgtgacagttggcactgtattgagatatgcctctgcactgctcctgtgaaagcaaaagtgacctagataatggcccctactatgaaaattgcttccccaatgttgacaaataaaaataaaccatctgaggaataaggctaggatcacaaccagaaagtgttctccaaaggaaatatatcaaactacccaacgctactgactatgcaacaagatactcaacagtaaaatgaaaggtttactatctgaaatttatattatctgtgcttccagatatgaatggttatgggcttccctaatgactttgaatagaatgtattctttttttgcacatatatcaattttggaaggaatcatgctgttttaaatgtcaccaagaattagaaattcagaaaaaggtgcatcatgcttcaagaatgtcctagatttttaagaaaatattctgtcccaagaaatttataagttttgttatagtggacatttgttgtttctaaaattgaatttcctagccatgtggttggtgtgggctctaactgccttaagccataagcatatgctactctgggtcgcaattcaggagtgggtattcagctgaattcaagcccattaagtcaagtgacctttattctaagtctttggtttcagtcatgagggaagtggacattctcttttttcctgctggattggaacctgaaaacacatataccgagaagtatcttccttccaagcatgaagggactattaattccaagcccatgttcaaagatctaactaatacttaatacatataaaactggctgcagcctctagtacagggtttgcaaactcaaaagccttcagggaccagagcaatgacacttactgtagaaagttatcagatgtgatatattaataacaggcaatggtgagaaggacaagacctgtctttcctaaacgcatttaaattacaatgaaaacaaatacagtattatgttggccaaagaaaacacgttgacattaggtgggctggcaacatacaattcattggcattgcgtcggctggttttctaacaggctttacaatgacctgaaagccagctattaacctgaccttcagcaattcccctgtagtaaatctcttgtagcccagtcatggatttaataggcttgggctggtgtatcttttccctctccctactcaggtccagcttaatttaaggagtatgttaacatctgtaatcatcttaaacgttgcatctgtaacatcttaaatgttgcaggaaaaatatcttgaaataaaaagcgtcatctccttccagttgctgttgtttttaaagctgaagaaacataaaaccaaaacattagggccaactgcattgctgtcaagggaatttctctaatggtgctgtgtcttaaggggcccaggtgttttccagaacagctcaaccaactgtgctttgtttggagccttgtaaacttttacattgacacaaaacatcgatctgccccagaacttgatctgtttcccaatatactagaagcacagggatcaattaaatatttttaagtaaaatgggaactgaataaaatagaaaaaagttaatttataaggaaatgtggctatttctgatatttatttcttgaaattgggaaatgatggtgagtttctcaatgtagacttgtcatgcttaaagcctcttttagaagtaagattagattccaaaccacagcttggaggttaccaattcagtaacatcccttcgcttagagttaagtcaatgaagagagcccattctgagtaaagtttgctgctttaagtaaaagtgaacctcttttctaacaggctaagatggaagtttccttgctctctgtaaatttttttttaaaccctgtatttaccagaatttctgattatttactgtcagtcagagtttggacagtttctaaggcatagaaagagaggtaaatttggctcaccatgaagcactgtttgtactcaaagcaacctgggatttaaacaactggaatgcatacaattagtaacactcctggtgttattactaacagcttaatattctgccaaaataaaagtatttttccttaccaaggacttgtgaaaatggtaagaattgctttgaaaccaagggaggccctgttgaggaggacccaccataagaggaggtgagagcacccattcatgcctatgatcttccctggtgattaaagctcctcttcctgtcactgcccatctgtgggctcccactgaactgcagacactgctgtctgctctcacctgggtgagaacagtcaccaggtttgttttcatgggagcttctggtcctgttaaaacaatgaatactaaggtttctcagagaattacttcctctgatgttatcttttatatacaataataaaatttcacgcatgttgtcaacaaacgtgcgtcaattagtcagtgttccagaaactgggaaaaatggtcaataactcttatatctgctatgaagcggcctgctcagggaatgctgcttatgaagcaaaggatgctgtgcaaagactctctgcaagcactcacgagagaaaaattccggtggctgcaacaatagcaaagtggactcaatatgatatatgacttcaatgttaatttaaattactgaaaaacaattgttcacttcttaaaaagcactacttatacaaaaccccttttagatgacagctgaaattttccctctttcatgacataaatattagctgtaccaagtcagctatcctcgcgcctttctgatagacacaggtgaaggagcttgacagacaagtcaacctgcttgacatattagcatatgggtctgattttaatgagtcctggaacgcagtctgcaagctcgctgaggtgacgatttgatgaaagcaagacttaatccctgcaaaacttggtctaacttcatgtcagggattgaaaatgctggctcttggtgggttacattttcagaaaagaggtagcgctgtcgactcaaaagtagggagggctcctagcaatggcaagctttccatggccttgcagccaccccccacctcctggggacaggctcttccaccttcggcatcaagggctccagcgaggtgctgagtgctggaagcagggactgaggtgctgggaaatttaattagcttgtgtgaaacaaaacaggcctatggcttaaagccacttcagaagtgtgaagaataatgattgctttttgagaactcccatttcccaagaatgaacaagcctggggaaagatgagctgcctagttttttgttgttggtttatttttattttttattttattttttcaagcattttgctggtaaggcttctacggtttttgctaagaaacgtttacctttaccaaaataaatagttctcttagtagagttctccgcccagagcaaggatttgcttgaccatgaagaaaactagtacatggaactgtagtggaagtgtcatttttttaatcaaatgctacatttgataacagaaatattataactcagagactttttaaggcttctatgaaattgtatccaattcagcaagcacacatagcaaggcctggaaatgaacttaggctcatagttttgggtagggggaggtattacggaatccgctacaggtaacaaagacagatgaaaataacttcagcttaaaaaaattgtgccaagtactgaaacagatgaatcccagctagtatatctggatcaggtttttcataggaggaatttgggctgtacctcaaaagacgaacaggactgtcagaaatgaagatgatgggaagagcatcttaggcagaggaaagtaagtgaacaaaggtataaacgtgtgtttggggagagtaggcagaaatgtgactaccgtagggaggccagtgtgggaaagacggacgttgtggaaacgtggagacgccaaatcctctccagtgaaagaaatgagactttcttcaggaggtaactgggggaggggaatcggggaagctgtaggcagctgtcaagcagaggaatgccgtcatctgggttgaacctcagaaaaacaaccggccaaaggatttaggatgaacggaaggagagcggagtgagaggagaaagccagggctcagcagaggaagtagttataaagcaatacaaggaagggacaggtgtgagacgccacagacactgatcgctaggatgtggacacttagaagattttaaatttcaagcctgaggaggaaatcagataagatgaaaacaaaggagaggaacaatgagaagtaaaaggggccagagctacaatgaaaaagaacagctaaaggcagattcagcacacccaccagaaaaaaaaacaaaaacaaaaaacaacaggtcaaattagtcgataattaattctttttattttgtattgcatgctacctactttaaaaataaaaagacactttaaatgtctgaaggcagaggctaagggactctaaccctgacattaatttggaagaaaactgagccatggaaatatttggaaatatactgttttcaacttgggtttaaattttacacttttccatgccatagcatatggatcctcaccattctttttaataagcacactcactgtatagatggatgtgccacaacttaatttatcaacccccttctgaagggcagtgggtgacaagaagaaaaacgcatagtgttgccgaacagcaagaatgtgcagggaaaagctgatgcctcacatcaactatgtggctcatttcctcccttgtgctttttttgactccaattctgccggaagagacacagggatacagaaagcagctgtccaccctggtgtgtccctctactgttctttttcttcccctcacagcgggcgcacactattccaaccaggcaggctatttacttttaagtgtataaactggcaggttactctttgatgtttgcttggcacttaaacagaatcacaaacaagaggggccaccatgaccttgccaggagctcccaaattagagccaggggcaagacacgcctctctcagtgacactgcaaagaaagataccgcctcatggacagatcataagaaaactcagaaatcagcatttactaacatttgggtgcaacacacctcaaactccagatagtggtctttcagtttgtactcatcgacgtccttggctttgaccttcttgtcggggggatatgagcggtgctcggccagctcggtggtgatctgcttcagcttactttcatgtgacttcagttgctcctcctgcaggaaatcatgatgccatttagcgttcaaaaaaaaaacaagtcaataacaaagcacagcatactttaaaaaatcccctgtgctgaatgactttaattcactaaaacagcccaatgtgcctctgctgccacatccttccagctttctcacgcccctgtccacatatttcatatattccttcccgggatggcaatcaaggccaacctctttaactaggtcccttgtcataaaaccaaatggcttccgagctctttatcaggtgtaaatgcccctgagttgggaccaggccttaagagatgccctgacaggcatgtcaccagctgaacagttaagcagctagcatggaagctgcacaccttggctttcccatttcatgcccactcagcaatgctgccagcttttccatccatcacaatgaatgaattgtaattgtctatgtgcatattttttttcctttttgaaagaagcagagctacgaagaaaaatttcttctctgaagcttaccagatgatattctaaaacatgcagctatctcgcttttctcttaccaaagcagcagagttcttagttccttcaacttgattggcccaaagcaacccgtcaattaaaatgtatctacctatttagcaattattgccttagtagcattattataggtaccgtgtaccaatgcaatatggttgatcctacatcaaaggatttccattctaagggtaccatttatatcaccttagcaataggctacccaaaaagatatgttactgaaccttctgccagcattttaaaaacattcttggaattctcttgcattcttgaaaatgtatgactccttactgttctagtttcacatgcaaattatccaaatttcacaggtacaataagataaatgggtaaaggcaaatgaaacagatctgactaaattaggtgataaatgtattttatataacaccaacataattgtagaacacaaaaatcttgtagaatgaggggaataattttttacataaacagaaaatgaataactatggacagtaaattacaaatatataatattgttgtaaattagaagaaaacgtgtccagaaattatgagcgtcacatataatatcttacggacttttgtaataatgtacatcttaaaagccaaacaacaaaaacaaaatccaagtcaaaaaccatcaaaacagaagaaaacaatgacaagtaaaaagcagaggacacgaatggaaaaatgaacaagaaaggtagcatgaacacgtggagtgatctaaaaatgacaagattcatttctaaatgccaactataacaaaacaaaatgaaacactccaagaagtcccagaaaaggacgaaggagaaaagaaacctattttgagattttagaaaggcgtctacatctccaaacctattatttgtatactgataatgctgaaagtcaaaaatgcttcaggtagcttttatttacaagttcttactcatctattactttcaggcaaggagactatcaactatgttatggattgaatgtgtccactcaaaattaaccttcagtgtagctatactcgaaaatggggtccctaaagaagtaataatggttaaatgaggtcataagagtggggcatatatccaataggattagtgcccttataagaggagacactgtgtgcaagcaccaatggaaggccatggtggccatccacagccctaggggagagccctcaccagacaccaactctgctggcaccttgatcttggatttcccatctccagaactgtgagaaaatagatgtctgctatggaagccacccaatctatagtgttttgttatggcagcctgagctaagacaaactatatcaatagtttttatttctttcaaagttgttttcctttgtgtatttattgcaatatgtaaattacctaatagacttcttgacaaatgatatttagtgactggaccacttcaaaaaataaaagcatgatgtattttccttcttttctaaaaaaagttttaaatatataaaaagtcatattgaatgatatatgaaaaacacccatgaatctaacataggaatttaagaaataaaatataaataaatggaaactccctacacatgtacgtgctcatctcattccttttcagtgttattcatatataaagatatgtaaccataaaaatacagaagtgtagccgggtgtggggtgcctcacgcctgtaatcccagcactttgggaggctgaggcaggtggatcacaaggtcaggagtttgagaccagcctgactaacatggtgaaaccctgtctctactaaaaatacaaaaattagccaggcgtggtagcacgtgcctgtaatcccagtgactcaggaggctgaggcaggagaatcacttgaacctgggagatggaggctgcagtgagtcgaggttgcgccactgcactccagtctgggtgacagagcaagactccatctcaaaaaaacaaaacaaaacaaaaccagaagtgtattctctaggttttatacttgatataaaaactaattaaaggctttcttttgtaatttttttttcactcaacatgtttttaagatttatctacatgtatgctctagttcctgtcttttaaacattgcatagtaccccactgcaggacacattacaattttgtttaaggatatttagcttgttttcaggtttcctgttgtgggattttttttccctgttataaatgatgttgcaacagacattcttacacatgtctcctagggaatctgagcaagagtttttctatagtgtgtcacaaagtgttggcatttctgggttttagaatatgcgcatctttaagatgactgttttctaaagtgtttttatctgtttacatttccacagcaggtctgaaagttctctttgttttacattcttgtcaaaatgtgatgttattatacttgtaaattgttgctaatttcataggtaagaaatgataagccactgtgatttgaatttatatttccctgaatatgaatgaggatgagattttgttcataggtttactgggtttcctcttctgtggattactggacccatttttctattgggttgtttgccttttaaaaaatagatttgtatcagtatagttatttataatatatatgttaagaaatcaaactctttctatttgtggttaggaaataattagaatccaataattagaatccaatgatagaatccagtttatttaagaaaaaataggattttaggtaatttggtaaaagaatttacaaacttctatttttttttactttggatctatgcaaatatgctttcagatgtttgcttcttctaaaagctttagatttaggctttccaatcttgaatattcaaatgtctctttttctgttgaacaaatcccaatttctacttattttaatgaggaatacaggctagaatgacaatatgtgcaacatcttatgtttttcactttcctcccaataccagggcttgctcgggtttgttcactgttaccaagctatggtacgtaaatctgtttctacagcagcataaagggctagtcatttaggctatatttttacaaaggaactaaccgaggaagtgctgatgttcaatgagaaatgcttcactactatttcactggcttcataaggcaggagtcaataaagtaagctcaaaataaagcattttaaaatcacatctccttaaatctgtccattttgaacagtgaaatagaaatgccaagtggctcttacggacacagcttgaccatgcaaattattccagtgctagaatcccatgataagaaagatacacattttacacacacacacacacacacacacacacacacacaaacaaaaaaacaacaacagcaacaacaacaaaaaacaatggtaaaaaacaacgggagagaggctgcagccatggagatgtcacattctcagactcaggacaactacatttgtaatagacacgatgaagaaagacaaagtaggaatttgcttttttattcccccaccttttgtctttgcttttacagttctttagggatgcatacatactgtttttagaagacaatactagcaaaatagatttcagagatggcagaaaaatattacatttgacaaagaaaaggcatggagatagaaaataccacaaactcataaaattgttttaagttaggaagtgataatttttaaaaaatgaaattgaaaatactagatacaagaaaagttgttgtggttatatgtcaatagatttaaatcagtaagacctttcataatatatacaacaacattttatctaaaaggcaagttttcgaagtcacttaggatttcatttacttatattaggggttaatccccaaagtatataaggaactcaaaacaatacaatagcaagaaaacaaagcaattaaaaaatgggcaaaggactttgctatggtttcattgtatccccttcaaacttcatatcgaaacttaatcctcattgtgtagtattaagagatggtgccttttggaaagtgattgagtccctcatgaagcggtaagtgtcttatagaagtgctggagtgatataggttagacccttttttgcccccgtcttctgtcatgtgaggatacaacatttatcctcacaaatgctgtcaggaaaatctggaaaactgtaagaaggctcctcaaaaaactaaaaatggaattaccaaataatctagcaatcccacttctgagtatgtagccaaagaaatgaaatcagtatctcaaaaagatgtggcattctcatggtgagaccatgccgtatcttcttcaagaagagggaacagctcttggctgcagcattattcacaatagctaagatctagaagagatctaagtgtcctttgaaaaatggataaggaaaatgtggtatatatacacaatggagtattatttattcacccttaaaaaagaggaaattctgtcatttgcgacaacatggacaaacctggaggacattttgctaactgaagtaagaccggcacagaaagacagatattggatgatctcatatatggaatctaaaacaattgaactcatagaaataaggagaatggtggttaccagaggctgggggcaagggactggggacatgctggtcaaaggatgaaaaatatcagacaagaggaataaattctgttgtgtatcatgatggctagagttcataataatgcactgtgtatttcaaacttgctcaaagaatagaatttaagtgttctaaccataaaaaattgatatagcaaaacatcacaattatacctggaaatacatataattattatatggtcaattaaaattgttaaaaaaatatttaatttttttcctatttatatagtacttaggttttgagaacaatttcagaatttcctttaaaatattaagctctaatgtcatctctatgaagacagtattgcttaactgatcaggcaatgggaacaggcaacttggctgttgaagatcttgcagtgtgagtcaagggctgacttggagttacagtccttctcccccggtgcaaagcccaggaccaagggccagaaattagctttttatctttttataccaagtataagatttacatagtacttatcatggagagaaggatgagagagaagctgtgaaaacttaaaggaaacaataaaatagaaatgcagatggctccaagagggaaaggaggaagaatgagagagaaggcagagagaatcgggaaacagagaacacatttatccatccgcgaacctcaccgagcgcccatacagcaggcactgtgctgggtgctgggaataagaagagggaacagccacagtggctgccaccagtcttttcctccaagctgtgggatacagaatcctagatgttctaaggtggaagagaacctggccactgtcctttctaccctctttgtcttagagaagatggagatccagagagttcaagtaattgctccagttcagacaaaaggacagagtggcagaagccacattctcccaacttctatcatgaagtcaccttggaacagccttctgaaatccaaagggctgtcaacaacatagcttcagcacattgtcttacttgacagatcaatcctgaactcagctttcagagctcttggtaaactccactgctgccgggtctcctctgctatagctctcaaacgtgcaggctggactcagggttactcaccttgctccaaattccactcaaaacctctgttacaggctgggcctggtgactcacacctgtaatcctagcactttaagaggctgagatgggcggatcactgaaggtcaagagttcgagaccagcctggccaacatggtgaaaccccgtttctactaaaaatacaaaaattagccgggtgtggtggcatgcgcctttaattccaattgcactggaggccgaggcaggggaattgcttgaacctgggaggcggaggttgcagggagccgagatcatgccactgcactccagcctgggcgacagagtgagactctgtctagataaagaaaaagaaaaagaaaaagaaaaagaaaaagaaaaagaaaaaacaaaaacaaaacaaaaccaaacctatgttactctagatcacaccacttcttcctcttctgcattacggcagcacttaaatgtctacgtcatatgcttagcacaaaatataccctgacctttgtgtgagttttatctcctttaccgattacaagctcttaaaaaggcaaaaaaggtcacttttttccttcccttaaatcctccagtatccagtaaagtgttgagcagagagatagtatgtggcagcttttggtttatagacattacctgcctaacatgaacaaataccttaagctctcagaagttgagggccaaggcaattgtctcacctgtttttataatgcccacaaaacctaacatagtacctgctatacaggatcttcggtaaacagtagctgaacaaatagatttttttttttaagtgaagatacagaggggagggcttagactgtttcctttgtgctgtcttaaaggagacagatgattttcagggtaatcatgtatctagggatccgcagtgcaacttagaagtcaaattgctaaacactggaaactgttcaaaacgaagtggtacagaatttagaatacagaacacctgtctttgagtcagtttgagggaggctcaatccaaaagattgtttcataatttcatgtttaagacagctttagaccttaaacacagtatttaatgagtataagcaaaatagcttccacatgatttaattacttgttttattgggtacttaatatatattaaatacagacctcgaagaaatgaatttttaaaaatctatccattcaggaaaagtatgggtaacaattaaggccacatcaaagagtttgaatgtgaaaaaatgaatcagttaagggtaagtgacataattagaatcatattttagtcagaactgtaaagggtggatcagaaggacataagattactggaagagagatcacaagtggttacagaaatcatctgggtcagattattccaaagtggggtgtgtgtagcccaggcaagatgacccactgcaaagagttttaaaatcagtattgagatacaattcacataccataaaaacacccctgcatgtctaacagtgctgaactcgtttatgagttttcaaaaattttaatagctccttaggcactgggaaaaaatttaaagttttcttcttcttttttttttttaatctaagcactacaaaatgttaaggtttactaatatttattactgggattgacagtggaaaatgtagtttattttctttaaaaaagcatcatatattaaaagatatctgctgaaatatttagtattgggataaggtgaatagtcaaaaaagtgagtagaccagtgatctaggtagaatatgacaaaaatctgaagcagtaggtgtagaatatgaaagacattggccaggcacggtggctcacgcctgtaatcccaacactttgggaggccgatgcgggcggatcacctgaggtcaggaggtcaagaccagcctggccaacatggtgaaaccccgtctctactaaaaataaacacattagctgggcatggtggtgcacacctgtaatcccagctacttgggaggctgaggcaggacaatcacttgaacctgggaggtggaggttgcagtgagccaagatggcaccactgcactccagcctgggtgatagagtgagaccttgtctcaaaaaaaaaaaaaaaagatatttagagggtagaagtgacaggactttatgacagaaactgtggaaatgggtgggtgggggcgcagtgaaggaagcaactacaagaatgacctcctcccctgaaatcccactgcccgtaaggtcagctccactcacctggctctgagcaccactgccttgtggtcataccacaggacaaaaggaggggtgggggttacttcagcgtgagaatcaagcataggactgctttgcttctgatcagtatccatcttaagtctgaccaaaaaagtatttagtacccatggattcaaacttttataagacaatggttggaattctaagaaaaaagacctagatatcaggaaatgaagatgtcctggggcaccattctctaaagaagcaaggaaagacctagggtaggcacaggttcctacagtgtagggtttaagtgggatctggagccacctgccggcctggagtggaaaagaaacacacatgtgtccctgagcccagcctggacctgaacgacctggtggggctgggaaatgtgcattttctgcaagtcccgacatagctgttgtgcacactgaagtttgaaaagacttctctggtgggcagaaagggaggttgtgagcagactgtgaacagggccggccatgcatttctgtgtttggagagctacaccagaaggagaagcaaaacttgtattttcaaacaagtctttccacccccaatagaagaaaaatgtgctctggcagcactgtcatgaaaaacaaagaaggcgactcctcctacacagcagagttgttcagaaagtaccacgctgcactggcaataatcaattttaatgattaaggctaatgtgttttgcataaaagacaagaataaattaaagcaaagcccacaaatgacagggtgacaaacactgtgtcttgaaaaagcaccaaacaatcttttaattgaacgtctaatttttccccacactgtttatctttctttatcaatgtttccagcaaggcactcacatttttatacctgtattttgtaaagtaaaattatccaaaaaattgtggcatttaggggagtcagagccaggttgtgggagtatggggaaaaaaagatagctggtctcacggcttcacatccactggctaaagcagtggttctcaataggagtgggttggattttgaccccagaagatatttggcaatgtctggagacatttttggttgttagaactggggggtccctattggcatctagtgggtagaagctggggatatcgctaaacatcctacaattcacagaggccctcacgacaaagaattatccacaccaaaatgttaatgctgctgcgctcgaatatgcctgggttaaaggatgagagctagtctttgaggtactggaggaatcctaggggcagccagacatcttccaggatttgctggaggcacactatgaccccagtatagatatccccaagagcctcaggtgctactccaaatacatgcttaattttacatatgtgtttctcaaagctaaaaatcttatctttagaaacaaaccttatgactcggcaaagaaataatacagagctttggatagaaaaatccttgctgggcagggtggctcacgcctgtaattccagcactttgggaggccgaggtgggcagactgcttgaggccaggagttcgagaccatcattgctaacacggtgaaaccttatctctactaaaaatacgaaaaattagctgggtatggtggcgggcgcctgtaatcccagctactcgagaggctgaggcaggagaatggcatgaacccgggaggtggggattgcagtgagccgagatcaagccactgcactccagcctgggcaacagagccagactctgtctcaaaaaaaaaaaaaaaaaaaaaattccttaaaaacattctagaaccatctcatttttctagatggaaagctgaggcccacaaagcaaatgctgggtgatgcaattcagtggggtggcggagatcatctcatttctttccaaataaattaaattcctgaaatgatacggttaccttgtcttacatgatactgcaggatatttctttttggttattaccttcttatttaaaatcttcaatccctaattgtgattatactacatatgcatgtttttgcatctctgtggatttatgtccaaaatgaaggaaaacatttttaaaaattatgcattctatttttggttccagtgtaagtcatctgttagaaataagagtgcctaccatgataaatgtgtgtgcttgcctgttctggggaaaacacgcaaacagatgaacacattcattttcacgtacatatcacttactagtatacagtccctaaataggaaagcagtacattttttaaagtataaagtaaacagaactgtagattttagtgagggaaaatcaaggaaacactcatatgttgctctaagttacattcaccttccatgaatgacatgcttattatcagccctctttagttcaactcaccttctcccctggatcttttatagaactgaatgtgagaaagacccaaactactgaaaaagaacaatgggaaagtccaccgtaaaattaatagagcaaaactcaattttggaaggtttttttttttgcttccagttacttgattttttccctccccttatatcgtgtaatgtgatttaccttttatgcgacatgctctttatgtggtatgctgcttatgttaagtatgcatatttaaagcagagaaatgcatttgctttaagagttcatattttagttggatagatggagatgtctgccaacataccttctggtcatcagtaagagcattccttttcttttaaagttgtagtgtacttattacccttaaaaattcaatgccattgtgtcctgcaagaactgtacagtaatagtaatgcttacaagtaagcattcaatatatgttaatgataattatgaattaaaaacagaagaatctttcctgaaaccacagattcttccttcttactactagtctttctgtttttataactatggcaacacttgagcacattttcctcctccacttccttattaccttccattcattcccccatcaaagaaggccaatgtggtttgtcttcccatgactccaccaaaatgttcttgctaaggttatccaatgatatagtttggatgcttgtcccctccgaatctcatgttgtaatgtgatccccaatgttggaggtgggacctggtaagaggtgtttgcgttatgggggtagatccctcatgaatggcttgatgccacgcttatgataatgaggtagttcttgctttattagttcaagtgaaagtgggttgttaaaaagagcctggcactttcccttcctctctctcttgccatgtgacacatctgtttccctttccccttctatcatcatttgatgcttcctgagattcttaccagaagcagatgctgatgccatgcttcgtgtatagcctgcagaaccgtgagccaaataaacctctcttctttctaaatgacccaggctctagtattctttatagaaacacaaaatgggctaagatacccagtgacctcccagccactaaatatcacatttttaaatctaaatcttcatggaaccttttcccccctttcttggcacaacattctccctgtttgtattaaatctaagtaactttttggaaaattgcttatcaagtgccttagtctgcttctgagctctggccactgcaggaattggagacagaaagaagaaaatgatccaagaaaggagtctaagaagcaaggggggaaatcaagagacagtgaggtgagactccagaagcaggtcagacaccacagtccccagctgtccaagccacaatgacagcctgtttcctctacttccatgagccaccagaagtgtccattctacactttcaaggtctctcaagcactttcactacgatccatttcttctgcagctaccttggttatctctcctctggattactgaaaattcctttaaaatgggcctttctgcttctagtagtaccttcttcttcttttttttttttattatactttaagttttcgggtacatgtgcacaatgtgcaggttagttacatacgtatacatgtgccatgctggtgcgctgcacccactaactcgtcatctagcattaggtatatctcccgatgctatccctccccactcccccgaccccacaacagtccccagagggtgatattccccttcctgtgtccatgtgatctcactgttcagttcccacctatgagtgagaatatgtggtgtttggttttttgttcttgcgatagcttactgagaatgatgatttccaatttcatccatgtccctacaaaggacatgaactcatcattttttatggctgcgtagtattccatggtgtatatgtgccacattttcttaatccagtctatcgttgttggacatttgggttggttccaagtctttgctattgtgaataatgccgcaataaacatacgtgtgcatgtgtctttatagcagcatgatttatagtcctttgggtatatacccagtaatgggatggctgggtcaaatggtatttctagttctagatccctgaggaatcgccacactgacttccacaatggttgaactagtttacagtcccaccaacagtgtaaaagtgttcctatttctccacatcctctccagcacctgttgtttcctgactttttaatgattgccattctaactggtgtgagatggtatctcaatgtagaaaaatcacaagcattcttatacaccaacaacagacaaacagagagccaaatcatgagtgaactcccattcacaattgcttcaaagagaataaaatacctaggaatccaacttacaagggatgtgaaggacctcttccaggagaactaccaaccactgctcaaggaaataaaagaggatacaaacaaatggaagaacattccatttaagttttcgggtacatgtgcacattgtgcaggttacttacatacgtatacatgtgccatgctggtgcgctgcacccactaactcgtcatctagcattaggtatatctcccgatgctatccctccccactcccccgaccccacaacagtccccagagtgtgacattccccttcctgtgtccatgtgatctcattgttcagttcccacctatgagtgagaatatgtggtaggaagaatcaatatcgtgaaaatggccatactgcccaaggtaatttacagattcaatgccatccccatcaagctaccaatgactttcttcacagaattggaaaaaactactttaaagttcatatggaaccaaaaaagagcccgcatcgccaagtcaatcctaagccaaaagaacgaagctggaggcatcacactacctgacttcaaactatactacaaggctatagcaaccaaaacaccgtggtactggtaccaaaacagagatatagatcaatggaacagaacagagccctcagaaataatgccgcttatctacaaccatctgatctttgacaaacatgacaaaaacaagcaatggggattccctatttaataaatggtgctgggaaaactggctagccatatgtagaaagctgaaactggatcccttccttacaccttatacaaaaatcaattcaagatggattaaagacttaaacgttagacctaaaaccatagaaaccctagaagaaaacctaggcattaccattcaggacataggcatgggcaaggacttcatgtctaaaacaccaaaagcaatggcaacaaaacacaaaattgacaaatgggatctaattaaactaaagagcttctgcacagcaaaagaaactaccatcagagtgaacaggcaacctataaaatgggagaaaattttcgcaacctactactcatctgacaaagggctaatatccagaatctacaatgaattcaaacaaatttacaagaaaaaaacaaacaaccccatcaaaaagtgggcgaaggacatgaacagacacttctcaaaagaagacatttatgcagccaaaaaacacatgaaaaaatgctcatcatcactggccatcagagaaatgcaagtagtatcttcttctaacaatttctcatattgtaatgagaataatttttaaagcaaaaatgtgatcacattactgtcctgcttaaaactattattattattattattattattattattattgagatggagttttgctctgtcgcccaggctggaatgcagtggcatgatctcggctcactgcaacctcagcctcctgggttcaaccagttctcctgtgtccacctcccaagtagctgggattacagtcatccaccactgcgcctggctaatttttgtattttttactagagacagggttttaccatgctggccaggctggtctcaaactcctgacctcaggtgatctgcccacctcggcttccaaaagtgctgggattacaggcatgagccactgtgcccagtcttaaagctattattttaaggatgctgggaaccacagcagcatccaaaatcctacacacgacaaacaaggcctttcatgatttggcctttgctgacctctgcagaggtacatttcttgctttttctcaacactgtgctcatgtcacagttaataacttgtgtgtggttcctgcatccagcgctctcttctctaggccttcgttcctctgatggctctttttcctatctcgtcccacacctcacctaactgcctctcatcctttaagctgcacattaggtaccacatttcctccttcacctccaaggccaggctagataatgtcccttccttgaacctccacagctctctggacttatccttcctgtacttctatcaaatcattttacaatgacttccttatttatatttgccacaccttcagcagaggatctggccttcatctgcctttctatctccagggccaaaaatagtctctgatgtacaacaggcacacaatacatatttattaaattaatctatcattgataattgctccctctcttgccatgggacacatcttatgatatcaaagatgtatagggagctagttaataccaacacttggtcgatcatagtaagataaaactgtctctatgtaataagaaattcacaaagacatcaaagtagcttccaaaatctttaactagtcaatggcaagggggtactacagacaggtttaaaatgagcaaacctagctggtaggtagtgtccttagaagagttttaagtgaaaaaggacatgataaaatatggcttttagtaagattaatctgaccacagaaggaggcttatgtaaatacacttggagcagagttctggtatactttatcttcattagcttggaaaatccaaatgttccattcagctctgctctgaggggtagggcaggccatttcccattgtaatatgaaccgtggattcctgaaaatatttttgtatttctagcactaaacacatcctggaatatggtaaatgctcaataaaaatgagctaataaatgaatgcaagaaaagcttgttaccaagccagattatgagctggcagttaaaacaaacaaaacatcaagtattgctcataatgaactaatataaaccttagaaactgaatcaaagtacgtgtcctactaactgagactcaattatgtcagcttcctacatgaagtgtaaaacccagtgtactgcatatctgcctcatttatatgatacgctctcacagggcaaggtctcacacctgcccccaaaacatggactactatccaaagacaaatatttatcacattattttacaaagtactttttcccaaggtcaaagcactatcaagatgattacctgagacagttttgttgtagtggcaggcagaagtgggcggctaaacttcttctgagagccgattgctgctggaaatggtggtgcagaaaatacagctgccacacaattgattttgtttatccacccttgcatttcctctgggctcctatgagaaatagatatgtttatatcaggatattgccatgtctaagtagcatcacactttgcctatttcacgttactgatttgcaatggcatgtgaaaatcatttactcctcctggtacaactaatccctgacaaaacttcattagagatgaacattgtcattcgacgatcaccaaagaagctatgatcatcacagtgccagactgtgattctctccctaggaaacagaagggaaaaaagagaaacacttgacaataaatattgattaaacccctactttctgtttgatacgaggctaggccaaaaataaattataaaatttactcatctcttctaattgtactgtttaattttaaaatctaactgaggaatgcattggtagagggaaggtaaaaggatttatctactttggaaaacagctgacaggttcttcgaaagttaactgtgcatgtatcatacgtcccagcaattctactcctaagtaactatccaagagaaataaaaacatatagatatgccagacgtggtggctcatgcctgtaatcccagcactttgggaagccgaggtgggcagatcacgtgaggtcaggagttcaagaccagcctggccaacatggtgaaaccccatctgtactaaaaatacagaaattagctgggcatggtggtgcacacttgtagtcccagctacttgggaggctgaggcaggagaatcacttgtacctgggaggcggaggttgcagtgagcagagatcacgccaccgcactccaggctagggtggcaaagtgagactccatctcaaaagaaaacatacagatacacaaagatttgtatgttagtgtttatagcatcatcattcctgagtcaaaaaagggaaacaatccaaattgtccagtaaatggataaacaaaatgcagtaaatgcacacaactgaacagtatttagcaataaagtactgacacacactacaatacagataaacttccaaagctttatgttaaataaaagaagccagacacaaaagaccacatcatatattagtctgtttatatgaagtgtccagaaagggcaatactgcagaggcagaaagtagatcagtgggtgcctggggctggaggtgagaatggcagtgactacaaaatgcgcacggggatctctttggagtgatggaaatgattcaaaactagattgtggtgatggctgagccattctgtaaatatgctaaaaaaatcactgaaatgtacatttcaaactggtgatattttatggtacgtaaagcatacctcaataagactatttagaaaacccacctgagaggaggtgaaaatcatctgatgtgatcatatttttaatttatgtgtcattatatccagaaagcccaagattcacagcacttaataaatatttgcaaactcataaatgaatggtagaaatgatcatgaatcaggacagattatctaccatacacataatcaataaacaaaaagtaaaaaaaaagtcagccaaagtcatttccttcatcaattactctgagagaaaccacacaaacaaacctgagaccactctaaatgtcagctcctcacggcaccctctctaggctgatctctctggctccattattatttcaatggactgttttttgcatcaattctgtccaaagtaattagatctccttagttattacatctggtatttttgattgaaaaaatcagggaacagaataatttgaaagtttctttatgcccaatagctgtaattatacatccagctatgggtccctgtgtgatgttaaccatcccattcctacactcaaaaaccccgggcaacttgtttccttataacctccccctaaaactggcaattcatcccatttccttgctcacagtagaatgacatcttttccttctagtataatcatggactactagagctcagaagggaaacaaaaaaataaacatttacatttattgaacagttcctatgtgccaggcactgtgtgaggtattatacacacttatctcactgacttctcactagaactctgtaagataaacgttatcccccacactagtgacgagctgaggttcagaggttaaactatgtgctaggagaaagagctagagaaacagtgttatctaggtctgttttactcattttgcgataaaacttgtctactaaaaccctcatattttattgatgaggatactgaattctagagatggtaagtggctgactaaaagtcaaagggctactttgtaacaggtaaaaatgtaaatcctgggtttctatttttttttactctaatcttcttaggcagttatttctctaatgtaagcagttgatgactttgattccaactcaaaaaatttcccctgcagagcttgattttgttccttgcaataaagtagtgctaagtgaactaaaacacaaaatcaaataaaaaccaacaaaacatactgagtttgaaaaagcaagaccctccagtcggcagttttaagtttaaacacgtttggtttcttctcatagtccgtggccttggatgccaatgcgtggtgcacactcacagcgtttttcaagtcctcttcagacaaggccttttctggcttgtattcatcctatagatggacacaaagaaaataaaggcaaaaatcacgatcagatttcaacttaattttttaaaagcaaaaactaaaaaaatagtttttaggaaatccaagtaagtgaatgaaaaaaatgaaacaaacggtgagtaaaaacaaccttataaatgttacagaacattatgttgtttgaaaaatttgctgagaatgagaaaatacatctacccaaggcatttttttaaaaatcagtttttttaaaaaactgatatacaataattgaggtaaatagctaagtaaggccaaaggcagaaataaatatctatcgtacacattttataatgaacagaaatgagacttggaccaatagtgtgatttggtttcaggattaaatggttaaaagcacaaccttacaggtaactgtcaacagaattataccgaggataaaaacaatgccattgtgttctttgctctgaagatattacatgttcctgttactttctgtttagactaatattatcaaaagaaaaatgaatagtaaaataaaataattactccagctcttctgctgaaagaaaagaggaaaatcaataatcaggtgaaagcttagcttgttatcaaaaactgaaaaataggtaaatgcatatgctaccaactgttagatattttctagagtttaaggcctcccttcctccttcccatattttatcaaaaacaagataaacatgcattctgtaaaacacacacgtgtacccccgaacacacacaccacatcaccttctaattagtagtaaaagcctaaagaaagatattgtctgttttcttatcagtctgcttttacaaattttcacaaaaacaatgccagtcctccatacttcccctccctttcatttatcccctccaaaaaccaagcagttcaaatgtactattgccatcaattcaaattgagtcaaaaataatccttcatgtgacaatgctgtgaggcaaaggttttccctctacaatatgatgtaaataccagtggtaatataaagattatccacatttataatattaaacgacaaaattgttactttgggattgcaacaagtcttactttattaagcctcccaggataagaagtgctattgacaatgacagtcttctcgagtggtatgatgaataaaggagaatttaaaaaacaaatacaaggtatttatatgtacctgttactaattcccactaattcataaaactataatctagttatgttttaagatctgccttgtcattttttaaatgagatttttctcagtaatttagcattccaaatattcacaaatctccttccagggaaattttcatcagagtaggaatttcaactagaggtagcatgactacaaaacccctctggccttataattacgctataacagaacccggcacatgtggctctccacgcagtgtaacttagattccagacaaaaacatgaggtaggtaaataactggaatgaggagaaatgatgagggccaaaatcacttgagggaatttatatgccacctccatttccatacatactgatcccctaacacacctaatgattgagtttgcacaaaggttagcctagaaatttgtgtgtactttttttttttttatattctaggtccatgatttaagcttttatcttaattcctcttccctattttctttgaattaatattttgttgttgtttgaatttcttaagatgattacctagttcttttgttttccatatttcttctttggttaagaaagaatttaaggttacaatttttcctctgagtatgggttacactgtgtagcagagtttgggaaagaagagtattttttcattgctttctagatagtttgtagttttaattttttatctcttctttaatcttagtaatatcaaataatgtgcttctcaaatttaaggtaaagttttagttatatattattagatattcataattttattggcttatgaccagagaatatggtctagaaaatctattttccccaaatttggtaaggtttttcttgtggccaatcacatgtttgattttcgttaatgttccataaacatacaaaaaatttattctttgaggaatgaatgtgtctttatattcaagtttattgactcggttcctctgcccttacatcattttttctactagtttatccccttcagacacgtatattaaccttttccacttcaagttcttgttgcatttctgataagttttatacatattttagttgctatgttgtctggtgcatttaggtttataactatcatcttccttataactatgtgccacttattacttaaaatgttcttctttatccgtttaatgcttagtcatataagatggaaatttaaaagagtctttcttttacgaaaatgctctgtttatctattcctcacccacatcaacaagataagactttgaaaaatgttttgttctgcaatcttactaaaattatcttgtgttatgcattttctgtttcaagaagccttattttgaatttagattatacattctgagtctcccctcatagatttaactgcatctatgtttcctcgctcacctgcttctttcttttttccatcttgacctctctcctctcatacctttgctattttctcttctctcaagtattttctttaggtaggtggtatactgttttattcttatcctcaagtatctttcatttctttgataggtatagaactggatatagaacatatggctgcagtcttcttcattggttttacttattgtctggagatgctattctaccatcttctagcttccagtttaatacaagtccaatgccaatctaattattttctctttttcttgtttttttctcttaggaatcacatatgggttttcctttaatcttaggattcaggattttttgctaggctatgccttacttttcttagccatccatttagtctgaaactaaaaagtcccacccttattctcccttatgtaaccattcacttgggttgataattgctgacaaaactaataaacatagttgtgcagactgtagctaagacagatttaaggtctccagctacggctgcatccagtgccaacctacaattcttttacatctccatgatttgtgaaattcttcctcagctttttgttacaataccctcctggtttctctcctacctctctgatcattattttgctatctcttcttcttcatgcccttctatgtaaccgttgggatggtttgaactccagatatatatcacaatgtctaacaaactgctacaggtgaataggaaacacaaaaccaattggtagctattactattgaatgacttagactgtctcatttggagccactataaatattcttcgagtatattatctgctgatatcttcatttaaaatcaagctcaaaggatgacattcttatgctactcttaaaaatgcaaaaaaaaaaaaatttaatgctacatttattacagacccaggaaaaagctaacagtaattgtcaccttggaagaactgcaccattattttaaaagaggactctattccaaggtagtttcctaaactctaaggtaaactgccagattaccttatactggaaggagaacactatatacggcatcagtggaagacaggatctatttaattagggctaaactgaagttgaaaaattttaagtctaggaagcttccgcttttctagttgataatacaattttaccattttttcttaaaaaggcaaaatgcaaaccttaaaatattttcagcattctgaattcctactagaaaataaagctccaagtccacacacacacacacacacacacacacacacacacacaaagggcaaaaccaagagtagagtggaaacattagggttgacaattggattaaaaaaatgactttatcctactaagttcattctgacatctttatttttcactaaaggagaggatagtgtttaaatggtagaattgggcaggaagaaataacggataaatcatcgtaatcaaaccatttcaaaccaaggactatttgctgtgcaaactaaatgtgaaacagtgagcaagataaatccaatcaagaaattttctgtaagaaaagaaaatgctccacgacatctaattactatccattttctcaaataaatgaggggtgaaaatgatgactaaaaacatgttactctctcgtgttccctgcaatctacatcgttttatgtaacaggattcattagagcactccaccatcccaataaacaccaagaatgtgatttcacaatgctatttattttaaatccattaaaagcatgaaataaaaagctttttttccctgagaaacttgttaattaaacctcttgtgaagttgaatcttaacacactaacataaacatcatctacatatgtacaaaaaattggcatcaagtctgaaaaattgtactttcaggtaatataaactacaatttggaaaatgaccaaattgtaattaaaattcttatcaatttaaaaagcatattaaagactccagttttcaatgtactatttacttcatgcctcattaaataggtaaaatagctacatgtacttaaaacaattttaaacacagttgaaatggtcttgatttccactgagagaatataaaaagggaaagtgagaccacattgttacttggagctatgtggaaattaataaaaatgttagtaattaaagcaagctgggtcctaaattgtctattaattcatggttttgaaactggcattaaaaatgttttttataatttgatgaatatcttttttaaaaaatgctaagtatgtctgattaggcgtctttctaaaactcattcagcttcgtcctaataactatttcaacatgtaaaagagcacagaaccagcagtttcacaaaaggaaataaaaacgccatgagctcacaagaaagcaggatgagtgacaggagaccaggccagagatggacctgctccgggtgccacagtcttgggcacatcagctccagactgattgctgtcatcacagtctgggaggccttgaatcctcagtggcttccttctgtgcctgaaccaagccctcccctgatgcgacccagtaaacttttacaaaacctactggttttgtaaaaaccaaaaagtttaattccaattaaacttttacaaaacctattggttgagcctaggaggtcaaagctgcagtgaactgtgatcgcaccactgtgttccagcctgggtgaaacagtgagaatctgtgtcaaaaaacaaacaaaaaaacaagcccccaaaacaaaacacaaacaaacaaaaaccccttataggcaggtggaacaaaatctctcttccgagtaagccagagaataaagatgattctgcaccaaggacacagttcctgatctgtgatagtaaatgtacgttttagataacgaactgatttttcacttctaaagacagggtaaaggtaaataaattcaggtttgaacagctgctttctagaccctaaagataaaatcacatagagattcttgagagcctgatctgcagactacaataatcaagaggtgaactctaagtaattcactgccatgcactaacgagccacctacacccgtcgctcttaaccattccatcaatcatctctagggcagttcagttttgtaacaaccagaactggaacaagaataacatcacaagccttacaaaaatactttcaagagagaagcagagactggcagggacagacacaaagcccatgacagaaactgagagagaaactctgaagctttgtgatagcaaaggcttgtcaaagcacttggctagcggatgactcactctgtaacgaagtggatatgaagttactacccaaatgtcaaccatgatggatcatcagaaccaacaggaatggaatcattttaatgtcaattaaaatgcacattcaattcatagcactttctaatttttaaagcacatatgaactattagtattatattaaaataatatttgtcttttcttccatgaacgcttcacattcccatagtaataattaactaccaatagggcacacattttttaggtactcttgggctcaggggcactgcaagtactagaaaaaacacagataggagtgtgctcttacttagctataaaacagacagaaacactgtaccataaaagtcctattatgccagatcatgactgatacctggactctggaacagttttgaaatgtgcaaatatttaaatcagcccctatgctggtgttgtatatcacaagctctatctcagagagttatagcaagtagaaagaagtgttcacccgaatttattccattcaccctgtgttttctccaaccttcacctatacacttggtttacatcatgttaactggtgctttttcaccaggtgattttaagagtccactagccattcattgcataatactggtcttctcatccacactgtcaggacaagtgttttcagggaccagacgctatgtttatttctcacatagctcccaacatgacattttgtaaagggatctgacattactatcgtgatactccgtggatttactctttgcttgaaagtgaaaggcatatgtgactaagtaacattaaggaagtggccagaaaggaaaatgaggcaaatggtgatgaggcagattgtgtgtaactcagagaagcaaaacaagagctctggataatgtaagaaactgtctgggggaaaggaacaaagataaggacttactttactttagagttcaatcaacaacaggaaagaaacaagattcaatggaaatgagacagacaccggggacttattattttcaaaagtcacaggaaggggaatatgagaaaaagaggagtggagtggatcaaactggaaacttctgggtgagcttctcgagagtagttgtctatgtcctctctgcctctgcatcctcaactctccaatctgccttccacgctcaccactgcactgaaactgctttatcgataatttcctacttgctgaattgacgtggcactctccaattccctatcttaccttttcatgacaggacacatttcaaacatctcttaacatctctggtaccagttttctctctggcttagttttcttcctagctgtctggccacattgcacaggctcctcctcctttctcttcctcctagggcacatatgagtatatggtccactggctctgtcctccatcttctcctcactcttggagtgacatcatctacttgcatggcttaaattaccaattttttgttaatgactgttcagatctgcatttctggccccttcattggctccagatcaaagtatgcataattgcttactggacacatccatttattattccacacactctgaattcaacacctcaaactaaactctccaagtagagctatgtttccccctccatcttacccctgcccttgttcaagttaatctggtctctgtgtctttgatagaacctgtttccaagtcattctccaacctgcagccacactgatctttttttttttttttttttttttttttgagacagagtctcgctctgtcacccaggctggagtgcagtggcaagatctcggctcactgcaacctccacctcctgggttcaagcaattctcctgcctcagactcctgagtagctaggattttacaggcacgtgccaccacgcctggctaatttttgcatttttagtagagatggggtttcaccatgttggtcaggctggtcttgaactcctgacctcatgatccacccgcctcagcctcccaaagtgttgggattacaggcgtgagccaccgcatctgacccagattgatctttttaaaatacaaatataaatgctgtgcatggtggctcacacctataatccctgcactttgggaggtcaaggcaggaggatcgcttaagttgaggaattcaagaccagcctgggtaacgaagtgagatcccgtttctacaaataatagaaaaattagtcaggtgtggtggtggtcccagctactcagggggctgaagttggaggactgcttgatcctggttggggtcaaggctgcagtgagctgagacaccgccattgcactccagtttgggtaacagagtgagacctagtttcaaaaaaataagtaaaataatcaggtcactccccatttaaaacatgtgatagctccaactgctctaagataaagtctcaactctttaacatggttctctaggctcttctgcctcaaacaccactgaacctgcagttccccaaacacgctgtatcacatctaagtatccatacacgtttgtctctgagttcccttatatgactagcttccatttgtgtttttaagtgtggggttagatatcactttcttcatgaactctttcatgagcttcccttctcttgctcaggttaagtgcccttccatatgtgtttccatagcaccctcctctctttgtagcatttctcaaattgcactgaattggccttttgtttgttaatttcttcagaatgaagaagaaagctcctttgggcaccgtatcttgctcacaatcatatctctagtatacaacattctagaagacgggcaaagtcctaatcttatatatgcactcattattgacttgcttcctaggtaaatttatggccctctgtatcagaaaggtagtttactagccaaagttcagctgatactggatacttaagccatattttaagtgtcaatctgagagatataaaataggatgccaacagttccacatacttcatggtttctgggaacaatagacctgaaaaaggtctatgttagaaaatctcaaagtttatgtactcaactaatagaagatacgagacattttccagtgaaagagtggaaagtctcatatcccagtgaaagagtggctggagccaggcaagtgcaatcagagaaagggcaaagccatcattctttattcaagtcagaggctgaaggaaagttaatgcacagttgctgtgcagtggccaagttagttgaagctgggtgaagtcataacagttagagacctctccccacaacagcattttaaacttccagtaattacaaggctctcacactagagtgttcatatttacttaagaagacactaatgggaaaaatattagcttggctagtaccatctttacaatactgagtaggttaatcaactttagaacgccagcttttcaatttaaaaaatgggaacagtatccttctatgagattgtgaagctcagatggaagaagtaacctacaacctattatactaacaaaccagtctcatttctggctaaatggccaatgaagcaagctggctcaggcaatctgccaagccgtttcctacatttgtgatgtataatgctctgatctgggagtggttattcttttagatatgaaatatacagaaatgctctgcagggctatgtgggctttctttaatacgggaatactgctcttaaatgtctcttcaaaaaggtggggggctccttgtgcttatttgtttcatgtttttgctacatggaacgggtatgtagagcctatggcttattttttcataaagggactatctaaatatccagggttgaggtggtgagagggagagggagcggaggcatgtgtctgatctttggtaaaatttctctaactagaagacaagtatgtagaagtcatgtcatatatataattaatgtctatgggaatgaggaatggggtgatatggtatttttgacctgtgtttatgccacatcgctagctccagaacacgaagccctctgccttgcctggcactagtgctaggaggatttatggaggcatttgtctcctatctgaagtggaaacaaaggtagaagaaattacttatttttcaataaaggtaccagggaaagtaagggcctttatttggatggttgagaaggcctaactcttaatcatttcatacacagactgctgtaggaagattgtgaaaagggaggaaaataaggtctgaataaagccagtcactttatttttattttatttttgagacaggctctcactgtcacgcaggctagagtgcaatgacccaatcttgactcactataacctctgcctcctgggctcaatcaatcctcctgcctcagcgtcctgagtagctaggaccacaggcaagtaccactatgtctggctaatttttgtattttttgtagagatggggttttgacatgttgcccaggctggtcttgaacccttgggcttaagcaatctacccacctcagcctcccaaagtgctgggattacaggtgtgagccactgtgcccaaccacaccagacactttattccttatgagatgactaataatcaagaaaggactaaaagaaaaaatactctcatttcttataagagtcgtcaggaagggaaccaatatttactattaacctactgtgcaacaggtgttttcatgtatttaatcatttctttatatcaaccatgcaacatcatttcccctcattttacacagaaatgagttgaggttcgcagaggataattaactgctccaaatcagcaattagttaagtgacagacttggagtttgacaaggcatgtctacttactggagtatgactcttcgtaactcttcaaggtgtgactcttcttttggaagagccttttaatgctcttccaagagatatattttcctagggggatctgaggaagctggggagagcgatccccagcctaacaaagctcttactttaatacctaagaggctgccgacactgtgcccatgtgttcaggaggcatgcaacatatgggagcataaacacagggcggccacaaccttaagaggcatgagatattatttattaatgcttcaacttcctgtaggagtggccaaaaacctttgcaacaagccactttggctgggatgggagtagtgaaagaggttgagcgaatggagactgtgaggacttggcactcgctcctgtgtaatttcagctgtgcctagttttccttctgatgactattgtgacttttttgtttatttgtttttcggagggggaaagcctttactattactctccatttgtaatgaagaaatgcgaattgaattattcttgaattgttctatatgggtaaaaatcattatacgctattacgtagttgagaagtcttgatgaaaggcttaaagtaactgatgagcaactaataatgaaatgagaccctaaacagattgttattccagtgggtggggcagggggtggtttgtgtatgtgtgtggtatatatgtgtttacaatgaagggaaggtggtcttcaaagccagccattatggacttccggaatggctggaattgccagccattatgaattctttcgaagaccaatttgattcatttaatcagggaagcagtggccctgtttccttctgtctcaggcagtactacccccctcatttatccccaaggccgagacgttggcagccgcaagggggaaaatggagggcactcaggagggaagttaactggaagcccttggacaggattccttgatgctgagaaatgtatatggggtagaaaggtgtggagaaagagagaatggatgtagagcctgagtgtgctagtgaggcccttaaggatagacgccggatcctgggatctttgcatccccatctctggcaaagcccctgttacacaggaggccaaatgagtgagcttttgtcaaactgaatgacactaactttgggccagggcttttttctcctctcctcacccaaatagtgggggattggctgaagaagggaagaagaaggagagacatttctgctatactggaatcctaggagtgtaaatactggcatcctaagagcacagagcggagaacaacatggcactcccaggtcacatgccccacacaggtcctgtgaggagggctgcttagcatgggggacactatgccacctaagtcctttgagtacctgagtataggtggcagcggcaatgacctctcactcaaagagcttgaaattccttgagggaagaaaacagttctttcgtaaatgggacactttatgacattgtgataccatctctttaattttcgtgataccttcatcatttgaaacataatttttttcatcatctttctactgcttgctactccccctccagcctataatgcaaatgtaaaaagtagtttgccactctttgaatatgccatattctctcatatctgctattttcacccttctcttgctaaaatgctttttctcgcctgcctgcctggcaaactcctgcttatctttcaggcatcagttcaagtcatgttaattcctcagggaggcatcttctgacctttgcaagtatgcttagggggccttcttcagtaagatttttccacgcctctattaattcatctcattgcttagtgaatgctcaatttatctgttttcctcctattttgtgagctctgtgtaggcagggattgtatcttagttgtctttggaagcttagaattttgcacagtacctgatgtgataaatagctttgggaggatataaaacccaaactgtataaaccccaaaccaccttgtaatcatataatttactttttgtgtagcatctgctatcacatgctggtagattaggcttccaaccagggggacggattaaccagcagtgggacattagtaactccctgtaggatgcacacatcaccaggattagcccttaacacatgctacaacctggccaaggggaagaagtttaactatctactactcctgtttctgctggatggctcgataccccaaagaacgctatgatgcaaaagtctgctcagcagcaggcagtatcctattaacctaagagggagtggcatttccagatgtagatgcccataaggtcttccttcttgtacagtctacctacctttttagtttttagttttacagattaagaagaaactacagaaccaggtagaaaccacacaatcaggtagatatagccatacaagacacagaactatgaagtttaagcttccattgattgaggaattagtctctaggatctgtgcaaggtttccaggaacatatattagttctgattttttaaaaaagagcattaagaagagagtggagactggttattaaacatggccacccttttgcaggcttattctcattgtaagtagatagtttacagctatgctagcattcttatgatttaactgaaatagcaacccgaacaataacccatgattctactattcactcttcataaatgtataatttccttactgccaggcttttctctttataaaagcaatttcacccaactttgcccaaatgcacatttgccacactccagagctatcataaatccggagaagcaaccttcttggagctctaatccaagctgatgctgaagcttcaaagtttacaaagttgttcccttgtcaatactaacccattctccatcttgatgactcaaactcccaatacatttatctgagggagaggacagtgatgtaggaaaagctggtacctttgaaacagcatctttcttggcatcactcctctcaaatgttgaatgtgagaatagtgttctcttcccaggcccaccctgagatggagtgggtggaaatccggtggctaggtattcagagaaacggttttgccaaaggcagctatgccccttaacacagattttagacaaaataaagaagtgacccaagagagtggaatttatgctggggaaatggctgtgatatgtgaaatttaatttcaaagggttcttccttgcagagacaaaggtagctaaaaggaccagtgtgggcccagcatgtacacacatgctgatctggcagaggccagagtagctgacttataaactagaagcttataggactccacaggaaaacaagcttatagactccataggaaaataaagacagtatgagatagccagccacctaagagcatggataatctccaagtatcaacaactgcctccatttctcccttgtcatgaccctcaaagtaatgtgagaattttagaaggatgcggcaaatcatttactttgtgatctttgggtttcagctaactccatatctctttctacaaagcctattttcccaaaaagagatcatggtctaaggtgaagcattccatgctccaatattccttacctgatgtattccaaaaggaagatgacaaaagggtttgtgttagatatggtccttcctaatttggacacttgaaaacagttcagataaaaaataaaacaaaaaataattataaaaatgttgtttacaaagctgctctggtaatatgtaaaatgttaatgaaagatatgggtttccagtggcagggtctggagaaggggtggcaggcaccagatccagccatcaaagtggcaagaagcagccctgaaatgagccaaggagatgggcgaggaggcgagggcttctaagcagaaacaaaaagaaaagacaaagaaactctggagctgaaagcaaaggctgtgggcaagggtcccctgcccaaaaggttgatttaagaaatctgtccacaagtaagttgttctttgcgtctgaggtgatggtgatccttgccttccgttcttacttaaacatctgtattccctgccataacatattttgccacctacagctaaaatgaagtgctgtcttggaatctgttgaacatttaaaaataaacttttgtaaaaaaacaaaaacaagcaaagaaaacaacaacaacaacaataaaaaagcaaaaaagatacagtatagttgaaatataaagtcctttaaataaagatctgggtggacaaaggaaggctagttttaaaaaagaataattctttcaatctcatatatggcattattataatattttgaaaaatttaaaataacaataaatcaaatgtattccttcccagtctccattccaaagcagttgatcatctcagtggtgcaagcgtgcataccatgaggggtcgccatctgattcagtactgcggatagtaaatcaaacgggaggcctctttgccagagaaacacaggtgtggaaaggcaactacagcagtgtgtaaagagtggaaggacatgtgttcgtggacaaacaccaaaaacaagaagttcaaaatgaatcctttcagatcctttcctctgaatacccatatgtcaataatacactgaaaacagacatgttgtcacaaacttctgtaaggaatgacattaggtataatctttctggaggtaatttagaaatatgttttcagaactgtaaacagttcctaccatgtgccccatgacacccctaggaatcttaagaaaataaaagagatatgtgcatgtgtgtgtgtgcagtgttattttataaatgaaaaactaaaaaagagtatgtctgaaagtgggggaaaagttaaattatgataaatctatttaacaaaaaatactacatgcatttaaaaatgaatatgtttataaatgatctagggacagaagaaacaaaaccataattacatatcatttcacagtcaccaaataccagattgatgaaaaccaaaaatgtttctaaaaaacttttaataagaaactgtttatgataacatacagagtgaaaagaataagacgccaaaactgtgttatactatgattccacatagatttaaacagtctcttcctgggagtgctgttagcaagacagcagaataggtagtcccagctcccatctccccaataaaaatattgagtaatcaatgatttatggaccaaaatacctactaagacaataccaaaatccagtgaagaggttgtagtaccccaggagagcacaaagccaagaaacccacgctgaaacaggtaagaagagtgatttcatcttacccacatcaacccctccctgaagctagcatgcctcagcaccagaagagaatgccctggcccctgacatctctgatgggggaaaggaaagaggtctttgctattctggcttttcagagggctgcctgggtaatggcttaatcttggttcaattggaatactgagggaactgcaatagtgtggatacctgggcactgctaagaacaaaggaaagtggtgggtggttcgctgcagtcagcacagcttgatgcaattgggagaaaaggtggtcaacctgaagcttctactttgggagggctgaagaaaggtagagtgtgtggccctcatttcagctcttcttggccccaagggactaatttctttctcacctcactcacagcactaacagaactagcatagcttggaagcctgaaggacacttagaacagagtagagagacaggtggcttgctgtggctggcacacttagtgtacttgatttctcccttgggagggagagagagaggagcagagtatgcatccagcattctggctttttggagggctatctgagggagtggtatctgactctcctgattcagggaactgatggcatacacttggtggctgcttagaacaggggacagctgggtagcttcctgctctaaaatcagataacttgcagtgttgcagacagacatcaaagggtgcaaggattatgggctcctgaaaaaggattcagagttccctaaaatctgttgcaaagatgactggtgaggggcttctgctgtagcaagccagtctctatactggaagaggtggctgattcttcaaatgtgcagatcccaatacagctacaagagacagaacaaacaggaaaacatggttcaatggaacaaaatgaatttccagaaattgaccgtaaagaaacaaaggtataagaattacctgcataaacactgtaaagatgctcaacaagctaaaaaaagatgaataaacaaaatgagaatatcaacaaagagaaaatatttaagggaactaaatagatattttcaagctgaagaatatagtaactgaaatgaaaaattcagatgagaggctcaagagcagaaaacaaagaagaaagaatgagcaaacttgaaaacgggccatttgaaattatccactcagagaacaaagataaataagaatgaaaaagagttaagagagccttatacacatcattatgcagaccaacacattatggaaatccaagaaagagcagaaagaagaaagagggcacaaagcttatttaccgaacacttctgaaatctgaggaaggaaacagacatccagattcgagaagcctaatgacaaccaggattaatggaaataaattacactgggaccaatgaccaaattataaaaagtcaaagaaaaacagaggactttgaaagtagcaaaagaaaagtgattggtctgtgtatttctcagcataaatgatccagggccagaagtgactgtgatgatatgttcaaggtgctcaaaaaaacaaacaaacaaacaaacaaacaaaaacacttgccacacaagcatattacatccagcaaaactaccctttaaaaatgaaagatatatagaccaatggaacagaacagagccctcagaaataacaccacccatctacaactatctgatctttgacaaacctgacaagaacaagaaatggggaaaggattccctatttaacaaatggtgctgggaaaactggctagccatatgtagaaagctgaaactggatcccttccttacaccttatacaaaaattaattcaagatggattaaagacttacatgttagacctaaaaccgtaacaaccctagaagaaaacctaggcaataccattcaggacataggcacgggcaaggacttcatgtctaaaacaccaaaagcaatggcaataaaagccaaaattgacaaatgggatctaattaaactaaagagcttctgcacagcaaaagaaactaccatcagagtgaacacgcaacctacagaatgggagaaaatttttccaatctactcatctgacaaagggctaatatccagagtctacaatgaactcaaacaaatttacaagaaataaacaaacaaccccatcaaagagtgggtgaaggatatgaacagacacttctcaaaagaagacatttatgcagccaacagacacatgaaaaaatgctcatcatcactggccatcacagaaatgcaaatcaaaaccacaatgagatatcatctcacaccagttagaacggcgatcgttaaaaagtcaggaaacaacaggtgctggagaggatgtggagaaataggaacacttttacactgttggtgggactgtaaactagttcaaccattgtggaagacagtgtggtgattcctcagggatctagaactagaaataccatttgacccagccatcccattactgggtatatacccaaaggattataaatcatgctgctataaagacacatgctcacgtacgtttattgcagcactactcacaatagcaaagacttggaacgaacccaaatgtccatcagtgatagactggattaagaaaatgtggcacatatacaccatggaacactatgcagccctaaaaaaggatgagttcatgtcctttgtagggacatggatgaagctggaaaccatcattctcagcaaactatcacaaggacaaaaaaccaaacaccgcatgctctcagtcataggtgggaattgaacaatgagaacacttggacacaggaaggggaacatcacacaccggggcctgttgtggggcggggggaggggggagggatagcattaagagacatacctaatgcaaatgacgagttaatgggtgcagcacaccaacatggcacatgtatacatatataacaaacctgcacgttgtgcatatgtaccctagaacttaaagtataataatatatattatatatatattatataatatatattattatatacatattatataatatatattattatatacatattatataatatatattattatatatattatataatatatattattatatatattatataatatatattattatatatattatataatatatattatatataataatatatattattatatataatatatattataatatataatatatattctatatattatataatatataaataatataatacattatatataatatattatataatatataaataatatacattatatataatatattatattatttatatattatattatatatatacaaaagaaagaaagataatattttcttaggtaaacgaaagttgagagagttcatcactgctggacttgccttacaagaaaggctaaagggagttcaacttgaaatgaaagaatgctaaacagaaacaagaaagtataaagctcaatagcaaaagtaaacagagacaggacttggtatccgtgggagatttgttctaggacccctgatggacaccaaaatccatggatgctcaagtcacttacataacatgacacagtatttgcatatatcatatgtatatccttctgtacacgttttacatcatctctagattactcatgatacctaataaaaggcctacacatcacttcattggcatagattcaacatagtactcagcatgtagaaaattcaagttttgttttttgaaactttgtggaactttttttttctgaatatttcaatctcaggttggttgaattcaaatgcagcaatcactgatatgcagtgctgagcatatgtaggaaaaatatacaatgctttaatgttgtaatagtggtgtgtaaatgacttttaactctggtatagaaattttaaaaaaagtattaaaatactttacctataaatatacattagtgggaacagaatacaaaaggatataatttgtgacggagtaaaagtatagttttggcatatgacctgaaatcattatcagcttaaaatagatcattataactgttttatgtaagccccatggtaagcaaacaaacaaacaaacaaaaaaaaccctaaaagatacccaaaagaaaatgagaataaagaaatgttattacaaaaaaaaaaaaaaaggaatactaataagagtgaagtaaaaaagtgacaagacagaaaataaatagcaaaatagcaagagtgtttctctatcgataattactttaaatatgaatggattaaactcccaatcacagctgggagtgtggttgaatgtattgagagagagagagacagagagacagagacagacggagggagggacagatgcagagagagagagaaaaaaaaacccaagtataagctgtctacaagagactcactttagatttaaagacacacacacctgaacatgaaataatggaaaaaatattgcatgcaattggtaacaaaaagagcagaggggtagccatacttatattatacaaaataagtaaaaaactgtcaagagagaaagaatgacatataataatgagtcaattcaccacacagttgtaaccattattagtacatatgcatctatcatcaaggcacgtaaatatatagagtaaacattgacaggactgaaggtagaaattaacaatagtaggagatttccactccccactctctataatgtacagaacttctagacagaagactaataaagaaacagagaacttcaaaaatgcaatacaccaaatatcctagcaaacatatacagaacattccactcaacagcatgagaatatatattcttctcaagtgcacatggaacattctctgggatagataaaattctaagttacaaaacaaatcttaccaaatttaagaagactgaaataataccaaatatattgtccaatcacaaagaaagggaagtagaaattaaaagcagaaggaaaatggagagttcacaaatatgtggaaattaagcaacatgatcctgaacaatcaatgggtcaaaaaaaaatcaaaaaggaaattggacaataatttgagaccaacaaaaatggacaaacaatatgccaaaacttgtggaaggaaacaaaagcagtaccaataggcaagtttatggtaataaacacttaacattagaaaagaagaaagatttaaataaacaacctgtttttacaccagataaagtaatgcaaagttagcacaggaaagaaacaataaagattagagcagaaataaacgaaatagagaaatgaaaatcaaagtcagcacaggaaagacacagtaaagattagagcagaaataaatgaaatagagaaatgaaaatctaatcaaagattagagcagaaataaaagaaatagagaaatgaaaaaataaaactaaaaatttcttttcaaaagatcaacaaaattgacaatcctttagctggactaagaaaaaaacagagaacactcaaataaataaaatcagaaatgaaacaggaggtattgcaattgatgccacataaactaaaaggattctaagaaactgttatgaacaattatacaccaacaaattgggaaacctagaagaaagggataaattactagaaacctacaatctaccaagatgaattacggagaggtagaaaatctgaatggatctgtaataataaggggattgaatctgtaatgaaaaccctcccaacaaaggaaagtttaggagcagatggcttcaccagtgaattctacctaacagttaaacaactaatgccaatcattctcaaactgttccaaaaaattgaagaggagggaacacttccaaactcattttatgaggccagcatgaccctgatatcaaaaccagaaaacagtactgcaagaaaactacttgccaacatccattatgagcataaatgcaaaaactctaaacataatgctggcaaactgaattcaacagtacattaaaaggatctacaactatctgatctttgacaaacctgagaaaaacaaacaatggggaaaggattccctgtttaataaatggtgctgggaaaactggctagccatatgtagaaagctgaaactggatcccttccttacaccttatacaaaaatcaattcaagatggattaaagatttaaacgttaaacctaaaaccataaaaaccctagaagaaaacctaggcattaccattcaggacataggcgtgggcaaggacttcatgtccaaaacaccaaaagcaatggcaacaaaagacaaaattgacaaatgggatctaattaaactaaagagcttctgcacagcaaaagaaactaccatcagagtgaacaggcaacctacaacatgggagaaaatttttgcaacctactcatctgacaaagggctaatatccagaatctacaatgaactcaaacaaatttacaagaaaaaaacaaacaaccccatcaaaaagtgggcgaaggacatgaacagacacttctcaaaagaagacatttatgcagccaaaaaacacatgaagaaatgctcatcatcactggccatcagagaaatgcaaatcaaaaccactatgagatatcatctcacaccagttagaatggcaatcattaaaaagtcaggaaacaacaggtgctggagaggatgcggagaaataggaacacttttacactgttggtgggactgtaaactagttcaaccattgtggaagtcagtgtggcgattcctcagggatctagaactagaaataccatttgacccagccatcccattactgggtatatacccaaatgagtataaatcatgctgctataaagacacatgcacacgtatgtttattgcggcactattcacaatagcaaagacttggaaccaacccaaatgtccaacaatgatagactggattaagaaaatgtggcacatatacaccatggaatactatgcagccataaaaaatgatgagttcatatcctttgtagggacatggatgaaattggaaaccatcattctcagtaaactatcgcaagaacaaaaaaccaaacaccgcatattctcactcataggtgggaattgaacaatgagatcacatggacacaggaaggggaatatcacactctggggactgtggtggggtcgggggaggggggagggatagcattgggagatatacctaatgctagatgacacattattgggtgcagcgcaccagcatggcacatgtatacatatgtaactaacctgcacaatgtgcacatgtaccctaaaacttagagtataataaaaaaaaaaaaaaaaaaaaaaaaaaaaggatcatatacaatgaccaagtgagatttatccttgggatgtaaaggtggttcaacatatgaaaatcagtcaaagtgataaaacgcattaacagatcaaatgataaaaattacacaaacatctcaatgatgcaggaaagcgatgatattaatatcctttcatgatttgaaaaaccctcaaaacagatacagtttcaaatgatcttatatgtagaaaacccaaagattccccaaaaacctattagaataaataaattcagcaaagttgcaggatacaaaatcaaccatcagttccatttctatatgctaacaatgaacaatctgaaaaggaaatgaataataccatttacaacagcatcaaaaactattaaaaaatacttaagaataaacatgatcaagaaggcaaaagacatatacactgaaaactataaaacactgctgaaagaaattaaagaagacacaaataaatgaaaagacattccatcttcagggattcaggattcaaagatttaacattattaaaatgtccatactgcccacagcgacctacatattcaataaaatccctgtgaatatcccagtggaattttttacagaaaaagaaaaaaaaattccaaaatttatatgtaatcataaaagactctgaatctctgaataagccataaatcatactgaaaaagaagaacaaagctgtaggcctcacattcctgatttcaaaacatattaccaagctacaacatcaaatcaatatggttctggcataaagacagacacatgcatagaccaacagaatggaacacagagctcagacaaattcaacacatatatggggggaagctggaacccttatgtactgttgttcaggtataaaatggtacattgctttggaaaaccatatggagtttcttcaaaaaactgaaaacagaaccatatgaccccacagtcccacttctgggtatttatccacaagaaatgaaattaggatcttgaagagatatttgcaccccatgttcattgcggcattactcacaaaaggtggaaacgacctaagtgtccactgaacgatgaataaagaatatgtgctacagtaggctccccttatctatccatgtgggatgtattctaagacccccagtggacgcctgaaattttgaatagtacgagaccctatatatagatgacccttaaagagaatgggcttgaactgtacagatccactaatatgcagactgttttccatcaaatgaggactaataatatggcacttgtggggcgtgaaacccgagtatgcagaagccaacttttcttatatgtggattcaacagggctgactgcaggacttgagtatgtggggactttggtatttaaggggcgtcctggagccaatctgttgtgtgcatggagggatgacggtatactatgttttctcctatacatacatacctaacataaaatttaatttataaattagtcacagtaagagattaaccataataactaataataaaatagaacaatgataacaatatgccaccatcactgttctctggggctagtaagtaaaataagggtcacttgaacacaaacactgcgatagctggacagctgatgtcatcacagagatgtctattaagtgattaaaggatgggcatatataggatggctatgctggacaaagggatgattcacagctggtcaggatgcagcaggattgagaaagatttcattacgctactgagaacagcatgcaacttaaaacttaaaatcgtttatttctggaattctccgctgaaaattttttaacatcagcaaacaaactgcagaaagtgaaaccacagataagggagactaccgtacatacatatactggacctcatgtaattatttcatcgagttttgtggattttttatctgctttacttttaccttttgcaagtaaagaactgttcccttcagtacagcataaaaggttttccatcctcgttttcctcttggagctagaaagggggaaaaaatgtaaaattttatttgacatcagcattttagaaagagaatctaaatgatcaacatggtgacagtgtttcaatattctacctagctaccgaaagtaataacaataagaactaaaattttctgagccttatggtgtaccaggcggcattctaaaatgttttccatatacgatcttaatatttacaatgctcctaccaggttggtgctatttctctcttcttacaaaactgaaacacaaggcaataacttgctaatggtcccacaactaggaagagtagaaggctgaaaaaccaggtagcatggctgacaacagactgggtaagcacaggaagcatactggaaatacatagcaatccaagagaaagcttaaagagctcatgtaccagagcctttatagcttcttcagagactctagaaatcacgaagtagtctcagaatatgaaaggaccacttttggcatttctcccatacccccctcaaccagagtgcaagtttaaatgttattactcctattgcaacctgtgcatatctctactgaggatcttgctgtaatgtactattttcgtctaaatgtctctttcactagactatgtatgacttgacaggaggtatccttcatctttagaattcaccaaatcgagtatactgcaagacagacattaaacacaatcatacaaattatccaaaataattaattatttcagaagtccttagatttcttctgtttatatttttctggatatgaattctctactgacttgtataaactcttacaaattgttctaaagcaaaaagcaatagattagcaaaacagtttaggatttattatcttaatacaattaaaatctataactggaaaatgttattgcttgaatatcatttttctaaacatgtctgctgaaatagacagggagagccatttactcatgctcttgtatcaaacatgtggctgtctgtggtctgtctttaacctggatacctgattacattagaaagtacattattgtcaaccaaatcctttaaatctcttttgactgaatactcaagaattcttagacttggaactaggtgaatagccacttacagaacacaggcaatcctgccaacaccatgctgagatatccacctggcaagaaaggattcaaaatatccaccctgcaggtttccaagggagataataaatatcatcccttctgcctccactaggtgaggcttaaaggtatactaaaaatacatataaccaaaaaaaagcataccattatttccgttataaagcaaaaaagcaactaagataaacagataaccatacatcacatataaaataaatattcactacattgttcaatagatgtgaaattctgatactgccaacatgagcactgcgcacacagaagagaccagggctgagagggctgctgcagagcagggcctcaggtggcacagtgtgcaggaggcacctgacttgaaagcagaccagctggtttccagccccttcacaatctcacctggtctgaaaactatcctcccacccaccagcccctaacaagtcactctactgctgtacttttgcttcattttaaaatgtgggtaattcctagaactgaaggcaaagcattggctaatgctggaatggaacctggagaaaatatttttgtttttaacagaagagccataggtcctgaagtacaaaggctttccccgagccctaaaactaatttattggcatcttgcgatccctttagttcaaaaatctacacatctacgtttctactttcgcagtagatcaattaatccaagtacatgtttacaaaattttaaacagctctttctcattactacactaagcctactacaaagagattccaaagagctctccaagcgaaatgtgattttaaaagtcacccatgagtgactaatgcccactaagtcagttacttagtaactgacttacttattgtactcacttactgcagtctacttttctatttcccacagaagtataaaacttaaccttatctttggccagttacaatttagtaatctaacacatggatgaaacaacctataatcctcccaaaaagataactagggagcaattattcaacggtatttagttggtgtgctataaaagcactgctctaagtgctctgacacttattaatccatttaactcacaccgtaatgctaagagtaaggtactattgatacttccatcttacgtgagacagatgggtgcaatcaagcagaattcaggggaagaagggactactgtgcactaaagtgggctgggaaggctctctagagcaggtgcaactgctctgatttgacaaccacacatacagtgccgctgttgccactggacccttggtgaggctcttcaagcaaaacacaatgagctggatgctaatgaatgacaagcactggtcctcatcatgaggactgtagaaggagttaaagtgatttcacagcacgtgtgttttattaaacacacagaggtccgtaaagagttgtaacttcacataatgaacttgatgagaggaagagtgaaaagattactgacaggaaacctaatgcagcaactgacaggctttaactacaagggctgtggggaatcaataggctgacatcctttaatatccaggtatcttccgtgagaaagtgtttactgagtttgattaaaagacaccattttacatgtgagcccatcttttcactgcagtttttactgtgcatacttaaggtccaaagacaatcaattgctttccttcttgaaaatacaagaagcttttagggttttgattccaacaatctgcctctaaccttactttggcttttcttttttttaatgctattgaaacaggcatcattgtttttctataacatgctactgtcagtttaatgtttacttttatctttattgatcacttctttctgtacctcagattgctttttggaggccattttcaattacttcttgaagtctatcctttagaagttcctttagtgaggagggtcttttggtggccaatcttctatttttgtttgtataataaatgtccttatttcattaaaaattccaagttgataactgctttttcttatgaagacattatttcactatcttttggctaacaccattgttgcaatgttgatagtgtttagatctgtgtgcccacccaaatctcatgttcagctacaatccccagtgttggaggtgtagcctggtgggaggtgattgggtcatgtgggtggtttctcatgaatggtttagcaccatccgcttctcgtgacactgagtaagtgaatgctcgtgagatctggttgtttaaaagtgtgtagcacctcgcccagtttgcttgctccttctctggccatttgaagccctgttcccccttcactttcagctatgactgtaagtttcctgaggccttcccagaagctgaacagatgccaacatcatgcttcctgtacagcctgcagacccgtgagccaattaaacctcttttcttataaattacccagtctcaggttttctttatagcagtatgaaaatggaccaatacagaaaattggtactgtcaagtggggcattgcttataaagatacctgaaaatgtgaaagctacttttgaactggataaaaatcagaggttggaagagggtggagggctcagaataatacaggaagatgactgaaagtttggaaattcccagagactggatgaatggttatgaccaaaatgctggcagtgatatggacagcaaaggcaaggctaacaaggacacagatggaaatgaggaacttactgggaactggagtacaagtcacttttgttatgccttaccaaagaacatggcttgcactgtgcctttgccctagggatctgtgtaactttgaacttgagagtgatgatttagggtatctggcagaagaaatttctaagcaggaaaagtgctcaagatgtggtctggctgtttctaacatcctatgctcatatgtgtgagcaaagaaatgacctaaaactggaagttaaatttaaaagagaagccgagcataaatgtttgaaaaatttgcagcctggccacgtgatagaaaaaaaaaaggcctattttcagaagaggaattcaaacagactgcagaaatttgcataaattaaaaagaagccaagtgctattagccaagacaatggggacacggccttgaaggtatttcagagaccttcacagcagcccctctcgaggcctaggagggaagaatggtttcatgggccagagccagggcactgctgccctgtgaagcctcgggacactgctccttgcatcccagcttctccaggttcagccatggctcaaaggggcctgggtacagcttgggctgctgctacagagcatgttggccacaaactttagtggcttccatgtggttttaagcctgtggctacaaagaggacaagaactgaggcctgggagtctccacctagatttcacaggatatatgaaaagtctggatgtacaggcagaagcctgctgcagtggtggagccctcatggagaattccctactagggcagtgtggagggctaatgcagggttaaagccctcacacagagttccaactggggtgctacctagtggagctgtgagaaaagggccattgtcctccagacctcagaatggtagagccactgacagcttgcaccatatatgcctggaaaaaccgaaggcagtcaatgccatcccatgagcgcagctgcaggggctgaaccctgcaaagccacagagacagagctgtccaatgctgtgggagcctacccctcataccagtgtgccctggatgttagacatggagccaaataacaattttttggatctttaaaatttaatgactggccttctgggtttcagacttctatggagcctgtagccccttttttttggtccatatattccttttggaatgggaatattttcccaatccctgtatccccattgtatcttgggagtaactaacttgtttttgattttacaggttcataggtagaaggaactagctttgtctcagatgacacttcagactttggatttctgagttaatggtggaatgagttaagactttggggaacgttgggaaggcatgattgtattttgccatgtgagaaggacatgatatttgggaggggcctggggcggaatgatatggtttagatctgtgtccccacccaaatctcatgctaaattgtaattcccagtgttggaggtggggcctggtgggaggtaattggatcatgattcatcaatggtttagcactacctccttggtgctgttctcatgatagtgaatgagtgctcatgagatctggttgtttaaaagtgtggagcaccccccttctctttctcctgtggccatgtgaagtggtgctccccctttaccttccaccataattctaagtttcctgaggccttcccagacactgagcagatgccagcatcatgtttcctgtatagcctgtggatctgtgagccaattaaactactttataaattatccagtctcgggtatttcttcagatgagtgtgagaatggactactacagatttctaccctgagtctaaatgctatgtctaagcacaggtttctttaatttacacagactgctgttctttgagcttcctgtgtattattttgaaaaacctgtagacattataactttgaataatgtctctcctctatcatcttcatgattgtaacctgacactccattctaacttctcacttcattccacttgtgacttattcactctttcatattctccatctctctgtacttgtgtgctaaatgctgtgtaattttatcttcagtactggtaggccacctagatccaaaaatgtcctgaaggcttagcatccccagggttggccacctccccacatttgtactcatgctttattcctggcctaacaggatttccctttcattgttacaggcttatccattcagataaaagttatctaaaaatatttcatctatcagttttagatgttttattatgggagagtttcagaatctgtaggccatcacattgcaaaaaatagattctctattgcatttttctttccttctttttataagaagggaagaatttatgcacaaactttgttatctaggaagaattcatttggagcaggatgcaggagatattgcagagtgagaacaaggagagaaactggaacaaggggaaccagtaaggaaattattacagtaggtgagataagagaaaaaggccagaacatgaatagaggcatacgatacattaagataaaatggaaggaaagggaaaggcattaacattaactaagcacctacactgcagcactctgagtgttgggctaacgttatacctatacgttctatgtgttccaaacaatcttttcaggtaggtattattgtctctgttttatattttatgcccccattattaactatatttacaattctgaaaggtagagtatgcccccaaggaagctacccatctaaggatttcaaagctactgtacaggacaattaagtaaatattttctaaagatacattaagaaatagaaaatatccaggtgacaattctttgcagtggtcggtctgctactcctgtgaggtgggcactgaaggcaggaagagagatgatgagataagagggaaatataaccaggtactttctctaatctcactcaactataggaccttcaaaggcatccctgctcatgactacagatctcagaacagaggcacagtctctgtgcctgccccctcaggtgctcccagctccacatttctgcagaatagttatctaatattactaataattacagaagtagtaatagcacagcaaatgattgctgaacacatactgttttaggcactgttccaagatttgacctgtataaacaaaagcccgtaagtctatgagggatccacggttataacctccatctcacagatgtggaacctatgaccaccttcctctcacctcctatgaaccggcagcacttgtttctccatagcactgggcgttttcactctggtttccatacagagaaaggccagctaaactagattcgggaggcaatgtcttggataaatctgggatctaggagtgatattaaaattacttaagagctgaggctgggcacggtggctcacgcctgtaatcccagcatataacaagactccactgctacaaaaaaaaaaaacaaaacaaaaaaaaaaaggaagtcaggtgtattagtacattctcacattgctaataaagatgtacctatgactgggtaatttataaagggaagaggtttaactgactcacagttcagcatggctggggatgcctcaggaaatgtacaatcacggcagaaggggaaatgattatgtccttcttcacatagcagcagcaaggagaagtgccgagcaaaaaggggaaaagccccttataaagccatcagatctcaggagaactcactcattatcatgagaacagcatgagagtaatggcccccaacaattaaattacctcccaccaggtgggaactacaattcaggatgagatttgggtggggacacagccaaaccatatcaccaggcatgctgatgcatgcctatattcccagctacttgggaggctgaagtaggaggactgtttcagtccaggaggttgaggctgcagtgagccatgatcgtgccactggattctatcctgggtgacaaagtgagatcctgtctcaaaaaaaaaattatttaagagttgattcaggagctaccttgagctgttgggaaaagcactgttccagtcagattgaagggacatccacagtaaatggtctgtaccagtacacagtctctgagtatcagctctggcttgggggctgcttcctgaccagtatgggtgaaattaagaagtgaatgaaaccaacaagctgctgtgatcgttattctgagtcaaactcacatacacatgaagaccacatttctgcaatagaaaaattggcagttcctccaaagatgggtgatattggagccatcactgaatcttaaatattacaaaccagttattattttctctttattactaatttgaagaaacatatttggaaatataaagtacagtgaataatattttggctttagttattaccactgatttttgtaaaagtgaaatgcttaacggggaatgaaaagacagtatcacccctctttcataaagaggaagatataaaatatttctaaacaataaaatattcattaacgagtaataatggatttatgccagaaaagtttttttttaatccaccaaaaggtataagcttcatgcagaagtttatatttgcatgctatactctccaacttttcttctcaactgaactggaaatggattgtgtttaagattttactgttccaattttctatttcattcaaatggcagagcatttgttcctacatcaaaatcttgtcctgttttttgaccactcatctctctgggtgccctgatcatcttttttttccttttcctcatgtttactatcagaaagtcataatatggatagaaagtcataatatggatagaaagacatagtatgagcattgcctattgttttcatttaacatattaatctttacttcctgtctgttgtcttgaaaatattctcccattgttccatgtaaaatgacaaaaaaaccattttattcccctcagagtagagagagagaattagccatatacacattaatgagaagtaatttatttttcagggcctcaccaagagtcttggcgtgaaggccgacaatgcaaatcctgccaggccaagaaacaggtatgtggggatgaggtagttctaatgcaaaatatcttgaatttcctgaggttaacggagaaagatattcacaatataaagcaatcccaatgatggcattccaaaataaacccagcactttaatgaacttgaaaacaaagatatacttagcagaagttctgtactaatataagtgagacatcatctatactagctgtaaaaagcacaaggcatttttaagactgttctattttctcagtgatagaactaaacaacttaaagtatctttaaaacaaaatccttaaagtatgtagcctaaagcatgaagaaacaggctaccttgataagaagggagttctgaagttctaatcaatgacacagttgaagatacaactcacgcagggaggagtctgctttctgcaattgatgtgcaaagaatttaaataagttcatagatgacagactcacagatgattaagtgaagttaagggtaatcctgtatattaacctctaactttcttttacaaaatatcctcaggcatcacaagatattctattacatcttaattaatagagcagctcaggcacttttagattactgcttgaagcaatcaagtccaagctgagcaaaggaaaatttaccactgggctatgagtcacacagtattccagtattcagcaagtgacagtattaattatccctggtttatagcagcgtggtagcactaaaacagtactattactactatatattcctaatcacttatctttgaaacacttaaggcaatttacacattacaaaaaaaatcacttaatccttatagtctttctcttttataaaaggatgctttgtcaactctattttataaaggaaaaaagtagggcagccttgtaggaactgttaaagcaaactaaatatggccttaggactctatacttctttatttgagtccttgtggatgaactgcaacctaacttaataggtagacaagattgaaaacctaacttaggagtatgcacctgtaacaatacctgagtcttggccaatcccagtggttgtacttcaaccactcatacactgctgagtgttcgaactgtattcaaataaggtacgtgctgagctgtaaccaacccagttgtttctgtacctcactgctgatttctgtatgtcacttccctttgtttgtctataaatttgttctgaccacgaggcatccttggaatctctctgaatctgctgtgattctgggggctgcctgatttcagaatcattcattgctcaattaaactcctttaaatttaattgggctgaagcttttcttttaacagaacctatacctattgcttttcccagaaaattatttccttttcttatataatagcaaccaatgcatattttgatagagaataagaaatgaaaacaaagagagaattggaagaatattctattcaaagtgttccctagtggggtgctgttcattctggatgtggctctattcctataagaggtctcaagacttttaccctaaaatgttctgaaatgccagaaagtatcataaactgggagctaggcacttagattttattcacaccatgatgcccactatttctccgcttttggacaagtaatctaaacatctctggttaaaaatctatacaatgaatctactacgatgtgccataattactttataatgttgttgagttaatctgggtacataagattattaggacacataccctacccctaaataatttacatatacaggcagtaacataaacaatgaaagttaatttaacatgataaactgtataaactaaatggtagcatggcactaacctaagacaatcacagtggggattccaggaggtaaaacaaggaggaggtcattaattctgcttatgaataggatttagaggttagagaacactttaaatgagggtgtaatttaatgtaggattttggaaaaaaaaaaaaaaaaaggtttttcttttaaccttcaccttttgtacagtatgttagcaggaagacatggaatcaaaatgtggatcccaattttggaagtctcaaaacattgcaaatgatcatcatcctttagcaagacagcctaagaacaacagttaaaacacataattttttattttttaagaggacacattttagaaccagagaacctggtttgagatactggcttcacctgagtgaccttggacaagtcacttagccagtcctatgctttactttcttcctgtataaaacagtttttctgagacttagatgagttaatatatgcaatcctttggattttttttttaattaaagatactgtctgctaaagaaaatgcatcaaattttcatgctaaaacacaaagaaagactttttttctcacttctgtgaaaataagctgtgaaaataagcaatttaaatctaagttgctggaactttattagagccttaagggaatgtgattaagggacctggatggatcacattaacaggcagctgtaacctaggaagctgtaagctttgcttctctgattgtttgtctgattatagattagcctttttccttatctacactgttttgtaaaatgttgcaaatgactaaaaggcagcagggaagaccccttcttgcttaactgttgatcttcattacagattaatttccctcttacctttctcacacaaagacttgatgatgactatcacattgtctaaggtggaatgttaaatgaactcttttaaattgtgaagtaaatgataacaagctgtaaagaagaaaaacaagctgtacggaaaagaaaaataactaaattattataacccacaaagcagccttacataaaaaaaagttacaatcctactaaatttctttgtttctgcccatatataagcaagaccttaagtttttacttcagagcactggcctcatttctctggagtccatgtttcccagattcttgcttgaataaactctaaaattggattctgatgctttcagttacttcaggttgacatttcattcatgtattcggaattttttttgtaagtcaatgtttgagaacaccgctttaacgttactgatgcatttttttttttcttttgagacggagtcttgctctgttgccagactggagagcagcggcgtgatctcggctcactgcaacctccacctcctgggttcaagccattcccctgcctcagcttccccaatagctgggactacaggcgcccgccacccgcctggataatgttgttgtattttagtagagatgggtttcactatgttggccaggatggtcttgatctcctgacctcgtgatccgcctgcctcggcctcccaaagtgctgggattacaggcatgagccaccgcacacggcctactgatgcatttttaacagaaacacttagcacataccacccttaactgggaagagagctaagtgtgacacatttactccgattaatatatttattgttttcattttgtcccaagtcctgtattgacattggagatatcaaacatgaatgcaaacaataaaagtagacaatagaagagacaaaagctgttggagaactttctacccaaaagatgagccacagagtcgctcagatctaacttaaaaacaagtatctttccccacttggccaggagacggtttcactggcagccattactagacgtgcaggaagaatttacatggcttgggctgaggttggaaaacaggtcagaacacaagagcatgcatcattagctaagggttaccggaaacgtgtgtgggaagcaacaaatcccaaaatgactctcactacatcatttttttcaggaaaaatataaacaccagtgatagagacaggaggcagccaaggacccctcctgcccccaacacctgacgaaatgccgccttcaagcctaaaacagcatgagggatgaaaaaccagactgccggtccggatgaagcccacccttttccccaaatgattctttctgaataacgcccatctgcacattgggaggagggggtggggccttgggaagtttgcactgtttgcaggggggaggagcctggtctctctcgtttctgtgtggtaaggtgggatttaatccctgagatggagagcctgttagcaggactcttatctcactttgctgatgcgtatttcctttttcatttctgcctaataaattccacttgtcacccttctacgtgtctgcgagcctaatctttcctggtcgtgtgacaagaaccccgttttttttcctgcaacgctagagtcacagaattattttttgaatcttaatgaatgatacctcacattctctatggctagaatgttcctctcccagataccatgacttggccccttcacttcagttaggtctctgctcaaatgttatctgtgaaacatagaaaacggcatcactacagttcagggctctaaagcagaatccattctcagggctgcctgcaccactggcaaccttgcaaaacaacccagtaccttgccttgaatctttgaagtgcacctaaccaccacaaccatgatatcctgaaaaacagctgaatttcaccagcgctgcaactcctaaacagcaacaataaatgaactatggacttgtgctaagccggccgcctccacccatgataattccttcaaaacaacttgtgtaatcctttagtttcctttgaaaaaccctcacttggtttggaacacaatttggcttacagccaaatctgtgtctcctgaattataattcctaagggcccaataaatgtcttgtcttactgcattgcggtctggtttgtcatctcttcttagttgacatgcctcatcctggggtttcctctaatcactctctgcaacataggacgtgtatgcttccttcagtatttcctaaccttgactttacttttctttgggtcagttaacagctgtgtaacttatcacaaagtttttattaagcttctccagcattagaataaaaccttgaaggcaagtacgttggtttgttgctgcaaccacagagcagattaaccccttctcccccatcccccccccaaaaaaatcagatgtcctaaactagcatgtagatggcatcattcaacaaatattaccgggaatttttttttttttagtgcttaatcttttaggtaaaacgcaggatgcttaaagagaaaagaggaggtagaataaaactgtggtcgattattccaataagacattgaatatgggaataaggtatcagtaaacacccaggcttaaaaggaacaaataaggcttaatacattactgtgggttttcatgggttaattaaagaatgaacatttgtgacaagtgacttcaaacttctatcaaacaaatgacatttcatatacatatttttttcttttgagacagggtgattacagctcactgcagcctccaattgccaggctcaagcaatcctcccacctcagcttcctgagaagctgggactacaggtgtgcaccatcatgcctggctaattttttttttgttttgttttcatagacacggggtcttgcaatgttgccccggctggtctcgaactgctgggcttaagcgatcctcctgcctcagcctccctaagtgttgaaattacaggtgtgaaccactgcacaggcctcataattctataaagtatatctgactgaaggaatatgctggagaacttgctgtttttaataatcacttcaaaaagttaggcataacaaaaatttcctgaaattcaatgttagatatgaattctaaatttcttttcaaagaatatgtcaatatgttcaattctttgccgtctacttttaaacttaacttcctcgtaaagcaacctttttcgattacctactccaccctgactcattccaattacctactccaccctgactcattctgatcacctgctgcaccctacattccaatcacctgctccaccctaactcattccaattacccccaacctgctctgccctgactcctgccaaagcactcacccagtgactctctttaaattagtcaatcggaattagtttagcctgtgcggtctaaccctagccaataagggaatgacacagcagcaagggccacgggcatcagggataagaaccccttcccctcccttgtccaagtatgcgctcaccattgttccatctgtaagggcgcacccttctatatagaagtaacgtgtcttgctgagaattaaaaagaaaattttatatttgagtgatattttcttttgcagcactgaaactttatatataacatttgataagttcgtttatgtgaaaggtgtgaacattgatcaagaaaatcaagcatactatgatttttttcataatatctagagcagtttctagacctttttacataccttttaagagcagggtgttaaaataaatgtaaggttaaatcatcgcagtctatctgagaagggcaggtaactgctgaatcagacaagtgggcttgtcaagtgacagcaaatcaggtttcctcaacctctgaagcaccccagaagccagggaaggacagagcgaagaccctgctgtgcacgcatttctacaactagcaattcaaataagctattgtaattgtaaaacagcccaaggcccacgggcatctttaaaatgcctccgggcaaaaacagctgaaggtcaataaaaataactcaaagtggctgatgagcagcctccagacagaatctgttctccaaggaatataacagcctcacttgcttttccccaacctaggagctccaaaagtgacttcaagctttgcctactgataggtgttcctggccctcattacagggcgagggctctggcttaccactcacgcgcaggagccagaaaacggtctgctacagactgcacctgaggtgatgctgctccacgatggcctcttagcttttcccaactcagaccacgtttcttccatttatcagatgtccagtgcgttcaagtgctcttcactgaggaaaaccaaaatacccgaccctacaatacatttctttgacatatttttgagatggcctttcagaggccctgcaaacagaagtagctctgcaaagctatcttttgtgggggagatttgcatctgtggagagaatctgtattgatggtggccaggcattctccgaggccttccctcgtctggatctaggaaagattaactcagtgtctgacatctttaagggtctgaaagaaacattcaccatctattctcgctctcatcatgcctaggttttaccacctacttgtgagatttcatttacttaacaggaacacctttgctagccaggcctcatcttcctctcttttcttttctttttttttttttgagacggagtctcgctctgtcgcccaggctggagtgcagtggcgggatctcggctcactgcaagctccgcctcccgggttcacgccattctcctgcctcagcctcccaagtagctgggactacaggcgcccgccaccacgcccggctcattttttgtatttttagtagagacggggtttcaccgttttagccgggatggtctcgatctcgtgacctcgtgatccgcccgcctcggcctcccaaagtgctgggattacaggcgtgagccaccgcgcccggccatcttcctctcttttcataacctgttttgatccaagcccccattctttctgtaacttcaattataaggtaaaagtttctctactccattgagggtcgtgtaatcaatctatgattttcccctgtgtgcatgttaataaatttgtacaccttttctctcattcacctggctttggtgagttgatttttcagtgaaccttcagagggtgatggggaagtttttttcctggatgacccctacagtatagaaccttctaatcattttactatgtacacacatgcaaaacaaactgagatattatatttgttaattttaaacttttctactggccgggcatggtcgctcatacctgtaatcccaccattttgggaggctgaggtgggtgaatcacctgaggtaaggggttcgagaccaacctgaccaacatggtgaaaccccatctctactaaaaattccaaaattagctggtcgtgatggtgggtgcctataatcccagctactcgggaggctgaggaaggtgaatcgcttgaacttgggaggcgcaggtagcagtgagccgagattgcaccattgcactccagcctgggtgacaagagcgaaactccatctcaaaaacaaacaaacaaaactcttatatttatatatcatacattgtaagcccataataaaattctaagctcccaactgcctgaatgaaccctactcttggtgaaggggattccaaaggaacttgaaaaaccagtttaggacatgacagaaagggggtgttggacatgcctcattatgccctcctccctttggagtttaggcacaactgaccagcactaacactaaaatggagatcccgacactgacaaaacagactcttagtagcactaagataccaatttcaacctgactctaatatagcatcacatgatggatagcaggtcctaagggaaatcaaagtattgtaccccaaaatgcattttctttgacatattttgaaatgatctgcaaagccgtctctagtgggggaaatctgcattctatagagaatctccctcccttgctaaatcttttctggagagtctagtatcttttaaggtccagtaagagacatttgacatctattccctctgaagtctattatttagagacttcatctatataacaagaaccttggcttccaccccaccaccccctcaacttaactcaaatatttatttatgctgactataactcttcagataaagcttaagtctttcaagcaattgacaatcaggaaatctttcaatccgtctatgacctggaagcccctgcttccaggtgtcctgcccttctgggctaaatcaatcaatgcatgccttatatgtgttgatttatgtctttgcctataactttggtctcccaaaaatgtatacagacaggttataacccaaccaccttgggcacatgttctcaggtcatcctgaggctacgtcatgggccatggtcacttgtatctggctcagaataagcctcttcaaatattttacagactttggcttttttttgtcaacaatatcatttttaaaaatgatggcaaatgatgaaattctattgctgtatctatcatattttacttattaaacattttattggccattaaactgtttctaaaatgatgttattttgtaactaaaataacaactggattccttctatgtaccaggcagtgtactacacaccataacaggtattagccgtatttgattgctctcaccttaaggtttttgcattttttttttctaatgggatattcttttcttttctatttttgtaagacggagtgcagtggtgtaatcatggctcactgcagacttaacatcctgggctcaagcaatcctcccaccttagccccctgactagctgggtctaggggcgtatgctaccatgtttggctaactttttattcttttattttgtagagatggggtcttaatatgttgctcaggctgtggtggaatacgcttatccatgacctttgtgtccaaagatatcacggaacttccttttgtaattcagttctcagccgagtaacaaggcatatcctctatctctactcctcctcaccaagagtattactggcatactgcttgagctcaaagtgttttttaaaaaataaatcaatgatctatcttgcttcaaagctcaaattcttaggtctatctagtgtaaacaaataaaaaatcctaagccctccaaccaactgcatggaccccctcttgaccaaaagaaacctaaaaaactgaatgcctgccacgatgggatggaagttcagatgcacctccttatatccacttccttttcaagttcaggcccgactgaccagcattacggttaaaatgcagatcaaaagactgatcaaaacagactctgtgtggcaataagataccagattataaacaagacctaaggccactggggtatgctggctcatgcctgtaatcccagcattttgggaggccgaggcaagtgcatcatctgagataaggagtttgagaccagcctgaccaacaaggtctgacccacctctactaaaaatacaaaattagccgggtgtggtggtgcgtgcctgtaatcccagctacttgggaggctgaggcaggagaacggtttgaacccgggaggcagaggttgtagtgagctgagatcacgccactgcactccagcctgggcaacaagagtgaaacctcatctcaaaaaaaaaaaaaagacctaaggccgtgtggccatgtgaggcaaaggtgaagtcacaccctaaccataaaatttcactaaatggatttttattaacctggtataacgtggcttactccccaacctgactctggtatagcatcacatgacagcagaccctgaaagcaatcacaatattttaccccaaaataaatttctttgaactattttgaaatgaccctccaaagccgtcctttgtgggggaaattaacatctttggagaatcgccattgatgcagccaggccttccctttctaggcctttcccagatgtaggagagattagctaagagcccaacacctcaaaagtctgaaaagagacatttatagtctgtttctctgagggctgccacccatgaggctgcttctacgtgataagggccgtggctcccagagcctccttaactcaagcattcctgtctactcttcaagtcctcagacaacagcttaactctctcaaccaataactcaaccatccctaaaacccacctatgacttgtaagcccccatttcaagatgctcaccttttggggctgaaccaatggatacctttcatgtactgatttatgtctttgcctgtaactcatctccataaaatgtataaaaccaaactgtaacctgactgtctcgggactacttactgaagggttcttgggtttgtgttttttttttttttttttccccaggctgtggtcactcacattggctcagaataaacctctttaagatattttatggagtttggagggccaggcatggtggcttacacctgtaatcccagcactttgggaggccaagcctggtggatcacttgagcccagtagtttgaggccagcctgggcaacatggtgcaaccctatctctataaaaaataaaaaattagtggggtgtgacagcacattcctgtggtcccagctattcaataggctgaggtaggggggactgcttgagcctgggaggcagaggttgcagtgagcccagatcacaccactgcactatggcctgggtgagtgagcaaggacctgtctcaacaaaagaaaaaaagagaaaacattttgcagagtttgatatttccattaacattagtgataacatcttttgcatatacattcttatccccatgattaattcctttaggaaactagtacggtatttttaatttcaaattttcatcagattattaaagaatttgacacactgcattaaattaccacaacagggatggaagaattattttcttctttctcctaaatgttaattaaaccgaaatcataaacagaacgagtcagcagtgaaaatagaataacctctaaaaatcacatgcacagtgaaaactgaacattcctctttcagaaaaatacttcagagattctgaacacagattttttggtgctataagattggcagtttatattccattgttcctagtcaagagtattgcttccagccaggcacggtggctcacgcctgcaatcccagcacttcgggaggctgagaagggcagattacctgaggtcaggaatttgagaccagcctggccaacacagcaaaaccgcttctctactaaaaacacaaaaattagcccggcatggtggcacacacctgtagtccctgttactcaggaggccacagtaggagaattgcttgaaccagggagacagaggttgcagtgagctgacatcgtgccactgcactccagcctgggcaacagagtgagacaccgtctcagaaaaaagactattgctcctgatgagaatgatggcggaggacctctttcaaccgactttattgccagaaagcatggattttaaagacatgagccatcattacggaatgtaaaaacctagaacttaatcttttagtctaaattttgaattgtgaatggggtatttcctatctaaaacagccaatattccattaaaactagagagtcacgtgacaaggtgctcctgcgcgttcacatggctgccctcacagtgctgttgtttggccttgtattaacatcttaaactgctccgttacacaccctgctgccagagaacagccaagtgccaagggaagggaaaaccttagcctagttttaaaataattgcttggctttgcctgtacttaaagagtcttgctctaacaggaggacacaactgtcttttgggaaaaaaaattccacttttattatctcttaattatagtgtcgctgttcccaatgttacacgatagcaaagaattctgcctgcattaccattataaactattttcagtatggatgactcagaataaattctactttcttaaatttgacatgtgggactaaattttctaaacttttgatgacaggcaggtgtgtaaatccctctaaagtgagtgaacctctccaaccttgtcaaggtgctccacaccactccttgtatccacagtatttacaatgagattgaaaagctgaaccacacatagttctcacctccttaaaaagcgatgaatattttaatatttcaaattcagaactaatctcaggactgtacaatgactaaagaatctataaaagaatgtgattaaaatattttaaaattattaaagtgatatgtccacacaattagcctcctttgattcatttcttcccacctcctctgttcccattttacaaaaaaaccttttgaaacaaattacttctccgagtcgttaagtgacattatatccctaaacaatgtgcttctaccactgtgtcataataggctgtaaacacactctcagttttgtgctgtgctagatgagaatttaacaaacttaactatgccattccatcttcccaatatacttacatagcttttatttgtatctgtattgattacctctgtagttttatggagcataacattattattattttagtgaaaaattttttccccagctttagtaaggtgttattgaccaataaaaattgtacataagtgtacaatttgatgtttttacatatgaatggtgaaataattaccacaaggaagctaactgacatacttttcacctcacatagttgccactttcttatgtattaatttgacaaataatgactgacattatttcttctttctccagtacaggcagcatcttctgacttcctctctgtaagaggagcttaacggatctctctccctgctccctcttagttctatccagttttacctcccaccttctatcatctgtactcttacaggttcaagttgcacaatatttatattttaatgtgtaccacaattaaatctttcacatatctaaatgtgagtaaccaaaattctattactatggtaagattttaaattattaattatgctataatgatggcgatcacaaagtcattttttcttttcaattttcattcaaaaaatctttttgtagagacagctataaccatatggtccaggctggtcttgaactcctagattcaaacggtcctcctgccttggccttccaaaatgctgggattacaggcgtgagccactgtgtctggtcaccgttttctgtcgctacggatttttgtttactgagttttctaattgtaattttcctgtgcagattttaagaaaaacatccttatatgtttctaaattttccatgcaatcagatgttctattgagttttaaaaattttatttataggccaggagcagtggcttatgcctgtaatcccagcgctctgggaagccaaggcaggaggactgcttgaggccaagagttcaagaccagtctgggcaatatagtcagcccccgtctccccaaaaaaaaaaaaaaaaaaaaaagaaaaaggaaaaaaaaaaaattagctgggcatggtggtatatgcctgtagtcccagctatctgggtggctgaggtgggaagactacctgagcccagaagtctgaggctgcagtgagctacaattgcatgtaccactgtactccagcctgggttactgagcgagactccatctcagaaaaaaaaaaaaaaaattgtaaaacatataagacttcaaaaggttatcaagagtaataaagtaggtatacatgtactaccgccaaatgtaaaaaatatatattatcaatatagtgaaaccactgggtacttgtcagtgactgcctgttattctcctttccagaagtaacaaccattctatgtttaataatttcaatatatgaatgtattcttactaaaaatagtattgttttgcatgctttcaaatgttatcttacgtgcagattcttctgcaagccgctttttttcattcaacattaccactggtgagattcctccatgttgatacgtggaactctagctccttccttttcaattatatggatatacaaaatccattcaatctcttattaatggacatttaagtttttaaattttgagctattataatgttgctataaacatgacttctgtaacactaagagtttttataggtgtatacacccttatgactaattaactgagatataagaataaacatttccaactttattattgccaactgctttctgaagtacaaatgataccactaatacttttgcagggtagaagagggcccattgctccaaatccttaccaacacttggtattcttttaatttttgtcaaggtaacatgtgaaatgacatttcactatatgtttaatgaatatccttgaatatcaataaggttgaatatgtcttcatatatgtattgatcatctcagtttcattttctgagcatggcctcttcaagtttttgcccatttttctactgagttgtattttttataagtaatttaaaatttctcgggaattgaacaatgagaacacatggacacaggaaggggaacatcacactctggggactgttgtggggtggggggaggggggagggatagcattaggagatatacctaatgctaaatgacgagttaatgggtgcagcacaccagcatggcacatgtatacatatgtaactaacctgcacattgtgcacatgtaccctaaaacttaaagtattaaaaaaaaaagaataaaagaaaaaataatgaaaaaaaaaatttctttataaatattaccatggatcctaatcctttattggtaatatgctacaagtatcttaatctgtgaattatctttcatttttaagtacaattttaatataaagtctttacttttagtgtaattatacatatcaatttttttttactgtttttgtaaatatgtatgtatatacgtatgcctgtttatatgtagagatgatgtcttgctatgttgcccaggctggtcttgaattcctgggctcaagtgatcctcctgtcttggattcccaaagtattgggattacaggtgtgagccactgtacccagctgcttttataaatcttaagaattcactttctacccaaaagtcatgaagttactgtcccacatgttcttctaaaaatcttagaaccttgtttctcaaatttttatctttaatctacgtgaaactggtttttgtgttagaactgaggtggggaatacacacacacacacacacacacacacacacacttctcaacataaattacggaagaatttttgcttctaattatctgacttactttctatatcatccatcaaatttttataaacactggagactgctgcttctgggttctcttttccaacccatcatcctatctgtatgtcttattatcttggaaaatgtcaacatggccctactgtacttctcccccttaatgtatgaggaagtttggtataaggctacagggagctgtgaaaactatggtcaaccagaaaatgcctacatccaggcaattcagtgtttaaacagcactgtgttggccaagtaaaagaaatgttcaggcttcactgtccctagcttgagacctccagttatctaaatacatgctacacagtgacagactgtcccaactacacaaaaaatgcagaatttaaacatttcataagcatattttctcatcggaattgcttttaacaatatgctactattagtttggtataatcagatttttgttccaccagatacactgctattctatactacatccttggttaagatgcttaggatcagtgtcttcatgtataaaatgaggacaataataatatctgctttataggaccaagattaaatgtattaatgcatgaaatgcttaggataaagctctaatatttagcaatcatttaattatcactattgttattgtgtagatcatttatattttgggtatgttgtttccagtttctttcttgatttccacaagtatgttacatcatattgagaaaactaagagcttatactgaattttgttttttattgtatctgacaaaacccaggagatgcgttttgttttccaaatttgacttttcaaagctttcccttaatgtcagatttaataggtctttgtaaaaatacatacttctaagataggtacaacaatttgtctcctggaggcagaatttctgaactgagcataactttaaaaggcaaaaaatgaagaaaacctccaaggtttaaaaatatggatgcagtctgacaaactgaatgtttaaagttaattaaaaaaaaaagacaccaaatcttgagtgaaataaatggtccatttgagacaagtgtatcagcatttaaaacaaaataacctttccatgcagctttgattcaaattttcacttataaaacactttttgtaatatttgtcatcagagcacctggccaggtttaaatttacatacaaatgtaatataggtctacctatagtgaccatgcttaatcaaagtaagtatttagaaaataagtatctactttttgtgtccaaaaaacagcattcaggattctcagaattatttggagctcctattccaggaaagctccactgttgttttcatttttttctgtgtagtgtaaataaaaagtgatgtgttttatagcaggttgtgtaagtccttactataaaacatttctctaatttgtttatagtgaccatctctcaaaagaagaaggcaaaaacattcagaaacaattaaggcattctggtagatttccaagaaggagcagcagccaaatagttagataaacctgttcaaccagacatgattgaaaatccaacaaatgaggttggtgggggagacaggattagacgggaaggaaacgaaagcttttctacatctccaaatatataactaaactgtttgcttttacttgaatgcttagaattccttattaatttcatagttcagtaaatattaggtcttaaagcgggaagcaactggaaagacgtttcttaacaaaagggatcatgaatcagcttagttctgcttatgcccaagaaacagtaactgctatagaaactgccctactataataacttaaaaagtctatgtaagtatataaaacaaaactttttagacatttcaaaacagaaaacattggattataattctgaagagaaagaaacaaatgagttaagactggcttactgcttagagaaagagtctcggttccaacagtggaagagggtacctaaacagagcctgtgagtcatgctgagttgaggaggtaagaaaggagtttagtgatgcggagataagaaaggagtttagtgatgctgagagggctagaatttgtagagctgcgtaaaacagaggggagagttacaaaaacagatggttctgaagacctgcagaggatactctgctcttggctgtagcatcgatcttagcactagtgaaaggaaataattcaaggcatgggaaaaataaagtagtgggatggacaatttcaagggctcacacagggctaagaagaatttatgttttcatcagctagagtggatagactgtgtaatacatgccatattggaaagaggctgaagaagaacaagaatgccttattaatggaaatatttaaataagtcccagaataaagactgctctggatccaccagaacaaagggtaaaggcaagcgtctaaagaattcagttaatctgcaagttacttacccgcacaccaggagaaaatccagtgttttttttagatgaatacaactaaaagtagcacctgaaaaatggaaaattcacaatgtctggcactcaaaaattacaaggaatgcaaagaaaaaggaaaaaaaaaccaactatgactaaagccagcagaaaaaaaataatgcaacagttccagaaacgacagaaaggaaggttatcaaagagaagaaccttaaaaaagcaattataaacagaataaatatattcaaggacatgaagaaaaacatcaacctgataaggagagaaacggaagatataaaatagacccaagttgaacttcaaagataaacatgctgattatgaaatgaaaaatgaagtaaatgaagaataaaaactatcaaataaagtactgaaatgacaaagagttaaaaatattggaaagagcttcaggaaacccttgggatagcactgagtatcatatagcaaacaagtcccataacaggagtggaggctttaagaaataatggctgaaaaaaacatgaacctatgaatccaagaaccccaataaacaccaaataaggaaaacataaagaaaatcacactaaggcatcacataataaaattgatgaaaaccagagatagaaaaatcttgaaagcattcatagtagcagaaaaagccatcttgggtgcagaggaacaaagataagaatgataggagactttttttgtctgaaatcctgcagggcagggaaaaatgaaacatcatctttaagtattgaaaggaaaaacaacctgccaaaggattctatacccagtgaatatacattcctaaaattaaggtgaaaataaagatattttcacactgataaaacatgagaaaaattcctgacagcagttatgtgggggtaaaagtaaaaaaaaggtttctgcttaaagcaaaaatattaacaatgaactactttaagttttagaacatagaattaaaatataggacaacatcacaaaggctaggaagagataaggggaattaacttgctataagggtctcaaaccataaatgaagcagtacaatttgaaggtgaactgtgacaaattaaagatgtacactgtaaaccttgcagcaaacactaaaataattaaagaagtacagcaaacaggccaatagtgacaaaaaacagaaccacacacaaaaaataatcctacacaagaaaggaaaagaccagacggaataaataagaaaccaacagtaagacggcagatttaaagtcaactatactaataactactataaatgtaaatggtataggcactctaattaaaagacagatactgtgatttacaataaaaagcgagacccaccaatattccatataatagaaagcaattttaaagacacaaccataaattaacaataaaaagttagaaacaaaatttgtatagcatgcaaaaactatgaaggaaactaaagtggctgtattaatattagacaaagtagactccaaaataaggaatataaccaggggtgtcggacgtcatttcatgacaaaggggtcaaatcatcaggaagacataatatatataggtataagggatgcaaaatgatatagaaactttagaaatttcttaaaaagttaaagatatatttagcatatggtgaagcaatcttactcttttactcctaggtaacttctgaaaagaaatgaaaacatatgtacgtgcaaaaacttatatgtgaatgtccataggggctttatttataacagttcaaaactggaaacaaccagaatgctcagctggtgaatcaataaactgtgggatatccaaataatggaatacttattaagcaataagaagagagaaactattaattcacacaacacctaacaatatacatgaatctgcaaagaataacactaagtgaatgaagccaaacacaaagcagtcccatgattccatttattgcaattttagaaaaggcaaaagtatagggcccaaagacagataatcatctgtcataaccgtcataggatgggagtaatacgagaagcaattactgccaaaagtacagttaaacttttctgggtaatggaaatgttatttattttaattgtgttgatgattatataactatacatttttcaaaactcaaactatatactctaaattggtgaattttagtttttgtaaattattagaaaccatgcacattctggattgtaaggctgaattatctgctaacattaatgtgatttggaaaccttgggaaattgaaatggggatatccaggaagagcctgaggaattaaaggcagctgaaacttccacgctcctcctgatagccccatggaaaaacagaggttaaaagtcctccagtgataaagcaactgacaggaaagaagcctggagatgggcacgtcttaacccatccatatattttccctttggttctgaggcaggaacagagatagaaacaagcagaggcaggttcctttggaaagcaggacgaacttcctaacttgctacaaagacaaaagccccatgacacttaaaactgccttgaccaatcagaaattctcaagacagttaactaaggctttaaaggagatacaatggcagaaaaacttctagcctggtacaaggtgtctgtgatgtctcaactgctaagcaatcctcaggttctgtatctatattcatatgtattaggccgctgagggagaagagcttctacccggagaatcctccaatagaggaggtttcctgggccactgggtccaggaaaacagtggacaaggaaaattttatcagtagaatctgggactttggaataaactaaccaattaagtcaatccattgctaggaaatgaatcaatgaaaagatgctcacatgggttaactgtgctatatacctgtctagcaggaagtagtaaatactccgaataagtgatagctgttatacttcccctttttgacttttcttgaattgaaattattcttttttttttctctagtactttatgtgaggtatgtcagatacagtcaaccctccatatctgtgggttctgcaactgtgtattcaaccaacggtggatggaaaatattccctctaaaattctgtctgcattgaatatgtacagacttttttccttgtcattattccccaaagaatacaacataacaactatttacacagtattagatattataagtaatccagagacagtttaaagtatatgggaggatatgcatcagttatatgcagatactatgccattttatatcagggacttgagtgtccttggattttggtacctgtcagaggccctggaatcaatcccctacagatattaagggacaacggtattttcgtatttttcacttagcctatagatttcagtgccatccatacctgactgaggggaatgaacactatcaacaaatcttagccttggagacagaagctgcagttgggcaggcatgttacagagagatggtatatttgtggttgtaaaaggaaaactgcaatgtttggcaaaagtattattcaatgtatgaagaagggtgtgtctgcacactggaaagaaacaaatgggtatctattgctttgtgtgccaagaactcccattctctgagaccagtatctcattcttactgtcattgcaagcaagtgggggctgtcaatcacaatattccatcctctcagtgatacaagtcagaatcctgtcctagaacagactaaatgagaagttagggaagaagaacaatcctctttggtgtcaaaattaaacacgtgatctatagcactgctaataaccatgtataaaggacctcattccaaagaataatgctgacacaaaaaatcatgcagagatagaaatggagagtacgtcctggtgacaatccatcttcaggtgtgcccttttgctaagatggattcacttgctgtcacaactatatgagtgagttctgatacaatgttgtgggataaaattaagtagtctagtaatctagtatataaggtgcacagaagatatggtggatgcactcttaaagaacttgggaacattaagaaatttgttcagcattgctaagtccatgtcaaagccaccccactgcaatgtttctctccatgtaagctaatagaatatgctaacacattaagaaaaaggatccagctacagatagaaacagtggtactatccatctcttcaccccaaagataattctgagcaaacatgtcaccttatcttactctgttcaagtatatcaaattgctatttcactctgcaaagattattctaactatataagcatgctctattcttctcaaactccaaacaccatcattgatcaagataatcatgcctcacacttcacagaaaaatcagaagccatccaattaggctccttcaatttcccaaaactaattatactatgctctcctacatctcacctgtccaccttctcaaaggcgagtcattccacatatgtactggatatgaattccctccctccatcctttgtctctgggaccttacaccattaatttttctatgcgttgcaaattcaacctttccctcaaccaccagaaatgtaaacttcatgaagacagaaaccttgtccctcctgctcaaccctgtatttctggtggctggcacagcaggtagtcagtattatttgttgaagccatgactaaataaatgaatggatagagaatgaataaattgaaaggagttctccctttctaaagttctataattctgcttagagaagagcaggtgccacattggatttttaatttagggttagaggctttatccaatttcaagaatgtgtctatagataaacataattttttcatccttgactttcagataaattccctttaaattttgagcataaagataaaataaatgaaatagaaaatgacaacgcatgatacttactcttctttccatccatatctgcatgaattttccgagccaagaatccacttttgtacacagcagcatttggatcatgaggaatgtccaaaaatgggttagtagtacttccaatacgactgatggtctttggatgtgttccgttagctttctcctcagtactttctgagggagacttttttttctcttcatcatctctaaaagggagaaagcacaaagactgagtcaagcacctatcataatattcaaagaaaaaggtaagttattgtaaaaaactacattgtattccaatggtgtatcactttttataaccaccaccatgataatgacagacaccatttgttaaatgtattctgtgtgccaggtgttaatgatcatggcaatatcttataagactgatattaatatcctctattacagataaggaaatagactcagtgagtttaaatgtacaaggccacagatttagtgatgaacagataatgaagatatgatcataaaatccctaaagtcattggtcttttcaccgtttacaatgctttcatgtttgtcttctttcaaacaagtgggagtttattggcaggaattatgattttgacttacgtatttctacagggtctagcatagaactaggtgtacagaaaacagcaaaagtgttagagtcagtccaatggacaatagtaaacaatatcccccaaataaccaggctagtccctaatattaaaaccccaggcaaagctactatggattagaatggggatgccaggcacagtgctttggcatgtgacagctgctactttctcaaccgccataaaaatagtccccaacatctattgttcccatctttatgtccatgtgtacccaatgtttagcttccacttttaagtgaaaatgtgtagtatttggttttctgttcctgtattaattcgcttagaataatggccttcagctgcatccatgccgctgcaaaggacatgatttcaacctttttctatggttgcatagtattccacggtgtgtatgtaccatattttctctatccagttcaccattgaagggcatctaggttaattccatgattttgctactgtgaatagggctgcaataaacctatgagtgcatgtgtctttttggtggaatgatttgttttcctttaggtatataaccagtaacaggattgctgatttgaatggtagttcttttttatgtactctaacaaagtacttaaaaactgctttccacagtagctgaactaacttacattcccaccaatgatgtataagtgttcccttttctctgcagccccactggcatctgttaatttttttgcctttttaataacagccattctgactggtgtcagatggtatctcattgtggttttgatttgcatttctctgatgattagtgacgccgagtattttttcatgtttgttggccatttgtatatcttcttttgagaacagtctgctcatgtcctttgcccacttttttagtaaggttatttagttttttgcttgttgaattgtttaggttccttatagaagctggatattagccagattaacagtttgcaaataaccacaatatattttaaatatatcacaaaaccagaagtgtttgataatgacggtaatcagagaaaaacagccttttttttctcttttggtattttatcagtaattgtgagataagtgaaaacaaaactggactcttagaagaaatggatattttacttttattttgaaagaattttagatttgtgaaggacaggattcccctatgcccagcttctcctaatattaacatcttatatattaataactatcgtaaaaaatttcaaaactaaaaaattaacgtaagtttaatacaatgaattaaactcggcttcatttggatttcactagtttaccatttttttctattctaggatcctatccatgatcccacagtgcattctgttgtcatgtctctttagcgtcttccagtctgtaacagttcctcagtctctccctgtcctttatgaccttgacactttgaacagtattggtcagttatcttgtagaatatcctcagtttaggtttttctgatgttttctcatgactggatagacgttatgcattttttggggaaagattccatataggtgatgcatctttctcagtgctttaggtccaggggatacaagttttattacttgttagaattaaccatgatcacttggttaaggcagtgtcccacaggttcctctacagtaaagttactatttaactttgtaagtgtttttggggagatatcttgtaactatgcaaatattgtgattctcctttacccactaactttatcttgtaacaattattattacggtgttttaaaggttccctcatttattctacattcattaattgaaattcttctgtaagtatggacacatggatatttgttttattctttaggttataatcaaatactattgttatttaatttgttgcttaaatttttgcagctttggccattgggagttataataaggtgtgctcctatgtcctgtgaacatgcctcatcttctaaaggacttctttactttcaggtaccacagaacgccaagctcatcttaaattttccttgtcctggccctgaaatcaaccacttctccaaggagccttggttcttcttactggagaacagtatttagaaatcaaatctcggggctaggtgtgctcattgctttggggtcctcccaatagacaaagctagggagatacagttatgtatcatataacaatgtgtggtcaacgatggacagcatacaatatacaaccattgtcttgtaaaattataatgcagccaaaaaaaatcccattgtctaacacttaccatactatgcttttcagtgttagagtatcctacttctatttattaaaaaaaaagttaactgtaaaacagcctcaggcaggtctttcagtaggtgttccaaaagaaggctttgcactatttacaacaccaaagacttggaaccaacccaaatgcccaccaatgatagactggataaagaaaatgtggcacatatacactatggaatactatggagtcataaaaaagaatgaattcatgtcctttgcagggacatggatgaagctggaaaccatcattctcagcaaactaacacacgaatagaaaaccaaacaccacatgttctcactcataagtgaaagttgaacaatgagaacatttggacacaaggaggggaacatcatacactggggcctgttgggggtggggtggagggcaaggggagggaggagagcattaggaaaaacacctaatgcacgtggggcttaaaacctagataatggtttgataggtgcagcaaaccactgtggcacatgtatacctatgtaacaaacctgcaggttctgcacatgtatcccagaacttaaagtaaaataaaataaaaaaggctttgttatcataggagatgacagcttcatgcacgcccctgaagaccttccagtgggacaatacatgaggcgaaagacagtgatattgatgatcctgacccttgtgtggccctaagccagcgtgtgtatttgtgttctaattatttttattatttaaactcttaggctataaagtcccatgtgttctaatttttaacaatttttttaacaaaaaagtttttaaaagtaaaaaaggcaaaatttcaaaaataggaaaacacttataaaataaggatataatgtttttgtacagctgtataatgtgttttaagctgttattaccaaaaagttaaaaagctaaaataacgagtttatgaagtaaaaaagttacagtatgctgatgttaatttataattgaagaaaaggtttttaaaaagaaatttcctgtagcctaagtgtacagtgtttagaaagtctacagtactgtgtagtaatgtcgtaggctttcaaatccattcaacactcactcagtcactgacccacccagagcaacttccagttctgcaaactccattcatggtaaagtgccctaaacaggaataccatttacaaaaaatctttaatgccatatttgttgctgttcattttttgattactgtttgttttctgtttagatatacaaataccattgtgttactactgcctatagtatttggcacagtaacgagctatacaggattatagcctaggagcaataggctataccatatagtacacatgatgttcacacagtgatgaattcgcctgatgacacagttctcagaacatattacagttatgaagtgatgtatgactgtatatataagtacactcacgtgtatacacacatctatatttgtgtatccatccaaccatcccaattaatttatattaacaccaccaaacctaagccagcacattccagccttctcccacttgcttatctgtacatcttcaatagtgagaaaactggctttcacgatctgcaatatattgatttgttcaatctcagtaaacatataaaagagttccaaaattgctagcctacacccatgtgaggaacaaatttatgtactagagtacagtgtttgtgtacatttcttttgtcttacactgttttccaaagttatgggtgagctctttttttctcactctcatcacaatggttaggtgaaaaacacattccttcgttatagtctgaattctactttgtgtttatcatatcctgactgattttcttaaaaaataagcatttttgaaaatgcatttcttgtgatgttcagatttaaggatttagataatgtatagagtcatgtacccactacaatgccaaatggaacagtcttatcaccccccaaattccctcacactgttatttggccaactcctctctcccatcgattcctggcaactgacttccatccctatagttctgccttttccagaatggcatataaaatggtttcttgcatttggcaaaatgcatttaagattcatccatattgtaatgtgaatcgatagtttgttccctaccattgtaaagtaccatttcattttatggtcgtgccagtttgtttatctattcatctaccgaaagatactgagttgtttctagtttctatattttatttttacaatgaaaaactatttgtatctacaaccaataccataataaaaatataaaaatacagtactgccagtctctcatagatcagaatcaatctggaagaaagatttctgtccttcaaattgattattctattatcatcattaagattcagtactgggcccagcatggtggctcatgcctgtaatcccagcacattgggaggccgaggcaggtagatcacaaggtcaggagttcaagaccagtctggccaaaatggtaaaaccccatctctactaaaaatacaaatattagcccactgcagtggcaggtgcctgtaatcccagctacttgggaggctgaagcagagaactgcttgaacctggcaagtggaggttgcagtgagctaagatcacgccactgcactccagcctgggcgacagagcgagattccatctcaaaaaaaaaaaaaaaaaaaagattcagtactgttacagcccacagctaacatcatactcaacagtcaaaggtggaatgtttttcctctaagaccatgaacaagacaagaatgcccactctcaccacttttgttcaacacagttttgggagttttaggctgagcaattaggcaagaaaaaaaaaaaaggaagtgactgtctctgatgctgacataatcttatatatagaaaaaccgtaaaaactacccctccctgacaactgttagaactgctaaagtcagtaaagttttagattaaaaaaccaacacacaaaaaatgagtagcatttttgtacactaactactcaaagaattaagaaaacaatcccacttccaaaagcattaaaaacaaacaaacaaaaaaaaacaagtaggaataaatttaagcaaggaggtgaagatctgtgtactgaaaaccgtaaaacattgaaaaattcacaaatcaatggagaaaaaaatcccatgttaatgaactggaagaattaatattgttaaaatatacctagtaaccaaattccaatgtcattttttatagggatagaaaaaatactaaaatttgtaggaaactagaaactactccaaacagccaaagcaatcttcagcaaaaaatcaaagctggaggcatagttttttgactgtaaaatataaagttactgtaatcaaaacagcatgatactggtataaaaacagaaagcccagaaaaaaatcccaagtagctaaggtcaactggatttctggaaaaggtttcaagaatatataatgggggaaactacagaatcaggtgccatggcattgaccactgcccttccgtggcttgtgccagtctgaaatccaaactatgacaccatcccctcttcgatccctactttaggcaaaatagaaaccagtcacatgggcagcctacagacaggccagaatattgttatcaagtcccactctcttccttgcatcccaagagagggagtaagtaattgggctgcttcctaaggactatgctataccatgctgtggagggagtcgggtaagggcaaataacattgctttgaagttttctactgttttaaatgtggcttttttttttaattgagagtttgcctggttgctgtacatctttggttttcagagcacatgtgaagttctttcagatggtcttacttgcttatggaatgtttccctaagaaaacaagggcctggagcttcctagtccaccattgtgccccatttcccttttattgctctagtcttagtgttatgggtttaattcagtccccacaagagaaattaaagtactaacttccagcatttaggaatatgaccttgtttggaaataagatgattaaagagtgggccctaatctaacaatattgatgtccttattaaagaaagaaatctggacacagacacacacatacagaaggaagaccctgaagctaccacaggctaggagagaggcatggaggagactcccggtcatggccttcaggaggaaacaaccctattttcaccttgatctcagtgatcaagaaccatgagacaataaatctgggtttttaaagcccatttgtggcattttgttatggcagccaaaggaaatggatatacttagatgctacctcaccacagcttcagattaattttatcacttttgcagatgggagtgtgccctagagaagaaaaactgggacaactgtgtctcagtacttgctcttccataaacttcactgtgatcctgaataagctgcagcatctctctagatctcagcctcctcatatgtaaaatttgaagcttgctctaagtcagtaaatacaagccatgcaaagcctgtccagggagtgggagcccaggatgagtagaaaggtctctggaatccccattcactttcaaaaaacagctcttggaagcagactgtggtcgtgaatccattctagttctagtatttcatgattgtagaactccgttgatatagaccaatacaaaaccacaacaaaagatcaggatattccatgtgtctccacagcattgaccctaaatggaaacctatgctgctaagtgtaggctaaatactgcaaaaagcctctcccctaagatatggagcaggtaccccaagttttaccatgcaaaccctccacaacaacaaaactgcatacattgttaagtgatacggtttggctgtgtccccacccaaatttcatcttgaattgtagttcctgtaatccccatgtgtcatgggagggaccagtgggaggtaactgaatcatgggagcagtttcccccaggctactcgtgtgatattaagttctcgtgagatctgatggttttataaggcccttcaccttcacttggctctcattcttctccttcctgccaccatgtgaagaaggacgtgtttccttccccttctgccataactgtaagtttcctgaggccttcccacctctgcggaactgtgagtcaattaaacctctttcctttataaattacccagtcttgggcagttctttatagcagcatgagaatggactaatacatcagtaagactggagggaagatggcagaagaaagccctgttctttcctctctatttaggaagcagaactaattagccccactgacctacctttgagtgtctcaaaagagaaactcgacacttgcccccactacttctttggcatcaggtaaaccgctctatcccttttgccttactatgtggcaaacccagtggggcagagctcacctctgctcctttagttctgatttcacagcctgtaatatggttaggctggggagctcagcaggcttggtggccactcaggtcccagtcacattctccagtataactttctgcaggtgccttgcactctgcattacacagcagaggcttgacttcatttcactcagctctctgctctgtgtatacactcctctagccagaacattacagaagggtaggggttataaatcaggtcccaaagtccaccttgtactggcaatcattaccatgatccctgtaatttaatttcctcaccttacaaccagcctagaagctagatgttaccaagtccctgctctcctccaggaagcaatgcttgggaactggtatccctgggcatcagggccagctgagtagtgatgggaaggagctctaagttgccaggcagtgtgtgctaggcagtcctgatatcatgatgattaagacccctcgaggggttcatcatccagtaggggaaacagatacacaaaatattggctaaaacattttttataaaatactatatgtctccacagagctgtgtacaaagcagtacaggatcagagaggagggaagagtctgtatcaaacatgctaaattataatgcaagaaatccttgttgggtgatggaaatggggtgataaactacggtggttgttacacaagtgtgcaaagttacaaacattggtgtagcataaaattggtacacttaagtgggtgaattttatggcataaaaattacacctcaataaagcagtttaaaaaataaaggtggtggttgaatgcaggggcagaacactaaggtggctcacatctcaatactgtgatcagatgattgcaggaaaataaagcgaagaatgaacttataaaaaatgtgctgagttatcatggggtttctattataccacatcacattataccacgaggcaggatgagtctaaaatggatctttgtcacttaccaaaaataaaaaagaaagcatgtagttaaattttaaaattctgctgaaaatatgaattgcattctattctctaaaaataccttattttgacacaggaatcctaaaagtaaaaaagagactatgctttattaaaaatgttaggcttcatcactagccttttaataccaagaaaaatgctgccagatatgagaaagatgtaggctagtaacttggctttctaaataaaggatctgaccatatgtacaatgactgtagtatgctttccaaaccaagacaaacttaaccaatggttaaaaaagtttctgaaaatacactggggtcaagccacatgttaggtattcccaaaagatctattggaaaatttttaaggggcaactaaaaataacttccttgagtattcttgatctggctaaattttctcacctttaaaaaatatacatatatgtataaattataatgtacgagtacataaatgctcaatgaaacaactactgtctaaaatgctcctcatatacacattaaaaatcattcagaaactatatttattatatatcatcttgtatcattcctcatcaaacatcaagcacttagcaattgatatagaggatataagattctctatccttagcatactaagaaaaatgctttctttacatcccagcctccataattctttgctcctcagtgattctaaaaatgctttaggacaagtaggctactaacataatcacattccatctgctcaccaacctgtctgctctgaatattctgaagataatgtgaaatgaagataacaatatttgtaaagtacataactttcatcatatttagaaatatttaagcttttcacaataaaacccttaaaatttctaagtatccatctcaatctcattatcaagagaaatgccacttagacatgaagcaaacaatgtattgtcattttttaaaaaaatttggccttttaaagctaagaactgggtggcaaatctttccagtttcctatacacctgagttcagctgagaaaacaagtacttaaatcttaagtgtgagctcagattaagtatgagatatgctttaggttcttgataaaattacatttcacagagccatatgagagagctgtcctagtccattttgtgttgctaaaacagaattccactggctgaggagtttatcacgaatggtgacttatttcttacagttctggagactgggaagtccaaagtcaagggtcctgaatctgatgagggactcccttgctacatcatcccattgtggaaggtgcaagggcaagaaagtgtgagagaggaagagggctgtgaacttggttttataagaaacccactcctgcagtaacaaccttaatccactcatagccctcatgacctaagcacctcttatgaagccttgcctaatggttgggggacatattcaaaccatagtattctgtctgtggcctctgaaatacattcatttcatcacagtgaccccagttttaactctttctagcaccaactcagaagtccgaagtccaaactctgacctaaatcagatacaggtcaatttgaggcatgattcatccttaggcaaatttcccaccagctgtgggcctgtgaaatcaaacaagttatctacttcaaatactatggtgagacagacatagatgctcccattccaaaagggagaaataggcaagaaaaaagaatgaacaaaacccaactccaaaaccaaatagggaaaacaacattaagacttaaagctggagaatagtttcctttgatgtcccaaatcctgaaaacactggaattggggttgggcccccaaggcctcaggcagccccaatcctatgacttcactgggcttagacgacccagcagctgtcatggaatatcccacatcttttgaaatctaggtaaagaaagccatgcctctacagctcttacattctgtgtgcctgcagaattagcaccacatggatgctgctaaggtttatggcttgtatttcctagaacagtgggctaagctgtagctaggccggcttacaccacggctggggtagccaaggaatgctgtgccagaatgtggggagcagagaactgagggggctctggtggagagcaccctgggcccatcccttgaaaccattctgccctcctacacctctgggactgtgatggaatgggcagcctcaaagatctctgaaatgttttcaggggtcattctcccattgtcttgatctcttgtatccataacaatatctttgcaaatggttgcttggccacaactgtggtttgctttcccaagcatgctttatcattctttgtaaggccaggctgaacattttcaaaatctttcttctgcttctcctttaattatcgttctatctttaagtcattcctctcatatcttactgtatgtggttaaaagtagctacttagctccatcaacattttgctttgaaatttattgcaccagatatcttagctccttgctcataaattctgccttccctaaagcccttggacaagaatacaattcagccaagttctctgtgactttattacaaggacagtctttactccagtttcaaataccttgttcttcatttctacctgagacctcatcaaaatggactttactatgcatgtttctactaacattctaattatgatcacttaagtaatgtctaagaagtcccagatggtccttaaatttcttgtcttctcctgagccctcacccaactgcccacaatgctccgtttgcagcagtctaggctttttctagcattcacttcataactgtcccagcttctgtggattacccaattccaaggccccttccacattttcagcttattgttatagcaacagccctaattctcggtaccaatcttctgtcgtagtctgttttgggttgctgtgaaagaattccacaaactgcataatttaaaatgaacagagatttatttcttacagtattggaggctggaagttcaaagtcaagtaaggggcctgcatctgatgagggcctccttgctggggtcttctctaacccccacctgctctcttgtgctttgctgcccttctcctagtaaggcagaaggtcaagaaagcgcaagagagcgagttggggatcacagttgcttttaaaacaaaactactctcacgataactaacccactcccttgataacattaatccattaattagggcagagcccttttcccttatgacctaacagtctctaattaggtgttacctcctaacactgcattggggattaagtttctagcacatgaactctggggacatgctgacaccatagcaagagtcttccttaattctaaccactgaaaatctttttcctttaaataccaaaatccagaagattaattcatgttcaatatcatttttagctaacaattttttaatttaaaaatactttactgtagaaaactctaataatcaatagctaacaaaattaagtggtctcaactctttagttcaatatttccttcaagttaatggtcaatttttcataactatggcatttctgtttcttttcttacagtcagggtgtctttgctgaatataaatagaacaatcaaaccaataatatcctttacataaccactatacatatatagatttaaccttagttattcttcgtatagattgtcttgtaagtttgttatgctagtactaacattagcattattattttaccaagagtccagcgtgacacagtatctgccatgttaggaatttgagtacagtgaaacagagagcaatgacaatgagaacactaaatctcattctagaatttcaatgaggtgtaatgagtatctagaaaagtcatttaattgtatgagcacctcaagtggagaactgagttttattccttctgtttctcccaacaataaatgaatgcattattccttctttgtagtcaaatatctcgtgcaaataattttatcagtttttccatggtgagttgtctctacctatgaccctaaatgccaagctccctacctctctctgcacacactcaaattaaatttttggttatatatttaaaatatatgttttatctataccattgtccagcttaatattttaccaagagtccagtatgatgtagtttctgctggttaggaatgtgagtatagtcccatagacagcaatgacactgagaatgttattctagtatttcaagaggcacaatagcaacttcttcttgccttagttttcttgttagtaatgattgccaacctacagatggctacattgaagtttaaaatgaaaattactttcattttaaagttccctcataaatgtcttcatcccaaataactttttcgagcaagaaagttttccttcattaatctacatctactattaagaaacactactctgattaacaattttatatatctatattcactagggattaaggatatacagttatttaatgtagtaagtcattgcaaaaaaaggaaattaccatgagttgcctttttgaaagaaaaccaaataattttatgtcaaggtaaaaaatattttaactaaaattaggaagaactcttttcattaggatgtaagttcaattctaaaaagtacacacaagggattccaacttttcttcatggctgattctaatgttggcaaataaacaaaatgaagcactacaacaaaaaaaatgaaaaacttaaatgaaaggcgacaaattatattaaaaagtgtaaggtggtacaactaaatcagtctaaactaatagaaaaactcttgggtgaaaagaaaactattcgtccttatgagattaccaactctcacagagaaacaactgagattacattttaattaatatgtattaatacctaaaatgaaatgagaatcaatgctgagttaagtaaaatatgataagggaaccaaataatgaaagtaaaagagccctagaaggcttctttactcggaaaaagagttttcttaagagttcacaaaacaaagagactttggaactagttaccaatttcatatttaggccattgggttgaatgaacaatcaaggtacccacataaaaaacaggtaatagtaatcccattgcctctatcatcccccaagaatacacacagagatgtacatgcacacactcacaccttcatgggcagtgttaaacataatggcaaagaagtgggaggaaatctttgcaaaattttctctacttcctaatttcagcaaatcagccaacaaagaggcagcactgatttcctgaaaagaccagtcatgacttaaatttgcaacaaggaaatgaaaagccaaactacaaactgttggtatttaaaaccacactttctaaagctcagggctatcataacacatgactggaaggacagaaagatatcaatgtgctaccacctcacctaattagccagaacaatttaatatgtgagggcagatgggaaatagtttaacttattagcaaatacagcaaatgttttaaactgttattgttataaaatgagttgtagggcaatatgaaattgcaggaaagattattccacgatgcaaagttgtaaaatgcttatccagagttaaaaagaacaaatgtgctaaatgacaaagcaaggccaatgctgctgtaactaaaacatggagggtgcacaagtgcagagggaatccagaagttcattatttaaaactgttttttttttttttttggctgactttattaaaatgagccaatacatgatttttttttttttttaaactaggataagggagtgatttggtttggatctgtgtccccgctcaaatttcatgctggattgtaatcccaaatgttgaatgtggggcctggtgagaggtgactcgatcataatggcattaccccctttagtactgttctcatgatagtgagtgagtgagttaagtcatcatgagatctggttgtttaaaggtgtggggcacctgccccctctctctcttcctcttgctccggccatgtgaagtgccagctcccccttcactttctgctgtgatttaaagtttcccgaggcctccccagaagctgagcagatgccagcaccacgcttcctgtgtagcctgcagaaccatcagccaattaaacttctttttatataaattacccagtctcaggtatcctttatggcagtgccagaataaacgaattcagaaaaatgggtcccaagaagtggggaattgctataaaaaatacctgaaaatgtagcagcaactttgggaactgggtaatgggcagaggttggaagagtgtggatggctcagaagatgacaggaagatgagggaaagtttgagacttcctagaggcttcttaaattgttgtgaccaaaatgctgatagtgatacggacaataaagtccaggctgtggaggtatcagatggcaatgaggaacttattgggaactaaagcaaaggttatgtttgttatgcggaagcaaagaacttggaggcactgtgcccctgccctagggatctgtggaattttgaacttgagagtgatgatttagggtatctggcagaagaaatttctaagcagcaaagcattaaagaagtaacctggctgcttctaacaacctatgcttatatgtgcgagcaaataaatgacataaaactggaacttatatctaaaagtttggaaaatttgcagcctggccatgtgaaaatttgcagcaggctgaagaaatttgctttactaaaaggcaggcaagtgctgatagcaagaaaatggggaaaatgcctcaaaggcatttcagagacctttgcagcagcccctcctatcacaggcctggaggcttaggagagaagaatggtttcataggccagtccccgggaagtttcactgccctatactgctccctgcatcccagccactctagctacagctgtggctaaaagggccaaggtacagctcaagctgtcactccagagagtgtaagccataagccttggtggcttccacatggcgttaagcctatgggtatgcagaatgcaagagttaaggcttcggagcctttgcctagatgtcagagaatgtatggaaaagcctggatatccaggcagacatctgcggcaggggtggaaccctcttggagaacctttactaggggagtgcagaagagaaatgtggggttggtgccccaacaaagagtccccaatgggtcactgcttagtggagctgtgagaagagggctaccatcctccaaaccccagaatggtagagcccccagcagtttgcaccctgcacctggaaaagccataggcactcaacgccagcccatgagagcaaccgcagggactgaactctggaaaagccacaggggcagagctgcccaaggccttgggagcccactcctcacaccagtgtgccctgaatataagaaatggagtcaaagcaggttattattggagctttaagatttaatgactgtcctgccggggtttcggacttgcacagtgcctgtagcccctttcttttggctgctttcttccttttggaataggagtatttagccaatgcctgtacccccattgtatcttgggagcaactaatttgtttttaattttacaggctcataggcacaagggactaggcttgtctcagataagagtgagttaaggctgaaatgagttaagactttgagggactgttgggaaggcatgactgtattttgcaatgtgagaaggacatgagattttagaggcgccagggatggaatgatatggtttggatctgtgctcccacacaaatctaatgttgaattgtaatccccactgttggaggtgggatctggcggtaagtgattggatcatgggggaagatttccccctttggtgctgttctcatggtagtgagtaagttattgtgagatctggttgtttaaaagtgtggcacttccaccccaccctgctctggccatgtgaagtgctgactccctctttgcctcctgtcatgactgaaagtttcctgaggcttccccagaagctgagcagatgctagcatcatacttcctgtacggcctgaagactgtgagccaattaaacctcttttgtttacaaattacccagtcttaagtattgctttgtagcagtgcaagaacagactaaaacagggagatttcttacaatttgtaaacactgttgtagaaagcagcaataaacatgaaagtcaaaggatgaaagagaggaacattaattttcctaatagacaatactgaacttattttattttcctatttgtgttaatcgttgtattttctgaagatcctcatgcagatacattttaaacaattccaacataagatataaactcccatatccacctcaactcacctcatcctacgccatcccaatcacaaagagtaattactcactttgtttatcacttagactggaaattttttaaagccaagaaaaatgcctcaatgccttatatagttttgttctccccaaattatcagcaggctgcatgatgcaagtaggtcaacaaatagatgcttcactaataatgaacaattgagcaaaggaacttggaaaggcaaatggtcatggtcctatatgacgtagcagagaccttccacaagtcaatttgactcactgcactcttcattacagtttttgtatttttatctttgtacagtcctccctctcccctaaatctcatgttgtgttctcattaggcaaggatctgtgtcttattcatatttgtatctagggcacagcactgggccaggcacaggagaagctggatagagattgcagaatagatgaataaataaatgatccttgctactaacttaaggaaaaactctagtaattctatgagcatttaatgagactagcaaattaatacaacattctcttaatgtgcactgtatcaaaggctagcacagaaacattcagactcactctctgctcttcaaagactttataagacggggtggctacagagatgccaggcagcatggtggtgccataggaggccataacagctggggaaaatcctggccttcccaccatactggacttggacctattgatgaacacttcttgacttaattttcctcatatataaagtaacaacaatggactacgtaagtacctttcaaaaaatttttcaagaacatataccttaaaaatatgaaatagaaccctatacatatattcaaaagagataaaagtggagctgttttgatcagctgaactaggcataatacttaaggaagcagaactgggtccccaacaattttcagtcacactcccaggtaaggccccaaggcatctccctgtaacccaaggttacactgaacccagtcagaaaaccaatgatataaaaacctataaggtttataacagttataacattctccggttctaacactcaataattctatcgtgatttcctctaaggttctaacatccacatcaagatgcctcctgcgcaagtcttccatgcattatcctacaaactttgtagcatcaccacctttcctgtaactattttctaaactacacattgtaggcttatcttttaagaaatgtggttccttcattaccattaacatcctttctatagccttttatggagccttcattacatataaacactatgatcagcaacagaggagataaagggacaaatccagacatgtatcatttccttaaagagcttacaatctaatggcacattactacaaataaccataatggggtgtagaaactgctggtgtcatcagataaagtaaaatggaagcttaaggctgagatcatacttctggttagcaagatcagaaaaaacttcaagaaaacagatggaataggagctggactgtgaaggatgataggctttgaacataaaatgattatgggatacaggttcctagcagaggtgacttcacgaacactgaatggagaacaaaatcaattattggcagaacgtgaagggcctaattaaagttttacagcacataggaacttcacagaggttaaagtacagggaagattggagacagaaggccttgttgaggaggcaaacactataaatgcctgaaaaacaaaagaatggcaggagtgaagaggaaagatgctgtttggagccatttctgcaggggttcgaagtggtggtgtgggagggtgtcaaagatgatgtaaaggctaaaatccaggtaagccggaaacgctggtgtcattaatagaaatggagcacacacgacaagtttggagacagacgatgagcgctaagtgccagcagaaacatcctgcaggaaaatgcaaacactgaattgaaacttgggaaagaggtcagagctgtatatatatataggaagaatttttacagaaatggcagaagaagttttaagagtgaattgcaattgctgaggaggagactacattggaagaagacaattcaaagtgtccatctaacgctaagggataatatgaggaaaatgggtcagagaaagtctagttagagaggtatgggagaaacgggagagcacagtgttataaataattatatccatgtacatacacttttatcaaggaaaaagcttagttttttttttttttttttttttgagaccaagtctcactctgtcacccaggctggggtatagtggcacaatctcagctcactgcaacctctgtttcttgggttcaagcaattctcccgcctcagcctcctgagtagctgggattacaagtgcacgccaccacgcccagctaatttttgtatttttagtagagatgaggtttcaccatgttggccaggctggtctcgaactcctgacctcaagtgatccaggctcctcagcctcccaaagtgttgggattacaggtgtcagcgaccgtgcccagctgcttagctcctttgctaaaggatcacatacactgatagatgtcagtgttctcagaagtgtgttctaaataaaaagcaccagttttagtagatgttaaaaggtgctttaagacaaaaataagattcagtgatttaataaattggggtattggccatttatttcctacagaaattcaagatgtacatcaggtttttaaattcaaatttctcctgcagaaattcaagatgtacgttgattgaacaggatgataacagagagatctgtttaattttgtttgagctagcattcattccaagacttagttgacccataatccctttgttttatatctgcttgatagagcagtacttcttccacaggaggaaacactgaaatatggcaaaactcagaaatttacagaatattagaactagaaaaaatacttgtgatcatttcatccaattccttcattttataggtgaagatagaaattatacgataaccactatagtgtcttcttctaattcttgacaatgtataaaaatgtagtctatgtatatgcatatgaacaagagagaaaaagaaaaaaagacaaaaaaaaaaagaaattggagctttgaaagctacagcatcaggcatcaattgaagagcaacttgctttatgttcagtgttttcaaacatttcagtgtcatcctgaaggttacatgagactcaatatttgctcagtcttgcaaaagaggaaactgaggactacaggttaacttggtcagtgaaccagctactacatgaaaaagctgtaattcacaccaaaatttatctgactctgaaatccaggcttctgaacaagatgctctgctaacttcacaagaagaaaccagttactgggtaaactcccgcccctccacccttgggtaacacgcaagatatagctttcttgcatcaaactccgactacctataaatgaataaataaaatctgctgtaacaaattaaaaaaaaaaacctagatttacaaaacaggtcctcaagagtatatgtatttgttttttaaaataacttcataaaagaatcttcaatgtattctcttgcccagagtgaatatgatgatgccatttttatttattttctctagactacatattctgcatatgtcaggatgtcctttttgcatttcagcaagattctgactatatccttcacaaaattttcctatgaaacccacttttgttcatgagaaataagcctaaagaagaatgatcacctttgatagcagaccatgaattcttaatgatcagttttccttgaaatggcacgctgcctttaaatgagtctcatcatgaatatacatacagacacataagccatatatatatatatgcaaatattaaagtcttaacttttgactccctaacttgcaataggaccatgactctacagtgagtagacgcaattcaagtggtgctgatacttcaaaaataaattcctgcacattatatgtaatacacagtcaactattaacccatgttcctccaacgtgcagataacataacaagttttatctcccaagttatgattctgtaaacccgagttcattgtagaatgctctgttaggtcacgtggtaaaacaatacttatgaatacttagtaaaaataaaaaataaaatccacgaagttctaattacaaagaacacattttgacctaatttcctggtaatgtgattaaaaatttcatattcttccataataattttataaaaattaaaattttgaactgctatattgattagggaaattttaacaacagtggtattgttctacgtagacctaggtgtagctcatctttaatagtatttctcaaagtatgtaccctgaaacactatatgtcactgtcaaagagagtcaggaaacattacacattctattcctctcttggggactgataacacacattggcattggataagctcctagaagttctgaagtttaaataaaatagctttattcaatccatcatctcccaagcttattccattcagagaacctttttttggttgctgttgttgttttgtgcttagtatctatcagtgtcctagtatgattagtatcataggaaataaacctggaaagccatgatctatgatgataggaaggagataattaaaataagtggatgataccaaaaccatttgtattacattttgcaatacacactattcatcagcagatttttcttttagaatgttactttttaaaagataaatttaaggccgggcgtggtcgctcactcctgtaatcccagaactttgggaggccgaggcaggtggatcacgaggtcaggagatcgagaccatcctggctaacactgtgaaaccccgtctctactaaaaatgcaaaaaaaaaaaattagctgggagtggtggtgggcgcctgtagtcccagctactcgggaggctgaggcaggagaatggcgtgaacccgggaggcggagcttgcagtgagccgagattgcgccactgcactccagcctgggcgacaaagccagactccacctcaaaaaaaaaaaaaaaaaaattaaaagacaattaattacctacaggtacagcaaccattttaaaagcagaataggaacacactgagtaccaaaaaaccacaggatactctgggtttacttgtataaaaccgaaataggttttacttgtatctgggtttacttgtataaagccacaaagtaggtaagacacttggtgtaaaatgagaattggcaatgcatatttaatccttctctaagatcacttccaaggcataaagacagtaggaaaaaagtgagtagttcattattaaaaggctgacgtccagcacacttacactgcccattcaagcttctcattcttgattgagttgtacagagcctgtaaagagagaaaatgagatcacattattctttccattctgttccacattttgaattcagcaaatgaccaagtaattccttcataaaaggataggcacgaagccccccttgtcagtcaccttgcttttagaaaggtgaagaatacatggggaggcaaatgagcattgggtgaacaacgaacgtttcatgaaacaaagaaactttcacaaagttataactgtcttttatcaataaggcacagtactgtactacatttcattatagtaaaatattaggatgtgattaaaattacactgtgcatgctatttctcatattgaaaatatggtcttgtagtttcactcagttggacagtggagtactcatacttttttcttttcttctttttttcagacggagtctcactccattgcccaggctggagtgcaacggcacaatcttggctcactgcaacctctgcctcctgggttcaagtgattctcttgcttcagcctcccgagtagctgggattacaggcgtgtgccaccacacctggctaatttttgtatttttagtagagacggggtttcaccatgttggccagactggtcttgaactcctgatctcaggtgatccacctgcctcagcctcccaaagtgctgggattagaggcatgagccactgtgtctggctgctttttttttttcgttaatgaaagaaatagaattgttttcatggcaaattaaagagtaagatacttggtagggggactgaagccagacatggaaaagcatcttaggatagttttagagtttcgataccactgacttaatccagtttttattataaatgtaacatcccaattctgccttacagttaagtattacattttgggtgtgtgtggttgtggcagattggataaaaaacttctttagacccttggtaacaataatggtaaagtcagcacaagactgctaccctgattctcccagctctagcattacaaaggtccttgtagtcagcttgttccactataccaactaccgagaaacatttttttaagacacagggtcttgctgtgtttcccaggctgcagtgcagcgactattcatgaccatgataatagtgcacaacagcctcaaactccagggctcaagtgattctcctgcctcagcttcctgaacagctgggactacaggcatatgccacagtgtctggctttacctttgaattttaagtaagatgttataaggaacacacaaatgcatttctaaggtacaaaaccacaagagcaaattatatttaacaaaagaacggtatgcataacaatattatgatgatgttggaacatttttcctcaaagaatgacttggatcaattagaacttgaaggcttagccaagacttcatttactctgagatagaaaaaagggggatcacatgtcatctaacctcttgtctttcaaacaagaaaaggcaggttcagaaagttgtccaagcagcacagcagagcagaactgccttgtatttctatcctttcgcccttaacattgtctcattcaagtgtttacatgtgtgtaagcaaacaatgcacaccaatagtaaattcacttttcagcaaaatacttccaaattcagtacaaatttatttaagttgtagaatttatattatttacgactcaatacgtgtattcttagccagtatcttgacaaacttcatgaaagttctcaattgtggcttcatagtcaattcaactattgaaatattacagtagctaataaaaaccaggtcacattttatatttttcaggacatgataggtattctcaaacacaaaagggatagaacgtacaattaaaatacggagtatactgaggcacaaagactatgctataaattgcatatttgttttgaagaactcaggattactgaagagatccaatctatgatatagttaatgtatcaggaggctgaacacctatggaagtgcagagagagttgaaaactggctcaagtctcaggagggctttcgttggataaacgccttttaaatgaattatattacttgcatgagccattttgaacccacaagtaacagtgggctgagaaactacaaatgaaaagagacagatcattaaaggttctttagatgctactatcatactcaatattacccagagtaattcaaaatgtggcaaagatttttaaaaaatctgttcataaaggtagaaagtttaaatgaccgctaaacagctaaaatttttctaatacattcatttctgttctagcacaaattttttcaaatactttttccctcaagaatattttgttcaaagagaagtagaattgtaaatttaaaaattcttgctattcaatcagccagatatctcatgaagataatctattataaatcatcttgccgaattccacagacttgcagtattgcaggtcaagtcctctcactgtgtaaacaacatagaatagaattttttttgtagcatgccgaatccagacagtgggtgtcatccctattcttttcaattgcaaaattgcaaagaattttccttgttctttgtagtgctttatcacaattattatttttcttaataaaaggaagacgctttacaaatgcatccaaaacttaaatacactctcaacacaacttcccatctttttatctactcagcctagttaagaaatgaattcccttgattcttctttatctctaacctggcagtcattacttcctttcccgtgtagcctagacgtcatagtctctcacctccaccagtctagttagtatcttcgatttctttgttctgctgttgtacatgaaaatattaatagatactatataattcttttttttttttttttgagacagggtcttgcttggtcacccgggctggagtacagtggtgcagtcatagctcactgcagcctcaaaatcctgggctcaagggatcctcttgccttagccttctaagtagctgtggttacacctatataactcttgatcaatcctactctgatttctccgtatgaaaatcctacagattagttaagatttcttttactttcaaatgtcaaatacctaaacactaccttaagggtaaggaggcctaataattaatgtagtcagatcataaaaagtatgctctagtagcctcagggatccaggaatttctctctcatctcaattcgcctctttctaccccaaccatctgcagtccttgtttctccactacacaagaaacacatccaaaacaagcaacaccttttcacagcttgtctctctcaatagtaacaacaacaaactagttatttctcccagctccagtatgaaagttcccagtagaggttcagttcacctatccttcccatggacagatctgcgtggctaggagaaagttctatgactcggcccatctctgaagccaaggggactagggggttgtggggaggtgggtattaatgaagggcagcactgacctagccactaataatcctcctgaacttcgcagcctcccctatttgtatgtgactaattcagcactactagagaaaattaaacaatagaacaaattaatgccattgaatattcatcaactcaaacttcagcagggtcttcattcatgagcctctcgccatctcctctaaaatgcatctgcactagcacctatttctcctttctgatggtaagggaagaaccaacaaaatgggatttcagaactgaactcagagatcatgaaacaaaggtttccttatacggatgaggaaatgaaatcccatgttaattaacttctctccacattccataacttgtttttcacaaacactgactcaagtaaataacacttcatgtttacatcaactaagtacattgtctcctcctaagaccaaaccttatagcatcgtatatgcctggccaaagtcagagcccatttgaaaagataataagacttgtgcctctcttagaatatattcaaataatctggtaatgttctattcttaaaagatgagctttaaagagccaccgttgctaggacacatgcttgaagcgcctttgttggtgaggatgatgggctggctgcactgatcctatactcttagtccatttaggaccaaaggcatttgtcatgagaatggctaaaactggaggcatagtctatggctcagaaaaacaacttatctccagctatgtgaggggttatctggcctagctgcaagagggcagggtttggggagaaacattgctatggactggtagttagagctaagtggagaaagttaccacatggaccttaatgggacagggcagcccatatgaatacatacagtgaagcgataactcactgtggaaggctgaagaatggcacccctaatgtccaggtcccaatctctagaacttgtgaatgttaccttatatggcaaaaactttaaagatgtgattaagttaaagaacttgagatggggaacgtacgtgggtgggctctaaatgcaatcacaagtgtctttatagaaggcagacggagatttaagaaagaaaagaaggcaacatgaagaggaatatggaaattagagtaatacacacgtaagtcaaagaatgctggcgaccaccagaggttagaagaggcgaggaagagacttttcccctgaaccctccagagggtaaaaagccctgttgacctcttgatttcagacctctggcctctgcaattgtgagaatgcatttctgtttttaagacaccaagtttgtggtaatttgtttcagcagcccgaggaaactaatactctagcgtactagagaatagcagatacctagcaaagaatgatgatatacccacaggtggatttcaggaaatagttccagggtcagtccctaggacaaacagtctttccccacagtggtcttatctaaagatgtgacagtgcacaagaaaatcaaccgaggaatttttaaaaacactgattattgtgccctgtcctagatctaccacatcagctccttggacgaggaaactgcatgaatatttctaaatgctccacatgtaactctgattggaagccttggttaaaaaatcactgctttgcaagcttaccaatcttttatctaactgtaatttctgtaacttaaccccagagccagatcacaatcacatacctctctcgacactagccaggacagaatgactctttgaatttgaagatcatcatttttaagaataacaaagcaaagaaaattgcttaaattacagaggtaaacatattctggtctaaatttaattttaagtcgttgttcctcacttttggttgcttctcagagacgataaaatgcaattttattcaaggctttagtgctgtcattgccagcccacacagggctctctgaagcttttctacattaccatgcattgtgtaaccgtgagtctctctttctctctccaacatattttgcacagttgatggaattcgtgtattttagttcaatcatctctaaactccaatgaatttttttctctgtggttcctgaatcattatgaaaagtatggaggatatcacagcttccactttcagtgaaactgacagtgaccgcagtggaatttgtactcagaaagaattatgacaccatccgtaccacaattctctctttcaaatgctatgctggctctcatgcagatacttagatcaagcagactgttaagtatagaattaaatatgcaccactctggcagtgttatcagagaaagagcatgtttgaaaaagacactggttaaaaattaatgataaaaccagttattagataaatatcaaaatggttagaaaaactcaaaatactttgcaatggtcttcaacttctactatcgtctctatgccttaaaataatattgaaaaactgcactatctctcactataggaagcttctccaaaactaggatttggaattgactctttttttgccccctccgcaccagtggaggtccttacaccttgcgatgtaccaaataaggttataggtgagggttatgacttttttttcttaagtggcaaagggcaattgttaagcagagatgcaaaaggagaaatagcctgaaggcttgaccacaagagaattcacaggtagatccattttagggagaagtacatacagaagatgagtttctggaaatggattccctttaagctatttgtgttctcccgtacccactggacagttttcacatgcccaagtttaaagagcgccacattagagaatgtatattcataagcaacctggtcaacattcatcttttcagctcttatttagggtaatagaacatgcttgaattttttttttttcacttctatggtaagatgtagttttgaaatcgagtcaacatgtaaacagagctgaaatctgtatctcgggcaattagtcttatgttgtgatgtacttccaaacccagtcacagtcccaaaaccacctaaccatgaatagatgtcccagcacaaattcgtattaatgaacactagaaaattactcttcaagcccttatcttattgaaagagaatctgaagtataattaatatgtataattcatcatgtaatcatttttaagcacattccagaggctagggaggcattatgctaggtacagatgaatctgttctgtcttcagaggcctcttatataaggaatacaaaatgtgctgctaaccctgactgaactttacctagtgaagaattagtcagctaatggagtcaactaatttttttcctacttacaatgtgtgagacactttcacacacagtatctaatatgtgacattatgttatacatattttcttgagagaaagatttgataaaacagagaacagatccaatcttatgagcaaagaatttgaaacgggtgggtggggcacctatcactgacttgtacatttaagacaaatcaatttacctggccctcattttctttacatgcaataggagagggctgcataaagttagtgttctttgcccccttccagatctactattttacaattcagcttgagaaagaccttagctatcacccagccaaactcccaaactagtcctttctttagtctctgctcccttttcctgtgttcctcactaaatattttttgccatggtttttgatcaatagcatgactacctgctctcaaatcctaggcacagcttttacagattaataaatgcacattttaaaattgcaaatgaacgaacaagaataggagagggagtgggagctacagcaagaaagccagagaaatattatgaggtgggggaaggggagcaatgggactctgactgcttcttgtcaaatgcacctttctgagctacaacagtttgaaccaccatttcttcattattactgaagaaaaataaggtagccaaagacaatactaactaaacacacctgccaaagaatatggccagcatctctggggatgcacaaaatcaaacctgaaagtgaaggccgggcgcagtggctcacaaatgtaatcccagcactttgggagccgcagagggaggatcacttgagcccaggagttcgaaaccagcctagccaacgtggcgaaacccagcctttactaaaaacacaaaaattagccaggtgtggtgacacgtgcctgtagtcccagctacttagaggctgatgcaggaggattgcttcaaccagggaggtggaggtttcagtgagccaagatcatgccactgcactccagcctgggcgacagaatgagactttgtctcaaaaaaccaaaaagcaaaaaaaaaaaaaccgaataaaaatgtaattgctaattatcttttgtactaacataatacttcaaagttttactaatgtgtgtatgcattcatttatttattttgggggtggacttgatcaataagatgtattcaaacacagcacatttctcctaaactacttttgcttcaccttgagattaccttctattgaactggctgttgtgtctcagagaaagtgtcttaactatgctagtatgaataacactattctaaatgtaaacaaaacattaagattgctgctaagttctttgtagagtaaaggttttaagtatagggatacctcactgtattgtgctttgcctcactgagcttcacgtatacgataatgctttacaacttgaaggtttgtggctaccctgttttgagcaaatctgtcagtgacatttttttccagcagcacagtttcactttgtatctctctgtcacattttgacaattctcacaattcaaacatttgattattatatttgctatggtaatcagtgatctttgatgttactactgtaattgttttggggagccattaaccatctccacataagatggtaaacttaataaatgttatgtgttctgagcactgcactgaccagctgttccctaagatacaacaatactgaaattagaccaattagtaatcctgcaatggtctctaactgttcaagtaaaaggaagagttgcatgtctctcactttaaatcaaaagctagaaatgattaagcttagtgaggctaaggctacgctgaaggtgaggtttcttgcaccagttaaccaagttgtaaatgaaaagaaaaagttcttgaagaaaattaaaagtgttactccagggaacacacaaaatataagagagtgaaacagctttattgctgatatggagaaagtttaaatggtctggatagaagatcaaactagccacaacattcccttaaggccaaagcctaattcagagcaaggacctaactgtcttccaccctgcaaaagctgagacaagtgagaaagctgcagaagaaaagtttgaaggtaacagatgtcggttcgtgaggtttaaggaaagaagcagaccctgtaatataaaagtccaaggtaaagctgcaaccggtgatggagaagctgcagcaagttatccagaagatccagctaagatcactgatgaaggtggctatactaaacaacagattttcagtatatacaaaacagccttttattggaagataatgccatctaggactttgatagctagggagaagtcaatgcctggcttcaaagcttcaaaagtcaggctgactctcttcttaggggcaatggggcaatgaagctggtgaccttaagctgaagccaatgctcaagtatcattctgaaaatcctgaggcccttactctgcctttgctctttaagtgtaacaacaaagccaggatggcagcatatctgttgacaggatggtttgctaaatatttttagtccattgtcgagacctattgctcagaaaaaaggattcctttcaaaatgttactggtcattaacagagcacctcgtcacccaagaactctgatggagatgtacaaggagatgactgttgttttcatgcctgctaacacaacatccattccgtagaccatggatcaagaagtgatttctactgccaagtcttattatttaaatacatttcacaaggctgtaactgccatagatagcgattcctctgatggatatgggcaaagtaaactgaaaaccttctagaaaggattcaccattttggatgtcttcaagaacatctgtgattcatgggaggtcaaaatatcaacatcaacaggagtttggaagaagttgattccaaccctcatggaatgactttggggggtttgagacttcagcagaggaagtcactgcagatgtggtggaaacagtaacacagctagaattagacgtggagcctaaagatatgactgcattgctgcaatctcatggtaaaacatgaacagatgaggatttgtatggatgagcaaagaaagtagtttcctgagatggaaactacccccggtgaagatgctatgaacactgttaaaatgacaaaaaaggatttagaatatgaaataaacatagttcataaagcagtagcagggtttgaggggaatgactgcatttctgaatgaagttctactgtgggtaaaatgctaacaaacagcatcaaatgctacacagaaatctttcatgaaagagtctacagctgggtgtgggtggcgtgcatgccaatggtctcagctatttgagaggctgaggtgagaagactgtttgagcctgggagatcaaggctgcagtgagctgtgatcgtgccactgcacttcagcctgggtgagacagcgagacccagtcttaaaaaacaaacaaacaaaactaatgatgcagcaagcttaattactgccttttcagaaattgccacagtcatatcaaccttcagcagccaccaccctgattagtcagcagccatcaacatcaaggtgagaccctccataagcaaaacgatgacaacttgctgaaggctccaatgacacacataataaactacagtatagtgtaaacatacctttttttttgagacagtcttgtgtgtcacccaggctggactgcagtgtggcacgatctccacttactgcaacttctgcctcctgggttcaagtggttctcttgccttagcctcctgagtagctggaattataggggcacgccactgtgtcctgtttatttttgtatttttagtagagacagggtttcgccatgttggccaggctggtcttgaactcctgacctcaggtgatccgcccgctttggcatcccaaagttctgtgattaaaggcgtgagccacctcacccagctgtgtaaacataacttctaaatgcatacggacaccaaaaaattcctgtggcttgctttatcgcggtatttgttttattgctgtggtctagaactgaacctgtagtatctccaaggtctgcctgtttaaagaatttttcccctagttacaactgtaaacatctaatgaactgattagaacattaagtccaaatgctggttcatcatcaaaaaacaaactaagagttacaactcaaatatctcgtaacagataagtcaggaaggccagggagagactccgggggtttggagaaagctccatgtacaaggtaagctagcactcagctgtagcctgatttcaaccaagtgggaatgtagcttcactattgcttttttttggggggtggggggaagtagctggaagcacacattattcaaggctggcaaatgttcaagtatgtcaacagagagagcaatgtaaactactgtgggtgagacaagcacatccactatcaaagaggacaccaattttgaaacagattggaatgctattgtgtccagaattggtgggttcttggtctcactgacttccctcgcggtcagtgttacagttcttaaaggagacgtgtccgcagtttgttcattcctcccggtgggttcatggtcttgctggatgtgttgggagttttttccttcttgtgggttcgtggtctcgctggcttcaggagtgaagctgcagacctttgtgttgagtgttacagctcataaaggcagtgtggaaggggaccccagcgagttgccactggtggctcaggcagcctgcttttattctcttatctggccccacccacatcctgctgattggtccattttacagagagccgattactctgttttacagagaactgattggtccattttgacaaggtgctgactggtgcatttacaatccctgagctagacacaaaacttctccacctacccactagattagctagatacagagtgctgattggtgtatttacaaaccctgagctagacacaaagtgctgattggtgcatttacaaaccttgagctagatacagagtgccgattggtgtattcccaagcccttagctagacatgaagattctccaagtccccaccagattagctagatacagagtgcccactggtgcctccacaaaccctgaggtagacacagggtgctgattggcgtgtttacaatcccttacctagacataaagattcttcaagtccccaaatagatttaggagcccagctggcttcacccagtggatcctgaaccaggcggcaggcagagctgcccgccagtcccgccgtgtgcctgcactcctcagcccttaggcagctgatgggaccaggcgctgcggagcagggggcggtactcgtcagggaggctcaggcggggcaaggagcccatggcggggtgggggaggctcaggcatggcgggctgcagagcctccgagccctgccccgcagggaggcagctgaggcctggggagaatctgagtgtagcgccggcaggccggcactgctgggggacccggtgcaccctccacagctgctggcccagttactaagcccctcactgcccgaggccagcggcaccggccggccgctccaagtgtggggcccgcggaagccacacccaccaagaaatcgcgctggcccgcaagctccgcgcgcaacccgggttcccgcccaggcctctccctgcacacctcccagcaagctgagggagccggctccggcctcggtcagcccagaaacgggctcccacagtgcagcggcaggctgaagggttcctcaagcgcggccagagtgggcagagaggccgaggggttgcggagagtgagcaagggctgccaggactgccagcacgctgtcacctctcactgtgattagaaattgtaaggaggaaacagtaagaatcactgaacaaacacggcaaaatttccaatttttgatttatagacaaacttctgaatatttcatgtttcgcctggtatttctgacgctgcgatgatgttctagccatttcaaataactgatcttcctctgataataactatcaatgaggccccactatgtgatactgctaagagcctgactttcacttgatctcactgaactctcacagcagccatatatgagagaggtagtattattcccactctagaaatgccacagctgatgcctatgaaggttaagtaggctgccaaggtcatacagcagagctgggtatctcagacaggtctttcctaagccatagtctctgcttttaactgccctaatcacaacacaatattgtcaccatgtaagtatattattatgtgtactgttcacatacacacctgtgtacatatatacatactttaaagtcagtattatgtgtattgttcacatacacacctgtgtacatattattttaaatatagataatcagtaataaattttgcaactctgataaatgtcttgcctagaaatcagagttaataaagttaaaagtaaacaatgctatccacagtattacatttcttagcttttccttttgttatatcagcttaggccttcttattagtttatttaaaaaataatgttttcacagggaaagatatccatcatcctaagttcacggctaagaaaacttatgatcacagtgcacatgaattgatggtttatagttcaaattctcctttaacacatcactgactatttataacttgtctactccatctccctacatagcgtaccttgcttaatgcatcctcattgtattagtctattgtacaatgaccacaacaaatatttgattataacacatgctgatatatgaagggaaattgttttttgtaactactagacactaattagaatgtactttttctgatacagtagtctcccgatccttgggggaatatgttccaaggctcccagtggaacatgaaaccacgaatgggaccaaaccctatatattgtatgtttttttcctagacttacatgcttataaggttgaatttgtaaattagggacagaaagaaattaacaataactaataataaaatagaacaatgataacatatgccagcttcactactcttgcactttgcagctattattaagtaaaataagggtgacttgaaggcaagaactgtgatgctgtgacagccaatttgataaccaacttagctagtaagtgactgagggcagggagcatccacagtggggaggcactggacaaaggaaggattcgcgtccacatgggatggcacacgacagtgagattgcatcgcactacgccggatggcatgagatttaaaacttatgaaatgtttgtctctaaaattttccttttaatgtttttggacgatgtttgatggcagttaagtgaaaccatgagtaactacctgaaactgcagataaggggcgaatcccgtaatggtatagcatatggtataagtattaatacagtaaagtattttataacaactagaagactaattcatgtttgtaacacttataatagtaaaaataaatcccttaaaaccattcatttattcattcatatattcagttgaacagttatttatttaggcatcgtgaatccagtggtgaacaacagacacagaacttagatttgagtggggtggaagcaggtaataaataagaaaaataacagatgacgataattctgtcactttctggtaggctaccagataattattataaggtgattcaaataaggtcactggaaagagtagccgtagcctggatggtcagagaaggcctctgggcaaggaaacgtaagacgtgagtgaccgggagcagccacgcacaggtgtggggagcgaggtaagcagctcctgggcaccactgaaccgggtgggtctgagaaacccagcggggctggtgcggctggagcaaatgggcccagctgtggtgtgagcaggtcccgaagggcttttaaaccagaaaagttagaggtttattctgtgctggccgggtgaccactagaggattttaagcgggagggtgacctgctgtaattcatgtttttaaagggtggctccgcttctgtgtggagaaaggattataagagaaaaagggaaacagcagcgaggcaggtggaatctgggtgagaggtgaggtaagttgactgggatgaaggcaggcagtggcggattagggacggatcaggctgtttttctaaattatatgagaaaggtggaccattttcacatacctcaagcacaaataaaaaactgggtacaacgaacagtttcaacagtagcaccagaaatgtatcattatgatatttaaagtcatttaagctaagaaggaggtaaatacattaagagataaaggaaagaagtaaggtgcaaaacattgttacggtatgtttccattttgtgggggaaaaatgtgtgcgagtatctgggcacgaatagaacatttctgaggggatacacacaaccccaccgacaatgactgactccggacacagcaactcggggagcagggtggggggattttcaatgtataatcttctggacaatttgaatgttgaccacacagtgtacactttgcttcttcgatgaaaaatagagatgacattagattttatgctccttgcagatgagatcaagtcttccatctccctttagtctctataatgcttcgtaagttgtcttaaccacagcgagggtttcatttgctgagaaggcaagggcttcagtgaggacgatgctgtataacacaattatgatgggaggcagcaaaggcaggaaaaaagaacaataaactagaaagctgcagacctagattcacacctgcttctacgtcctaggaagtaagtaggatgactccacttcgccgatctaggagctggaggttaggcagattgttgcttggtgtaggttgaaagttaccagatcaaatgcaagatgctcacttaaatttgaacttcagataaataataacatttctagcataagcatgccctccaattttacatgagacacactaaaaattgtctaaaattaaaatttacctgggtgttctgtatttttatttgtgaaatctggcaaccctatgccagccacaactctctttccaagaggtaatgtagttatgatctgagtgaatcactttctttcttatacaatgaattaaaggttaacttccaaggtattccacagcagatttaactattcttctttggaagcaccatgattccagaagccattgtgttcacagtcatctcctgattttgtttttttgttttttgtttttttttttgagatggagtctcgctttgtcgcccaggctggagggcagtgcgcgatctccgctcactgcaagctccgcctcctgggttcacgccattctcctgcctcagcctcccgaatagctgggactataggtgcccgccatgacgtccggctaattttttgtatttttagtagagatggggtttcaccgtgttagccagaatggtctcgatctcctgaccttgttatccgcccgccttggcctcccaaagtgctggaattacaggcgtgagccactgcgccgggcctgattttgtttttaacttttataccctgatcctctgaaactgtaatttatcaatttatcaaaaacttgtctagtttagacagctaaaccatatcagtgaaaaacataaccataaccagtattttcaataaagattctggaatgtacttgatgaaatttgttaatgtccatcttgttggtaagccttaagtgttggaaagtagcaagcatgtaccataataaaaaatgcaatttgagaacataggaaaacataaatttaaagtgaccttgtaaatatatgcaatattttttaagtacccaagaaaaacggtcaattatatttaataactatggacatgatgaagttaacgtgcacagtttattaaaaaaaaaaacttgctgggtaacaagcacaatccttttaaataaatggcctgtaaaaaaaacaatccctgggggactttgacatttagagagaatgccaggcctggcatttgttccctgtcatttccatgcattagacaaagcaatgaagacaaaccaaatggaaataggttttattcaaaacgatcaatacaaacaaattaaataatctcacccagtggatagcaggcttcaaatttcataaacaggaaaatttgcaaaagaaattttagggagctaaatagaattgccagtttttcgtttagctaaatgagaaaataaattttttaaagaaacaaagcaccaactattatcggtattgttgcataaaaataagttgcatggacaatctcagaagagacaactgtttctcaagaaaggaccagcctttcactgatattttgctatagactaaaactgtgacagcaactagcagcagaacatggtctagtctgataactgctagagtataaagtcttggaagagatgaaaccttttgcttttcttaaaaagtagtctccattacctggcatttgttaaacccaaagttaattaagataaacaaaagccattctagtccctggaaattattccagtctcgtatgtacctatatatgctgtctacattccttctgattcattaaaaaaaatttctcaaggcaatatatgtatatcatttatataatcaaaaattactaaaaggtatgtaatacaaataatcttttaacttcacctctgattcttgctgctcaaaagtcacctctttcaatctctttttggtttttctattttcaatatgatctattgactttcaactgcagaactctggaaagtgaacatttatttggttctcttaacacacacacccatccacacacacacacacacccacacacaccctgcccgtctctttctttccactcccatattaaaatcataccacagtcacaatttgcagtttcatgaattttcagtcctcatattattgtgactatatagacattattcatggggcagaacactaggctacgtttccattttttgtaagatttttgatttccctggagttaatcatcatcttattttgttgttgtttactcagttttctacgaatctatctctatgtcaacttcacaccctccagcaggcattccttcggtgccatggttggaagcatgtctcttggcatcgtctctgcccccactcctctaatctggctggtttctatctccggcacagctgttgtcccagggtttccctttgccattgtcctggggattccctctccccctctgctctactggacaccatgtcttctctttcacttcttcaagcaactgagaaaaagtacatgagaaagtagagagggaagagacgccctgctgtgaaacgtttatacctttcactgaatcctgctattttcaacgtggggatctccccgtgggcctcgactgagcctaatttcctaagtccaaaacctctggattaaacttatcagagagaaagaacagaaaattgtagggcgggcaggggggcatgctggctcatacctgtaatcccaacgatttgggaggccaaggcaggaggattgcttgagcccagcagttaaagaccaacctgggaaacaaaacaagaccctatctctacaaaaaaattaaaaaatgagctgcgcatggtggtgtgtgcctgtggctcctgctactctggaagctgaggacttgggaggattccttgagcccaggaagtggagggtgcagtgagcagtgatcgtgccactgcagtccagactggatgaaagagtgaaacttgtcttaaaaaaaaaaagaaaatggtgggaggaagggtatgcggctatcaaagcaggggagggcattcagaaggtcgacttactaattttagaggctttaaagggctgtcctcgttcgactcactgccctcagaggtagccagtggcccccagttcctgggccttccctgcgttctgtggggacagattgatctatttctttctttagtatttggcatccagtttttttctgtggaacttaaatagtgaacacgtctatctggtttccatgtttcaaagtttgctgatgttttgaaaaatcctctctcattctttgggtccttgaaggtctacgaatcctactgtcattttagtggagtttaggtgggtgtaaagataaaagcacactgttaccttaaattctaatttaagagttaagtttttttgctatatgtaaataccacttaatcacagtctaagagatcacagcagggggtggatggggcacagaaaatctcctcaaaacactgtccaaccatagtaagagtattccaaatggcctttttattttacctgtttttaagaagatgtattaagaaagaagtgtggccagatgtggtgtctcatgtctgtgatcccagcactttgggaggctgaggtgggagaagcatctgaggtggggtgttcaagaccagactgggcaacattgtaagtcctctgtctctacaaaaaagttaaaatattagcctggagtggtgacatgtgcctagttactcaggaagtggaggcatgaggattatatgaggccaggatttcagggctacagtgaggtatgttcttactactgcactccagcttgggtgacaaagtgagaccctgtctccaatttaaaaaaaaaagcaacaataaagaaaagtgtcatcaatctatataaatctgctggacctttatctgtccctcggagtgacagtcaagagctgcttctctcaaagtactttcttgtatctgtacgtctagttaggtaggacctcaaccctttagatttacttatgctgggagaccttagaagaaaactgtaatgaaaaagctcaataaggattcgttcccttgtcatgagccactggggcaccaggatctagagaaggtcttactgcttcctgtaaacaccttggcctgccccagtggatttctgagtagtagagctgacgctgacaccactaaactgcagctgagtgcaagaaggagattagactgtttgagatagcttcgtaatcttatttatttactggaatcaaacacacacttggctcaccagatttgaatgtggcagtaacgagtacactagtgtttccagtgccttggggggcatttcatgttgtaaaacttaactgcaggctacaaacaatggcatgtcataaggggagtcaggctaggactagagcctcagccagcccgttcagaaaaattttgatattaagcatttcaaagaatctacctagaaaaacaaattccaccgatatcaggtgatctacgtgtccaaacaggtacactaaatgtaccatcggaacatggtacagtggattttaaaaaaagaaataaaatctgcttgaatgatagttaaggcaaagcttaaaaatcttaattaaaattaatgttagaagagcaacttccatcataaattaatatcataaattaacaagcaggaagccatcttgcacagctactcttggtctctgcttcactatggatgagtaaataaaaaatattttccaaaaatctcctattagactctaagctggacgcaatccctaagctctaagccaggcatgatctaacaacaggttgcagaatagcttgtcaccatacatattcccacacagaagctccttatggtcaacttcaggttatcatgatgctacgaaactccctgatcttcggcagtgactatctttaaaatgcaaatatatatatatttttttctctttcgactcctatcattattgcatagagttttctttttcctttccctggattctgaaaaggatattacactaagcttgccaggaatgacagcatggaccagcattttctctacaatgttcaaatactgcatggaagttctcaaacacctgcttcagtacaccttccccaaaagaatgtgttcaaatacagtctactcataaatggaggggagcaagaatgcagtacgaccttgggagttagagatgacacaacaggagtgggacgcggcttctccttcatgtatttctttcttcttctcttcacaaaacccacacctctaccacctcactgatgccatacccgctaaccctgaggacttagtcacacaaagaaaagagccattctctctgctctcataatgtttaaatatgtttcacttagtccagaaactggccttaggagatttaacaggaaaccaagattgtggagtgtcctatcctgagtaggaaatgccgaacaattgatttacagccttgttgctgctggccagaccagcgaggagcccatcactcgagataactattacaaccagatatgctgacccgcataccctacccctcttttgtgctttgcccagccaagcctgtatactttagccttgataacaatatctgtgctttgcctaataaaaaaacacctaccagcttccccctgctgcttcctgcagagccagtcagaggaccctgtgcctcacctccactgtctcccttgtgcttgagcacaagccctgatttgaaagcctcatctgggaaatctgctcggctccatgttaatttccattacatgggaagccaaagagcctgcggtctgtaacagagacatccaaaccaaacacatcacctacactttactcaagtgaaaatgggtaaacagtgatcgtaaagatctgctattaattaaattcaagggtcaagaaatatcactctatcaggagcatagtgtgctcaacatttactcctaagtaatcatttgagcaatcttaaaaaagacatttatttatatgaaagtaccagcaggatttgagaaattcacagatacagaggaactagaggaaggagggaaattaagaggtgggcagcagggggtagctctaacaaaccaacccagtaacaaaaaccattgtcactttgctaggtttcctaacaaaaataaaaccaggtcagcgcagtggctcatgccttgaatgccagcacttttggaggccaaggagttcagatcacacgaggccaggaattaaagaccagcctggccaacatggcaaaaacccatctctattaaaaataaaaaaaaaatagctgggtgtggtggtgcatgagaattgcctgaacccaggaggcagaggttacagtgagcccaggtcaggccattgcactctggcctagaagacagagcaatattgtgtaaggagtgaaagtttttattttggggcaagtctgactcaagtcatcaacttaaggggaataaacagttatcgataatatgaaaatgatacagataatgataatctgtagaactacgtccctgaagaagtcaggtctctttttaagatctcctttggctaaggatcacagtaaaacattagaacatgttgactgggcacggtggcttacgcctgtaatctcagcactgtgggaggcgaggcggccagatcacgaggtcaggagatcaaaaccatcctggctaacacggtgaaaccccatctctactaaaaatacaaaaaattagccaggcgtggtggcgggtgcctgtagtcccagctactcgggaggctgaagcaggagagtggtgtgaacctgggaggcagagcttgcagtgagccgagatcaggccactgcactccagcctgggcagcagagcgagactctgtctcaaaaaaaaaaaaacaaagtaaacaaaaaaacccacaaaacattagaacatgttaatctggcagaataattaatacctggtgaaaaagtataacttaacataggagagccaagaaaagaaaaataggcttctgaagataaaattgtttttatctttgcactaccagatttactttgttcaacacaccacctccctaattccttcaaatgccaggattagaactagtgcaggaggatgttgatattttgacctaatagtttaagttgtttaaaaaaaattctccttgggagctcattagactgaggtacctctggcattttaaatttttacatgaacaaaccaaaggccaatgtaaacagtaaatggaaactagaaaatataccaatcagaaaccatcaacttcttttaaaaaatttatttttctttctctctgcctatcattctttccaccaactaacttccagccaatcaaaactgttctcttcgccttgcttctgcaaatactacataagagttttcccagctgggcgtggtggctcacgcctataatcccaacgctttgggaggcctaagtgggcggatcgcctgaggttgggagttcaagaccagcccgacaaacatggagaaactccgtcactattaaaaatacaaaattagccggacgtggtggcgcatgcctgtaatcccagctaacttgggaggccgaggcaggggaatcgctcgaatctgggaggcagaggttgcggtgagccgagattgtgccattgcactccagcctgggcaacaaaagcaaaactccgtctcaaaaaaaaaaaaaagttttccttcttgcacctctcatcagagtgccagccccttgtggtttggtacaaccctaatttatgcatccctgaatgttcaaactcttgaaaatgtatatatgcttaagtttttcttttaataaagtctattcagctaaaggatgaatttatgaggttaaaaatgtactccttcaacttaggaataacaaaaatatgtaaagacatttgcaagaaaattttcatattatgactaagaattttctccattttaaaataggcagatatcaatgtcctgtttgaccagaatctccttcccaggctctagccttagtctaaagagcaaaagtggtctaggaagaaatgacaacaatctgcaagcctgccaccaaaacttcaggtcgcaaagggccattgtaatgatttcttcaggtttctttgtgtatagctttaactcacagaggaagcaatgattagcagttatctaacaatgcaaaggaaacagcaagtgaagcctaagcagaatggggagaatagaggtgatggtgcctttcaacattattgcaacacgtttttaaaaagcaatggattaggcacttagcagagcagaggtttggagcaaaggacttccattttcctttaacacgtttatggttaacatctcctagtacaggaagaggtttattcagaatacatataaaactacctttgttaaatctagctcagtctttaaggttccttccacagaggaaataaccccaccaacctcggcaagatttctaaaattaacagtgttcagaacaaagatatcattttgtcaaaaccctgcattttagggatgagtcttggggaggtgaagtaacttgtctaggtgaacattgctacttagaaagcaaaaccagggtagcccgccaggatgcggcatcctgactgagaaaccaacaggccaatgtttcactatgcaccaaccaaagtaccagtactttactggaagttcttgaaatttcggtgtcacagaaattgatttctttgctatatcactgaataaaagctttaaacggttcacttgaatcaacattattaactagagaattcttgatctaatctctagcatcatgcttattcctcaaaaaaggcctcaaggattcagccacgcatgttatattaatccactcatgtgacattcacctacaacaacataaagaaacaacagtttgagattccgcctcatttaaacggtatcacgtagtttggcaagagatggggaagaaaagagtgtttatcaacatgaacttttacagatttatgttttaaaccataagttaaaaattagtactagaataatttatatttgacaaatatttagactcagaggaggactgtggaaatgtctgggagaactgaggcttaaatcaacattttctaatactgcacattccaaattctggagtacagttggccctccatatccatgggttttgaaaccccaagggtacccgaatacccggggctgattgtattctacttttaggaaattgtttctaaattagaaatcaattagaatctaattgattctaaaatgttacttctgtcaaaggcagagcaaccagctggatctgacagcaggaaggtctgcactgccccctcatggccagaagccttgctagtaactcttccaataacagacacccaatgaagagctgagctcagtcagacttcattaattttaataatgaatgccggtctccacgaaacacatgttcttccaaaacatattcagatttgcatcctgcccatattatgtgcttcagaggttgatacaaacattattatcgagaaaaagacaaagccacactctctctagaggaaatggtaagatttaaacacagaataaagaaaaaaagtcaacacggagaagggggttttaaagaaaataacatctataagctgaattttagtaggttaaataatattcttcagacgaggtcaatatgaaccataaagtactggaaaattcaattttcttaatttaaaatatttagaccaagaaaagcatttaagatatctcactaaaattaaaagcaaaacttctaatcctttccacagtcctttaacactttttttcaaatgaatatgaataaatcagagaacaagtgaggactacagataattaatatttgaataaaccattatgttttaatggccaagaaaacaagctggaaacatcaaagatgaaagtttcaaagaatacaaaacatgtaattccaactctgacaaggagaagcaattattacacctattctagaaagagccagagttctagaaagataacattaaatcccaggagcgaaccacgagttaatggtatcttattttttacaggttgggaagatgacatgagagggtggagagaggtggcaatggggatcttctaatcatcaaattagacatcctgcattttggatgaaagagtcagataatcaaaaatgctgtttacatgattagcaagaagaaataccagctgggtgcagtagctcgtgcctatcatcccaatactttgggaggcagaggtggaaggactgcttgagcccaggagttggagaccaacctgggcaacatactgagacattgtttctgtttcaaaaaaaaaaaaaaaaaaaaaagaagaggaggaagaagaaacactgatttaagggctaaaaaatactactagatacaagtaagatcaatgaaaattctgattaaaattggaggaaaacgtgtaactgtggataaaaatgggagaagtgatgcttaaatcaacattttacacatgtctattatagtataattaagttcagtaatttagggtacaagcctgtcatattattcagtttatttcatttagggaatataaatggctagtcaatgattagggtcactctgatagaatattctattctactgattttctcttagctctggtgttcaattttaagccactagataatcctaaaaatatctcttgtgagatattgggagcttggctatatccttgaacacatattctgtaacttagggaccacatatgcctcaaaaaaatactaatcatctcttaaaaaccgactataatctttaaggtatcatgtgatggcctactgactacagttctaccagtggccttttatactgttaactcctgcggcgtttgcaatattcaaaaaaaaaaaaaaaaagtgcttggccttctcttccacagatacatatcaagtaaaagtacctgtactgtgtgacaaacacagaggacagtagagaatcttttcatgtggtatctatgctggattccaacattacactacacaaccataattctgggtgaacccactaatattacaatgcctaaattatcatgaggataggtagtaggactacaacagagttaaggatgatgagctcttaatttcccatagcctctgactgcataccatgggtatactccacattaaaacatccaaaacaaaatccagagacgtctcttagtgctcttatagaagccaattttatagccatgttgagaattacatacatgctcacatacatttatttaagaatatgataaaccattctggtctatttcagcaggagaccgcagtcctgacaccacaggtggtctcataacactttcagtagaagccaacacatccctatacaggtcacattaaaggactttgaagacacgtttctctctaaagataaagctttttaaaaaaacagtgaggagtaaaaagccagatttgaagacttactggagccaggcaatttgctaatgacggagggggtcagactccactatgtcataatgtaagggggtgaataggaagccaacatatttcttaaagtcacactaaggtattttgccacctgtcccctgccatattttgaggggaacctgttaatgccaaagtctttcaataatgttatgtcacacagggatggggaggtagcagaggaggagggcagtggggagtggtgggagggtgaagaaagcctgatgtcactctcagtgggtctggatataaccccgagaaggctgaaatgacactgagatccacctcctgacgctctctctgcacattatcaagcccatgaatctccgttataatcatctccatctccagacctggagttctgtgatcctatgattctattattccatttttaaacctgtggagtgggagtgtttctgagtaccctgctcacacagatggtggtgggaagaatctcaagaatatgttgcatgtagtaaatgcccacttcactacgtaatcactcccttcacatttcacacgaacaaagattatattatcttcaagacagctgcaaaaacacgagtggtttcatggcagcatagcatcagcacatatatgtgtaaggaacatgaaagaagaaatttctcttcattacatatgcctggggctaaccactctaaacctgacatgaatgtagtataataggaccaggtcatacttgtacatcagctccacagactgggggctgggggaagaccaggggaggaaaggaaaaaggaactaactgaaagataaaatcatacacaatatctctgtattcctgatgttctaaaaatactccgcactgaaaaatcatttgtcaaggcaacctttctgagaccaaaaacaagatcgatgtgccaaacaacagtttcccacagtcatctcattttgagcacggctttcgcccatctcttccacaaactggctctttacaaaactgacccatgccacagcatctttgtatctggagttcaggtcccatccgtttcacctgatcgcacctgattctcttagaaccattttatactcctcgttactttctcagtctatcactgcacattagacactgccaaagactatccaattctgttgccctgccacacagctgtcaataaggttcaatgtggtatttctttaccttgttctccttagcagaaaactctgaggagttggaaattttcatggactttgacctgtgagactgccgccggatagaatcctcccgggagtatttcacggaacctgaggtcctcacccgtaccttgctggcactctggacactattcacgccaatcattttcgaaggtcaactaaggaaggggtttagagaaataaaaaggcactttccaaccgttccaaggctctcacgctggaggaactctgcggggttgtgcctgagcagctcctgagcgccgtgatccgcgttagcttaagaagcaccaggctgcctcccccagcatcttcaactaccctgtttgcagcgagtctgattgttccaggcacagctcacgtcactggctgcaaagaggaaaaaaatgcaatccacccctgctactcgtctctcttttccacacacacacacacacacacacacacacacacacacacacacacaccccatcatattcacacactggaacgaatggcaattggccaggcaagcaattcattaacattccaaaaagcaacactatttctcttgtgatatttgtgaagtaagctcattaatgtcaacaaccaaatagagataccacaaataaaagtctcaagtaatctccaaggcaccatgtggggtgggaacgtagctgaatttccacaaggaagaaaaaaaatatggatggacgtcaaaaggctcaattaattacaggctagtgaaacgatgcgagacacaaaggcatctcaatgatcaataattttcctttctttcccgtttcaggccacacactgtttgacagcaattcaaattatgttgccattctgaagaattaaatgtttcttatgaccttagactacgacagccagatatttcaagaggaattatgtcagtgtgtacggcaaatccagaataaagatgttctgttacctctctaggagactgagaaaatgactggggggttagcacaggttaactttcaatatggcacagagtgagagcaataaagctaactccgggcaacaagcagcaagcagcttttccaaaagccatcaatgttctgtcagtgtacacagcaatgtgcaagcctctgagtacgaatcacaaactggagattactagaaaacaagaccattttagctcctaacatatgaagtgagttttgagcatactactcaggattgcgatgtctcactatctggcatcccagggacagaggctcagccacataagcgtgttctccagataaaggaggctttcgtgttaatataaataacaaaacttaaacattgtttacaaagaccactctgggaaaaacgtcagcctcaatccatcccacccctcagatttaaacttttcctttacaactcaagaatgtatacacttttttttacaatgtaccaatgttcaaattttgcaacgcactggtgttcttgagcattatttgagataattaattttttaaaaaatggtttaaagtaattcttaaactttaattactaaagttatgttttaatgtcaggtaactgtttccctctactgtcaacaggcccagcagagggtgatgtttgacccttgggttttgttgcatcctcatgacaggggctttcttcctatatcctttacattttttttttttaacttttcatctcctatttttaaagcacttagtgcttctattgtgctataaagaagacgaagacattaatattggtaaaatgttaccatctaaaataataatagattatttttggaataggttttggaagatcttggggactctcctgtcctttgaggtacattttcctctcttcttaggaaactgaagctaccaaataactgtttctcagaattaagaaaaattctgtaaagttactattttacaaagcatattccaaagacataaaaagtggtgtactatagcagtaaaataaaatcgatcatttggaatagacttagttctaacttaagcagacgacgagtctacaggtaaagatctccagttaacaaaagtaagcttgaggtggaacccagtaagaaactaataccataataaagataaaaattcaaaatgtcccgtgtaaaagacatgagcgcctgcctctgtgtggggataaagacagtgcacgggcttaaaagaaacatgccctttggatatttgtcagtcatcataatgaggagttataaactatctcctgatgaactttcttttctccaccaaaatggttagattaaaaaacaaacaaacaaacaacaacaacaacaacaaaaactaaaaccatatggtaggatgtacagaaatggaatctgatacatgtcatttctgggaggtttagcagaaggacgccatctttacccaaagactgcccaattgacgttactcctgtactgtctccactaataaccactttcatcgatctgtttaacacctaataccttacagaagccacttgttctcttgttttcactctcaacatgacaattctgcgaagtgggttgaggtaatattgcaatccccactttcctgatgaggacgctatcacagagccagcatgcagattctcgcatgaagtataccaggaaccacgctgtgtccctcacactatagctgtctgcattgccctgtcctttttaaacctgccatgagcttttctgcaagtcagggagagaaagttttcttctgctcctgccttttactctctgttgcagaacacgtatttctacgtggacagagtgaagagaactcctacaatgctgctagcagtctcacagcagatgatccctgcgacatatctgagtatgtctcaagaggtacctgaaaaagctgtacagacctcagcatccaggggcccttgatgctcaggcctcatcctactgacctaaacttaatcccaaccgcttctcactcttcttatctttgtcagtcaggcctgactcttcattccaggtgagtgcgtggcactttagcttccactcagcccatgcatggaaggcaagcttgcctcctttctgaagctttcccgaatgaccctccatctgctgtcatcctgtctggaactctgttgccccatcctgattcactactaagctggcttctcctcattcagcagtcagctcagtatctttttccaaaaggaccttctgtgaccatccttccttaaacagcagcccagctccaccctagtcattcatttgccaccaaaacccctacttctgtgacttcagggcactcatagctgtttgaaattacctgcatctcagaggccaaaacagaacctggtgaagagccggagctcaatgaccagctgtcaaataaaggaactactttaaatatacaagtttcccttctctatcggctctcacgtcattcaactttcttttaaagaaaattcaggatgggtgcagtggctcactcctgtaatcccagcactttgggaggccaaggcgggcggatcacatgagtccaagagttcaagaccaacctgggcaaaacagtgaaaaacccatctctacaaataatacaaaaaattagccgggcatgatgatgagcacctgtggtcctgactacttgagaggctggggtgggaggatcacctgagcccaggaggttgaggttgcagtgagctgtgatcatacaactgcactccagcttgggagacacagtgagatcctgtctcaaaaaaagaaaatttagcagttttttttttttctgaaaaaatgaatacaataaatacgaaatgatttcccccctaactatacaaaaaagtatgaagtgaaatttgtttccttcccgtaccattttcctgttcagtccctctgcccgaaacaagaactgttcccagtttcctatgcatccttccagagataataagccatccacgtgtgtgtgtccacgtgcgtgtgtgtgtttgggtttgtgtgtgtgcgcttgcccatcccttttcttctcatggactataaatggaagcatgatatatatttttgctatttttttttaagatggagtcttgctccatcgcccaggctggagtacagtggcatgatcttggctgactgtaacctccgcctcccgggttcaagtaattctccctgcgtcagcctctggagtagctgggattacaggcacctgccaccatgcctgggtaatttttgtattttttagtaaagatggggtttcgccatgttggccaggctggtcttgaactcctaacctcaggtaatccaccctcctctgcctcccaaagtgctgggattacagatgtgagccactacgcttggtctatttttgctatttttatttatattttagagatagggtcctgttctgtcgctcaggctggagtgcagtgatgccataatagctcactgcagctatgagcaaagatcctggactcaagtgatcctcatgcctgagcctcctgagtagctaggactacaggcatgcacctggcacgatcacgtcaggctgtttgtttgtttgtttgttttggtagaaatagggtcttgctatgctgtccaggctagtctcaaactcctggtctcaagcgatactcctgcctcggcctctcaaagtgctgggattatgggcgtgagccactgtgcctggccttcttaatatttcttgctcttttaacccttatcaaaatcctgttacattatcacatacaaagccgccttactcttgttaatagcagcatagtattcgagcatgtgaatgtatcatattgtaacagggtcttattattgaacatttagtctgcaatcttttgctacaataatgatgcagtgaataatacccctgcaatgtatcacatcctaacattgaaacaacatagttttccaattgttttctgaacaagtcttattttcttcatcctacattatttcttatcacccacaatcatggtgttaggtacatatggggttcacaactagattcaatatgaaataatcacttcaaagacgtgttggatgaccctgtcctgccccatctggctctgaggccttgaccatttatagacatgagccagcctgtacagagacagccgagccggcttgctataaaataaaagcaggcttcctggagagaagcagctgtttaaaggtacaaaataactttccacaaaagctttagcagaaagtgaaggtgacttccataacaaatcaaaatagcaggagacatttaatgaagcaaactaattaagcggaaggctggaaactggtgcttcaccttctgatgctttctctaaggacaccgtttggtagataaaccctaaaaggcttctaacaagggacctagttaatggtcatcagaaaaactcaacctctcaaaagagtaccagagaaatgaactcaatacacttctttgctgtgtctactaggtaccagatgctggggacacacaacgctgataccatcaggcccctaactttgagcagctcacattcagtcgggggtaggaggtagagagaacaagaaattctgttgccataattataatgatgaatatcttcagagtatcaatgaactgaaaggctttcagatcccaagtgaaatcaacaggagagtatcaaacggcacccaggcagacacttccctctttgctaagaaaatctcacagaaccattagtagaaggaggtgaagactgaggtatgaactctggagaaaagctaaagtggaaatgaattataaataccaattgtctagaggtacaattagcaggataccaagaaggactggggagggaagagaggcatgaggtgtcaagaggaactcagcctcagcctattttcagaacagaatggcggttgtaacactcagttaattcaaaaggctctcatgactttccctaggttcctcacattacatttgcttgtactgaaacagagtaaagtgacagaggctgatttgggagtgacagggcaggggcttgccaagattttctgtccatgtttgtcacgtagcccaacatattcaagaggctagtgctgctgttataaagatgctaatgattaattgtttcctagactattcatttggacttattattagagctgggagaggcctcagcaagaatcatcttcaatctcttcattctatagatgactcctgagacacagaaacaaagtgacttgtccaggagctcataactatgaagtgaccaaactgagacttgggcccaggtttcttaattaccaatattgaggtttctttttttcctcctatgctatttgtttcttgaaagctaaatattccacgaacacatatctcttcagactacattaaggcctgaaaggttatcttgaaatggaaagttcaaggctgggagactgactctagaagtgaaatagaggccagctactcataagaactacgaaaaggagacatgaaaggacaaaatcaactgtaccaatagcgtaggaactggtcttggagtcctgaaacgtatgtgacagctccctgtccttgacctggcaggagtgaggtacgcaacctttcgttctctgagtgctattcctttccatgcggtaacatgactacaaagcaagttaattttgcagagaacgatagctactactgttaaggatacataaacacacaaggtatcatgaggaaaacagatacattggatcaaaacgtactgctttatttttcctgtcttcttccaggcctttccagctaatacttttctagtctagggatctattttgaaccccagcagatggtggcagcctagcttcttctaacactctacaccccaggacaggattcttatcccctagatggtccagccacatgaggcctgatacaggctccactgcctgacatctgagcctgcaccagaaccctgctgccatgtgtcactaacctaccaccttgatggacacaccaccgctttcctaaacgggactcagaccctttctcccagaataaacacttggcccacagtgccgggctacctcttcctcgctgtctggtccgtcacccttcgaccccagcctgctgaaccagcttcagagccccttcccttgatttcccctgccccttctcagaaaggtccaataaggcttgccttcacccatctcaattggacataaaactgcaaagttttttctagcagtggggctacggatttccttagtccataagacatcactagaatctaagctaaatcaaccttaatgaacaatcactataagaattggcggttaggagtaaaaaaaaaaaaatcctatgatttgtacaacctatgaggacgcatcacctcactccagcagccttcaatcttcctggagcatcacacgcttttgattccatctgttcctcaaacatacaaagcaacaggatggggggaaaaatctttaaatagaacgttcttacattgcaaatgaaataacattcttaaggcagggggaacacccgtataagttaaacagttttgaacctggaaaaaaacctcattttttccccctcatgaacaagaccagtcatgtaagatgttttagaccagagtgatgcattagatttgctgtttagaagtacggacaatgcagaacaaagacggcctctgtgtgttcacacacttaactctgtatagctgacaatgccacagtcagctcagacctttccaaccatcatatggaaaacaaacacaaaactgtgaagctacagggccttccggagatcagaaaaacttaccctatatacctgaggcattataaactcttctttctgtgctacaagaaggtattcttaattctagcccaaagtaaacacaaaatgcaaatacagaaatgctatttcacagcctccaaagctgttcatccagatgagtaaaccaataattgtatataaaagggtgagtgctgagaaaatactgtttcaaaagctaatccaataagcccgtccataattatctctaacatctagtgtcaactcaacaaatattccccaagtgcctaatacatgccaatcattgaatctaggaggcaataaaatgatcagagatccctgcccttgtgcttcacatcaaagacaaattattctctaagtaaaaaacaatgccagtcgaagtacatgaccctaggtgcattttttctaaaaaaagattatttgaacagagacagagagggagccactttttgctgtctcattttcatttatcaaaagtcctctaaaattaccaacatttcatttttcatttctttgattagtttgcttggtagtctgggtcacttatgaatttctatcagtccttaataatgtcaagccatatttagtttcatcaaaaaagggtgaccatttggtacaatgtaagagtaactgtaagctctatagtgcaaaagacaaaacatctgtttaaattctgttcaacattttaacttccctcattcactgtgccaggcatgaggaataaaatattatgcaaatccagagagattcctcttcccactgagctgacactgagatagacattaatcaatcaataagtaataatcaaataatacccaaaataaatgtaaaacagtaactgtgccaatacaatggaagagaatcacaaggtactgcagctctggaagtctctgacagcaattggaatgggcctggccttaaggaagtctgggaatgcttccctgaggactttagaaaatgaggcaggatctgaagaatgaacaggagaaaagagggaacagcagtctgtgccaaggccctctgacggaggggtaaaaggtaaaagcaggagcaaccagaagaaaatcaggccataatggagcgggagctgagaaatatatttaagaaggatgatgagaggcttttttaaagatgatgaaaagctatcaaagggactttaaaaagtagtaacagaacctgattggaattttgaggggattattcatttttttcttcccagtaactgatgtttggctagctgcaagaattgtcactttgggcacattttctgtaaccaaatgtatcttcggcctttatattcaaaagggcagtaaaccaaactgcctatattatatagatgttattttaactcctcactggataaggtctctctgaaattaaaggatggagtacagatagttggggaacaattaaaattcaaactttaataccaaagctaagctctggggctgcagaaattcactaccgggggtagaatgtccaggtgggagtttggactggtactagctcaacctcaagtaaattcctgaagggtttagaaaaatctgaaacagacgctgacatatgtgaaggccgggctacataaaacatggagatgatgaacttctcaaatggagcagaacaccacaaaatttggagaagacagggctatttcaaacacatttcccccaactgctggttgtactgctgctacccctcaatgagtagggattctatgaatcagaccagcttgacacatacgaccttaaatacaacaaacaaacccaacagatttgctatttcatactctgcctcatccaaatttcaatgtggccaagccccaaatcatggtttctaccaggtcaacagcacataaggcggcagcaaagcgcaatggctatgagccaaacggacctgtgttcatatcttggctttgtcattgactggtcagtgacattgaataagttcctgaaattctctatatttcacttaaaaacagggggaaacatgctgtattaaaatttgttgattttaggctactcaccaaaacaacatcctgctttagcggaaatcttcaggtattccctgtccctgtaagctggaaacaaaggtataagccatgtgacctaagcccggccatatgatgctctcaaaaaagtggcgtaaagactcagagtcggtgacagagcccccctgttgcagttgtggtggcaactgcaggctactagccccacacttttcctacggaagcaacgtggcactttcctctgcactcagcctccttggttcaagtctatttttctaatatgatcctcaaaatagcctcctcctccattctgtgaactacctgatgacctttcaatagattcctttttactcttaagttattaaaggtcagtttccatgtttttggagccaggaatcctggctattacaactgacttatattagatggtgcagggcaaacagagatgaagcattagcatggcatctgataggtaagtagtgatgatgggtagtaacactggaccctgaatgctaggaaagatctgaaaaaagaatttgggatctgaaaatagtcctgtccaagtgtcatgaaacagtaaggtaactagagcacctcaagccagtgttttgtttcagtgacaaagattaagaagacactggtacctactcaagcctgaggcaccacacagtaaatcatcatcaataaaatgttcctggtcccttcaacacctgcccaccacacccacctgagccctaacctgccagccaactctcctcatctgctaccaccacactgttccctaagcctgtggagaaaacattctacaaaactcaaattaactaaattaaaaatgaagttccagccaggcgcggtggcgcacgtctgtaatcccagcactttagaaggctgaggcaggtggatcacaaggtcagcagatcgagaccatcctggctaagatggtgaaaccctgtctctattaaaaatacaaaaaattagccgggcgtggtgctgggcacctgtagtcccagctacttgggaggctgaggcaggagaatggcgtgaacccgggaggcagagcttgcagtgagccgagatcgtgccactgcactccagcctgggcaacagagtgagactgcatctccgaaaaaaaaaaaaaaagtgaagttccttctctagatggaagcttctttcacttcttaaataataaattaaaattattctgataggctgggtgcagtggttcacatgtgtaatcctagcactttgggaggccaagacaggcggatcacttgagcacttgagctcaggagctcaagaccagcctgggcaacatagtgaaaccctatctccactgaaaaaaaaaattattctgataaatgaaactgttttcatgtggtagtactgattcaagggatccttggagctggccaaaggtatggaggaaaattatagcataaaaatactaactcttagatatttaaaaaaatctaatacatttttatataagaaggaaacaataaatggataggaaaaaagaccctctaagacaggaagggaccagagttaggctgtgcaattcccaaattctctaggggtaaaactactccttccccttctactagggatccttagccttctagacttttagactaaagatccctagcagagggagaaagcttccttgcaaagaacagcaacgacaaaggcctgatgagagctaatgttacagtaatattgagatcacaacttgggctggctatgtgaaggctgacaatctaaatgaaatcttaatctctctcagaggaaactgcagacacaacagtcattgatacctgtcagccccaaatcagccttgcagacataaaagtgcatgcatgaagtaaaaagataacagcatctttgatgcctcctgtcatgtcataaaccaaactaggtagtatatcaaatactgtagaaacaaactattagacttcttccatgtatgccagaagacccctgaaggattccatagaactgtggataactttgatctattcccccttaaggggcatttttattatgtaataactgacacatacgaaacaatacatataatatttacacaagatattagaaataataaaaaacacccttaaacattcctccaagtacatgaaacagaacataaccatcaccattaaacttcttgaggacaccaatctcaacggttttgctcttcctgggtatatacacataccagaaaataattttgcattatcttgtaaagttgaatttatctaccttgtaacctcacagttcttttccaaggactacactctagaaagaccattacagaaacttggaacagatgagttaaaaaatgttgtctgtaacaagaaggagtatgaaacaagtcaaatggataaattaacaatgataacttcatgtgaccagaacagtaccctctctcatgtgtaatgcaagctggtaacaggaacggggggaatgcacattcctgggtagactctgtgctgagctgcccagacaccccttcaggaatcaagggcacatccagcgtcacctggcagctgtcgctgagaattgccctgagatgaaaaaaggtgcctggcccagggtcatgggagacaggacctgcatctgaggatgtgtcaatgcctctctagctttctccaccgacctccggtcccagagctctgcaaggattcacagaggcctttgttgagatggcattgccgtccgttcctctctgcccaatcctgcttcctttccacctcctcctcacctccatacgactcagtctgttccccagggaatttcatacaggccggaaacttcacattatctcatttaatacgtatgacaaacactattagatagatattatcagtcccattttatacatggttttagaggaagtagttaacttgtctaaagcttttcagctaagacaggagcttggattcaatgttgaatctacttggatcctcaagactatgctctttcaattactctgtgtggcctgttttactaagcagcacgttgctcagcttgtgttaagatacattccgaggagcaaataaaagtgcatttcttttaaattattctttaattcagatattactaattgcattttccccagaattacaaaggtcttagtacattataataagtatcacagtcactcatcaagatatgatgagcttcctagcttgtgaatacaaataagaaatactccatttttactgcactagttctaagatatctgattctcataggataagggagcagtagtgtgcctcaaatcggaacatcattagagctggggaaaagtatagaatggtactgtccaatagaagtctataaaagccacataataacttaaaatttctagtaacctcattaaaatgtgtaaaaagaaaacaagtaaaattaactttaacgatgcatcttgtttgccccatatatccaaaatgttaccatttcaggccaggcacgttggctcatgtctataatcccagcactttgccactttgcggggacaacgtgggaggatcacttgagcccaggggtttgagaccagcctgggcaacatagtaagactctctttctattttatcaaatttaaaagaagttatttcaacatgtaatcaataaaaacaatgagatattttacattattttttctgcacgagtctttgaaatctggtgtgtattttacactcccagaatatctcaatttggactagccaggtattaactgctcgacagcgacatggggtgagtggcgacaatactgggtatcacaggcaagggggagagggtaggaaacaacgggctaagaatgagataagagaattgtcagtacttttaccatccactcctgactggccaacaaaagtacctgacaagtgataagactcaaaacattttctcttaaatatggagcccatctccttgacagtctatgtaaacaagagtgctctgcagaacattatagaaaagtgtttcttttatatacagtattaaggtctgaggtccatgattcactaaaacatttcgttgctatcagaagtcaacttgggaacattttatattctagaacattattgttacttaaagaaacaaaatgctttaaatggagttctaagaaaagaacatggcaccttctctcctcctttatcttaaaatccccagaaggtcccaaagctctgcctgtgattgcgtgaattacctctgggcaagtatctatcaatttttaggggtcctagattcctcatccaggaaatgtgagtgttggatgaaataacctctccagttccttctggcatcaacatttcgtcactacacagcacagtctgatcagcaaattgttttctgaaaagcaaacaaaaatccatttcatcgttgcatcacttttctctgagaaaaagtctgtacataatttatctattgtggaaagatgaataatggtccccccaaagatgtccatgtcctaactctcagatcacaagatttttatgatactctgtgaatattatatgtcaaaagagaatttgcagatgtgaataagttaacgaacttaaggagaagagattaccctgggttgtctcagtgggcacacaggatgtatttttgttttgttttttcagagacagggtctcactctgtagcccaggctcaagtgcagtggtgcgatcatagctcattgtaacctcgaactcctaggctcaactgagcctcctgcttcaatctttcaagtagctaggtctacaggcacatgccactatgcccacctagttttaacattttttaattttttaaaaaaatttttgtagagatgaggtctcattacgttgcccaggttggtctctaactcctgggctcaagtgatcctcctgccttggcctcccgaagtgctaagattataggtgcaagccatgatgctcagcctcacagcgttcttacaaaagaggttggaggttcagagtcagagaagacgggatgacagaagcagaagggaagaagaggtttgaaggtggagaaagggggtcatgaatcaaggaatagacagctcttagaagctggaaaagacaagcaaaaagattctcccctcgagcctccagaaggaatacagccctgccaacccattttggacttctgaccttcagacctatgagctaatatattgtgttaagacaacaagtttatggtaatttgatacagtagcaatagcaaacagatatacctataatcatacaagtaacatccaagatggtatatctatgtggcttctttgtcagaagtaggtgtattgatttccaactaatctatttaattaggattaaggagttctgtgttagcttttatatgcaggaacaataatatgtgagataagtttcaataaaaaagtactagctttttctagaaaatatgtagaaacactatcatttaaaattaacattaatgagagatagtaaatctgtattaatattaatcatctgaagacccaaagatgaaaccccactcaaccaggctcataaggaaatgaatgaaaaggttacctggtgtggcagagatgcctgtttgtccacctaaatcccttcttcctcccatggtacagggttgtttctgggaacatccagagactgcttctcagcatcccttgcaactagattcctgctaaggaatgtgagtgaaagctatgtgtgccacttccaggccaagctttttaagagccactactcattttacttttacaggccaaatacagaaaaattcataagtccccgaagatgatgatgccacaaaatggaaagaggctgctgtatttttgcaaaaagaagcaatctgttcaccaggaatatctagctttgacaaccatgtaaacaagaaacaaacttatactgtgttggagccagtcaacaatttgagatcatttactacagtaatgtagcctactcagatgaagacacctagtcacagtcaggcaagacgacccaacatttctttcttgagcttattttcaggttgataacaattcatagagtgtagtgaaaactggggacttatattgaatgagtttgactaaccttctactcacttgaccgaatactctatatgaaggatagtgcccttagaaaatatgtgctggaatgtctgtcatttctggtaaaaatttcaggtagcgtaaagactgctgggcaatacaggaaaaagaattcaaatgatataaaaataaattaattataaacttttggataggcatggtaggctatagaatggtgggtggtcacactgggagaatgagcagttttagttattaccagtatttaagccaaagttcattagggtttttcgcagtaacacacattgtacaaacaataatgagatccccacccaaaaaaaaaaaccacaaaaatcaagctgcagattccgctcctatattttcctttctttactaagcccattggcaactgattaactttttgaaattattctcaactataaattctaccccatcagcagttaatcaacaataaaattcctgggaaaaaattggtaatgtgaggcttcctcatttgcaaggacatttgaacagaatcttatttcagtcaaaccttattttcattttcctaggccaagaattagagaaacagaacctgaaattagcaaccatcttttgggactgttgtattaacattaaagataatatacaatataaaaaccaaacccagacaataatgcagcaactttccctgtttccctttaaaaacagacctcctaatcacttaattagatgtactttaaaaggtacataaagtccaagaatttatcatatcggtggccaaaaataagaatattttacagattcctattaatgagttatctatacattattagtaataggaaaaatgatgtactttctagagtacggttgtttcttaaggatcaagctcttaaagatataacatactgctgaaatagtgtgaacactcgtgagaggctatctcccatgcttaaacctttctgctccacttctaataacctgaaaacaatatttgagaaaatcaacaatgtgcttccggagctaagaataagcataagcacaacatggtctcttagcagacatactgggggaaaaccaggaacagaagccaagcctcgagacctctcaactcaaacaccaatgggtttcacaccatcacactgaagaccaatacgtagaatactgcaacttccttttttttcagtctttttctttcctttggttttttctttctttccttccgtctaggggtaagcaaacagtagagtagaaaggatgcaggactaagattcacaacatttgagtgaacctgacgcaatgccaccatcctgtgatacagccttggaagagtcactttacatctccagacctcagtttatatatctgtactgatgttataatctccaaggtctttggaaatttaaaactctataatttcataaaacaatattttgtgtatttatttattttgagacagggtgttactctgtcacccaggctggagtgcagtgttgtgatcatggctcactgtagcctcaacctcctggcttaagcaatcctctcaccccagcctcccaagtagctgagaccacaggtgtgtgccaagaagcctggctgattttttttttttttttctgtagagacaggatcactctatgttgtccaggttggtctcgaactcctgggcccaagtgatcttcctgccttaacttccccaaattctgagattacaggtgcaagtcactgtgactggccacatgaaacatttttatcttgtatactgtaagtaaaatagttttttttggtcacaagaaatgctgtgtctcttgagttggtataaataatttcaaacacaatacaagtctcattcagcttgctataaattttaaactcatatacagtaacctatttcaacaagcccctttatgaagcttacacaattgaaaacatactatgtatcaagaaaccttttatacagaatggaacaatcacatcgtttatcaatagggtaagctgaacatttatattgcagtccagttaaaccaaatgtgtatgtactagtctcatcatttaagtgaagtcttccattgttgaaggaaacaaaaaagtggcttcctagtagtgcagagtaagttccaagatgtttaaaggatatatacacgtgcctgtcaatgtgaactttctttaaatgcactgatttatgcagtaatatttggagtatgactttaagtgaatatttgctttaatatttaccaaatataagagctttacaactgcatagccatgagctttcctgagggagtaaaaatctacgtacaaagtagagatttatgaacactatttcatctcaggttttttcaaccgacaaaaaaacatgaaaatatcactggtgtgaaatactatgttcacaggaccatttacggctcttgggatttttgcctacaaattatgtgaaattacatgaaagagctgaaaacaaaaaagaagcaaaaacaaaacccctttaagagtgcattcgtttcagcattttacttcccaaggcagaatgttttcccaggaatcctgggagtgacttcagatactccgactgatatttacagctgccatgtatttacaccaataacttgtccatctgtagaggaaggctgaaataatcaatttgtaaccgacaggtctttctacatgtttaagatcatcttgaaatatattggaaatgtatctctcagatccacattctcccggatgacttcaaaacatcacctgattttggtgatggaggaaattttttggtgtgtgtttatgtacataggtaacctactttatgggttgttctaagagttatgagatggaaatcatgtaaaatgttagcacatctttggtagcacatctttaccttaattggtactgttttcccctttttgtattgtgaatcatagttgtacgtactttaggggtatgtgtgttcttttgacacatatacacaacaatgtgcaatgatcaagtcagggtaactgggatattcatcgccttaaacatttatctttggtttgtggtgggagcattacaatttttctcttctagctataggtactctttctttctttctttctttttttgagatggaatctcgctctgttgcccaggctggagtgcagtggtgtgatctcggttccctgcaagctccggctcccgggttcacaccattttcctgcctcagcctcccgagtagctgggactaccggtgcccgccatcacgcctggctaaatttttgcatttttagtagagacagggtttcaccatgttagccgggatggtctcgatctcctgacctcatgatccgcccgcctcagcctcccaaagtgctgggattacaggtgtgagccaccgcgcttggacagctataggtactctttataagaggcattttactgctttgtgtagtgcctgctatagccattttcatgttctcctaaaatgtctttctccatgtcttttctggtattatcttgatttttgtgtttttctgaggcaagaactgtgaaaaatcctaatgggaggaactctccttatttgagagtgtcgagagctgaaggaaatgtcttaactttttggttaaaaaaggaatacaagaaaaagaaggcaacaccaccagcagatgccactgcctcgtcacgagggcttttctccccaatgaattaatagtctacaaaggggcagaagtttccagtgcattctgcagctgtaaaacacactgaagccgctcagggaccaagatgcaaatgagcctgccactgatgaaccaatgtctcagcaagggccttcagagacttacacagagaggtccccttaaaggtatgaaaaggtgctcattaagcacttttaagacgtcgaaattgaaataactatccttcagttcttcattatcactaggtggttggactctgaggggatcaagcatttacttttcaaggaaaagtttaaaccaaactcataagcacacaaacctctagaaacgtaccattttgccagtgaaaataaatcacccagagaaaagagatcccatatagagaattcccttggacatgaaattctttgttaaagtaaataacatgcaactgacttccacagaagactggatgactgcagtacaatggatgctgttaatatttccgagaagatggtggctaacctttagttgtttattttttaaaataagtaaaataacatgaatatgttgctaatgagaatatataacactaagcctgaaaatattcattaagccatgaatagaaatggatacagctgaatctcaatgctatcattttcataatttgtcctgaagtatatttgacaatgaatttcacattaaccaaagtgcttttaaccctgaaactactgcagcatcactgatttggtcctaaaattgtggcattgattccaaaaagcagctgatccacgaaaaagggaaaaaaaagaaaaaaggaacttcctggcagataagatctttaaaaaagatgccaaaaagatgaaaaagcaagaaacaaagcaaagcatgatgtaccaaaatgctactttccaactgaaaacagatacatttctttcctctctttaaaacgctagtagttctttagaccatttggcaactaaagggtaagaaaaatgccatagcttcacacaaccctttactgaaataagaatgtgctttactctggacatttatttttcttactagactctaaatgaagaatctccctttactagaggaccagttctagcaagatgaacttacacaatggggaccttaaactccgtgtataaaggaaaataagagaacctttttttgtgagacagagtctctgtcgcacaggctggagtgcagttgtgtggtctcggctcactgaaacttctgtctcctgggttcaagtgattctcctgtctcaccctccccagtagctaggattacagggacgtgccaccacactcggctaatttttgtatttttagtagagacagggtttccccacgctggccaggctggctggtcttgaactcctgacctcgtgatctgcctgcctcagcctcacaaagtgttgggattacaggcgtgagccaccatgtctggccccaataagagaaccttattgtgagtttccatctcagttctgctaagttgctgagacacttcctatctagttctattgctttgttcttttcattctgccttcctacaacattcatgtctttgtccagcttatgattaaaaactgaaagtagaaaaataatatgttaaaagacaaaccagcaaaaatataagcagcatatacgacaaaggtaataataatgtttaaaaaaaataaaaaggttttggagatcaactaagaaaaagatgaatatctcaatttaaaaattggaaaaaataaatgggcaaccccaaaatgaagaaagcaagttttccataaacataagaaaaataaaaattaactagtaccaaaaatgcaaatcgagacaatgagtactaatttcatcagtcaaactggcccagaaatagtatggaacacccttcctagatgacaatttattgtattaataatacaaataaaaagcacaaaaacatctgcattcattctttgactcagtaattcttaaggaaatgaaaaaatgtttagttgaagcagttgttgaaaataacaaaaaatgaaaacaataacaatgtctaaaaatgagggactaggccaggcgtgatggctcatgcctgtaatcccagccctttgggaggccaagccgggtggactgctcaagctcagtagttcgagatcagccagggcaacatggcttaagacggtgcctatacaaaaaaatagaaaaattagctgggtgtggtgtcgtgtgcctgtagtcttagctacttgggaggctgaggtgggaggatgacttgagcttgggaggcagaggttacagtgagctgagaccgtgccactatacttcagcctaggtgacagagccagaccctgtctcaagcaaaaaaaaaaaaaaaaaaaaaaaaattcgttaaataacataaggcatataaaatgaaatctagtgtaaatattaaaattctgttgaaatacatattgatatgtaaagatctttttagtatattaataggtaaaaaagaagaccacacttaaatatgtgttcatctatatctatattaaaaaagtcttaaagaaagtgacataggctatgtctgggtaactattctttggggaggagttgagtatattctgcctttggaggggaatgagtattcgtgatcaagaaagtggaatgtggttgttgtattgctatatacaaacgtattttgtatgtggaaaaagaatatttgtgatcaagagtatcaaaaatactacttttcacaaatatctactgcatatcctactcccaaggtttcccaaggaaagcttcctactccattgatgttgaccacacccatgtaacttgctttggccagtggactatgaacaaatagggcccatgtcccattccagcagctttaaatgcactgtataggttggctcagcgtccagttcttcccttccaccacaggaagggcttgtcactgagcaactgttatttcaaaatggatctcccaacgagaagacgcttagagcagagctctgccacagccgttctgtagccaccaaaaagtaattgaaaagggaaatgaatacctgtttcaacccattaagattttagggttctttgttactcagaaaagctgtttagtaaatacacaatgcaatattgtgctgtaaattgtcattatggaagaattttttctcgttttgcttatttatatttcctaattgttctattataactatgtattacacaaacacacattggttaaaaaaaagaaaaccttaaaacaacaggataggtcaacaaactaaaaggaattgattctaacttgactgagtcatttcaatatccaaagaaataatcattgttcactatttgtcagccaaagaagattagcaaaaaagccatatagaagagcactggtggtgcccatccatgcacaatccaggggagaaaaagccttagctaatgggcttggatatatttttcatccagctggcaatcacctagcaaggagatggatatagaagctgcatctaatgaactgtgaggtttgtggacctttggcaaacacatcctcactggaaatggctacatcaagctgcctaagcttcatgacattaaacagtcaccacctctagcttcctttgtcctgatgccacaccagctaagcaaccttctgagtataccatattatatggtttcttagttacctattaggaaagaatgtcctggttaaaccagcttagacagcatttatttaaattaataaactggcatttaaatttaatttttataagggaatgagggaagaaataggcaaagattcttgactactaagtcaaattctcatttaggaaatcaggattttccatactgcattctatccaatgcaatcttgactacttctcatttgcaattccatgttcctattacgcttattcccattcagctgccactccacacatgtatacacatcatatactcactctctcgttgtgctgattttgcatattcttctctgcctgtccaaatcctacccatccttcaaaaacgcctcaaagctcaccctcttcccctttccagaaaacctacccgacaattcacaacagcagcactacccctttatactgctctgctcctgtgtcaagtctatgagacttttctagatgaatatcagctccttgaagttttctatacacagcccacagcaacaggtaagtagcagattctcaagaagtgttcatgaaattgatttctgactaaattaatccaacagcttcagggcagggcttatcctacttatcttggcagattggaggattgggatttacagttgacagccccacaacacacacacttgctactactgccaggcagttctgaatactttttaatcaatgatcttataaaaacaaaaagtgcaagactatgagatagatattatcatcactcccatgttccagatgagacagcaaagctcatatgactgataacactcttgaggtcagaagtggtacggctgggattcagggcccatgtttgttacctcctgccaattttagctcattataataaaataaggctcattagaaacatagtaagctaggaagaaattcttatacttcttccccgaagagtacagtctgagatggaaaagtttgggatgggaagtaagagacgcaaaaaggaaagcctgaatcaaacagacagatactgatgtcttccacagaagacaggtcacaatgactgcagtatgtggccaagtaggacatcaaagtttggggctagagctgaattgctcagggcaacagaggaaagattaggcaatgccacctacatttccttctctgctcttgtaccaggtaataaaccaccttgcttttaaagaaatgttggccaattatgtaaagaatatttattcacaatctcggcagaggtacccagtctgatcctggagacaggggagaaagggaaaacagacagaggaatcctgactaatttacagttttaatggggctcactttaaacctcagacttactctttcttccttctttacacatatggcaaagaggatataaggataaagacaacagaaaaaccttccttttctttcttaggatttagggatgagagtaacagtaattcctctacattgtatggaagggccaaataagagactgtggtaaagcacctagctcaatacaagggtgattaactgctctctctccactttccacctatgtgaatactgaatatagcacctcatggcagctctaggcctgggattgaaaaaaaaattagaaaattttttttttccacagaaaaatttctaactttcagtcttagcagtacctctgagtagagccatcacttataagttacagaccacacagctgtctctccgtgtttttccaaaagtttttactctaaccttctgtaacagacaacattttcgtcatgacccagtacataaaagatgcaaatatgcataataccctctattttctactgcattttaataaaagaaatgctagtcaagaaagaggtcaagatggcctactagaagcagctctcctctgtggctcccacccagaggaacaaaaacagtgagtgaatcctgcaccttcagctgagggatccggattatctcactgggactaatgaggtggttggcgtgacccatggagagcaagaaaaagcagggtagaacaatggccaacctgagagccacacggggtaagaggaactcccacctccagtcaagggaggtggagagtgatcatactaccccaccagggaaaccacgctttttccaagtatctatgcaacctgcggatcaggagatccccttgtgaacccacgctaccagggccttgggtcccatgcacagagctgtgcagactctcagcagctgctcgggttgtggacagcggtagcaggctggagactaagatgaccaagttcttggggaaaggggtggctgccatcactgtggctccaattggccgttttctcctgctgatgccagggagactgggcagtttagaccaggaggaattccccacagtgaagcacagcgactgtggcagatcatgggctgacttctttaggtgggacctgatccatccctcctcactgggcagggtctccccacatgaattccagcaactccagccagggatttaggataaaactcttgatccctgggatggagcccctgacgggaggggcggccactgtctctggttcagcagatttaatctctcccgcctgctggctctgaggagtctggtcagctcagaaaagtgggaatcccctcagcccactgcacctgttctgccaaggggcagccaggctgcttcttcaagagggtccctgatcctgtgccccctgactaggtgaaacctcccaacagaagtcatcagacacctcatacagcagagttctggctagcatcaggtcagtgtccctctaggacagagttcccagagaaacaaacaggcaaccatctttgctgttctgcagactcccctggtgatacctccaggtatgggaggtacccaggtgaatagggtgtggagtggaaccccagaaaccacagcagccctatggaagagggacctaactattaaaagaaaaacagaaagcaacaacaacaataacaaaaaagacaccacaaaaaccccagccaaaggccagcagcctcaaagatccaaggtaaataagctcacaaagattagaaagaatcaaagaaaaaacactgaaaattaaaaagaaatagggtgcctcttctcctccaaatgattgcaccacctctccagcaagggcacagaactggactgagcctgagacagatgaagtgatagaagtaagcttcacaaggtggtaataacaagctttgctgagctaaaggagtgggttctaacccaattcaaagcggctaaaaaccatgatgaaacactacaggacctgttaaccagaataacccgtttagagaggaacataaatgacctcatggagctgaaacacacaacacgagaacttcacaacgcaaccatgagtatcaatagccaaacagaccatgtggaggagagaatctcagaggtgaagactatgttgctgaagtaagacaggcagaaaagattagagggaaaaaaaatgagaaggaatgaacaaaaccttcgaaaactatgagattatgtaaaaagacaaaacctacgactgattggggtacctgaaagagacagggggaacagaaccaggttggaaaacatactccaagatgtcatccaggagaacttccccaacctagcaagacaggcaaatattcacattgaggaaacccagagaaccacagtaagatactccatgagaagaacaactctaagatacctaatcttcagcaaaggttgaaataaaagaaaaaatcttaaagggagccagggaaaaaggccaggtcacttacaaagggaagcccatgagactaacagtggacctctcagcagaaaccttacgagccagaagagattgggggccaatattcaatttttttttttgagatggagtctctctctgtcgccaaggctggagtgcagtggcgtgatttaggctcactgcaacgtccaactcccaggttcaagtgattcttctgcctcagcttcctgagtagctgggattacaggtgcctgccaccacacctagctaatttttgtatttttagtagagattgggtttcaccatattggaccaggctggtcttgaactcctggcctcaggtgatctgcccaactcggcctcccaaagttctgggattacaggcatgagccactgcgcctggtctcaacattcttaaaaaaaagaatttccgacctagaatttaatatctggccaaactaagctttgtgagtgaaggggaaataaaatctttttcagacaagcaaatgatgacagaattcatcaccaccagacctgccttgcaagaactcctgtaagaagcactgaatatggaaagggaaaatggttaccagccactacaaaaacatactgaagtacacagaccaataacactatgaagcaactacattaacaagtctgtaaaataaccagccagcatcatgatgacaggatcaaattcacacataacaatatgaaccttaaatgtaaatgggctaaatgcctcaattaaaagacacagaatggaaagctggagaaagagtcaaaacccattgctgtgctgtcttcaagagacccatctcacacgcaaagacacaataggctcaaaataaatggagggaggaaaagcacatggaaaacagaaaacagcaggggtcacaatcatagttttgacaaaacagactttaaatgaacaaagataaaaaaatacaaagaagtgcctcacataacggtaaaggatgcaattcaacacgaagagctaactatcccaaatacatatgcacctaatacaggagcatccagattcataaagcaagttcttaacagacctacaaagagacttagactcccacacaatgataatgggagatgttaacaccccattgacaatatcagacagatcgtcaagagagaaaattaacaaagatactcagaacctgaaatcagctctggatcaagcagacctgacaggtatctacagaaccttccaccccgaaacaacagaatacacattctttttatcaccacatggtacttactctaaaattgatcacataattggaagtaaaacactcctcagcaaatgcaaaataactgaaatcataatagtctctcggaccacagagtgatccaatcagaaatcaagattaagaaacccatataaaaccacacaactacatggaaattgaacaacctgcttctgaatgactcctgagtaaataatgaaattaaggcagaaattacgaagttctctgaaactaatgagaacaaagacaatgtaccagaatctctgggacacagctaaagcaatgttaagagggacatttacagtactaaatgcccacagcaaaaagctacaaagacctcacatcaacaacctaacatcacaactaaaagaactagagaaccaagagcaaacaaacctcaaagcccgcagaagacaagatatgactaaaatcagcgcagaactgaaggagatagggacatgaaaaatccttccaaaaaaaaaaaatcaatgaatcccagagctggttttttgaaaaaattaatagatgaaccactagctagaacaataaagaagaaaaaataattgaatacacacaataaaaatgataaaggggtatcatccctgaccccacagaaatataaacaaccatcagagaataccataaacacctgtatgcaaataaactagaaaatctagaagaaatggatatattcctagacacatacacacatacaccttcccaagactgaatcaggaagtggttgaatccctgaacagaccaatattgagttctgatattgaggcagtaataaatagcctcccaaccaaacaaacaaaaaagcccaggaccagatgcattacagctgaattctaccacaggtacaaacaggagctagtaccatttcatgcgaaactattccaaaaaattgaaaaggaagaactcctcccttactcgcgttatgaggccagcatcatcctgatatcaaaacctggcagagatataacaaaaaaaagaaaacttcaaaccaacatacgtggtgaacaccagtgcaaaaatcctcaataaatgctggcaaactgcatcccgaagcacattgaaaaacttatccaccatgatgaagttggcttcatccctggaatgcaaggcgggttcaacatatgcaaatcagttaatgtaattcatcacatacacagaactccagacaaaaaccacgggattatctcgatagataccaaaaagacctttgataaaattcaatatcccttcatgttaaaaattctgaataaactaggtattgaaggaacgtacctcaaaacaataaaagccattcatgacaaacccacagccagtatcatactgaatgggcaaaagcaggaagcacaccccttgaaaaccggcacaagacaaggatgccctctttcaccactcgtattcaacacagtattagacattctggccaaggaaatcaggcaagagaaagaaataaagggtattcaaataggaagagaagtcaaattgtctttgtttgcagatgatataaacctatatctagaaaacaccattatctcagctgaaaagcttctttacctgataagtcacttcagcaatgtctcaggatacaaaatcaatgtgcaaaaatgataagcattcctatacaccaacaacagacaagcagagagccaaatcatgaatgaactcccattcacaattgctacaaagagaataaaatacctaggaatatggcaaacaagggaagtgaacgacctcttcaaggagaacgacaaacctctgcccaaggaaatcagatgatgcaaacaaatgaaaaaacgttctatgctcatggatagtaaggatcagtatcatgaaaacggccatactgcccaaaataatttatacattcaatgttattccaatcaaactaccattggcattcttcacagaattagaaaacatcattttaaaattcatatggaaccgaaaaagagtctgtacagccaagacaatcctaagcaaaaagaacaaacctggagaaatcccactacctgaattcaaactatactacaagtctacagtaaccaaaacagtatggtactggtacaaaaaacagacacatagaccaatggaacagaaagagaactcagaaataagactacacatttacaaccatctgatcgtcaacaaacctgacaaaagcaggcaatggggaaatgattccctatttaataaatagtgttgtgaaaactggctagccatatgcataaaattgaaactgtaccccttccttataccttatacaaaaattaactcaagatggattaaagacttaaatgtaaaacccaaaactggaaaaactagaagaaaatctaggcaataccattcaggacatacgcatgggcaaagattttatgatgaaaatgtcaaaagcaactgcaacaaaagtaaaaattgacaaatgaaatctaattaaactaaagagcttcttcacagcaaaagaaactatcatcacagcaaacattcaacccacagaatgggaaaaaatgtttgaaacatccgtttgacaaaggtctgatatccagagactacaaggaacttaaatttacaagaaaaaaaaaaaaaaccaaacaaccccatcaaaaagcaggcaaaggacatgaacagatacttctcaaaagtcatacgtgcagccaagaaacttatgaaaaaaaccctcaatatcgctagtcattagagaaatgcaaatcaaaaccacaatgagataccatttcacaccagtcagaatggtgattattgcaaagtcaagaaacaacagatgctggtgaggctttggaaaaacagcaacgcttttacgctgctggtaggaatgtaagttggttcaaccattgtagaagacagtgtggcaattcctcaaagacctagaaccagaaatacaatttaatctagcaatcccattactgggtatatacccaaaggaatataaattattctgttataaagacacatgcacgtgtatgttcactggagtgctattcacaatatcaaagacatggaatcaacccaaatgtccatcagtgatagactgcatacagaaaacgtggcacatatacaccatagaatactatgcagccataaaaaggaatgagatcatttcttttgcagggacatggatagatctggaagccatcatcctcagcaaactaatgcaggaaaagaaaaccaaacactgcatgttctcactcataagtgggagatgaacaaggagaacccgtggacacagggagggaaacaacacacactgggccttgtagggggtgggaagacggagaacatcaggaaaaatagctaatgcaggctgggcttaatacttaggtgatgggttgataggtgcagctaaccaccatggcacacgtttacccatgtaacaaacctgcacatcctgcacatgtaaaattaaaagaaaaaaacatgctagtcacaaaccactaaattaacataatgacccattaataggttacaatctacactttgaaaagcattgacctagattaagcagatctaagaaacatattattaatgtatccatgtatgtaattcaacactttcaggaaagccaatattttgctattccttgaattatcctcattcaaattattaaagagtaagtgctctacaaactctaacttaatgacttataaactgacagaaattttaaaatggaatgtttttcctacagactagaaggctttagattttgtctctggagctaaataaaacataatttttaaaaaagcaaaatcgcttggaagtgtttcccaaacacaggcatcaatgctctacctcagttgttataatctatggcaggcatagcaacagggctctgctgctctagaacccatggcaaacaccacttactaataatactgctcatttcttgaaccccattgcaatctgcaatttcttcttactccaaccctccaggcagctaccaaaaaactgtagcaaataagtacatccaacgcatatttactgagtccctactatgtgacaggcattgttctaggtagagacagacacagcagtaaaaatgcaaagcatctaacttcatagaacatagatttgagtgagggagctggctaacaaaggaataagcaaatacattggttgcttcaggttgctctgggtgctttaacgaacaaaagtagggtaagaggacagagcataacggcaggagtgggtgagtgctatttcaaagaggatggccatggcccaattgttggtcaggccatgagtgcagagaacaaaatctagttagctagcttaaaacatgatttatcaggtattaaacagttgattgctggaaaggtcaaagaaaaacttcaaggctgaatgtctacgaaacacgcccacatccatacttaccactcatggtccacactcaccttacacacctcatatggtgtgtctgacggtggcatcaaaccacaaccagaacctgagcagcaagaggagagggaaatatagtttttacctttccgggctctgcagtggaataaatggaaaaatgcctctatgaaaacacaacattcttgcaggcccctgattaatgaggagccaatgaaaggaagtgttccaggtgggtgaaacaaaaggctgagagtgggaatgagcttggtgtattcacacagcagcaagatggccagggtggctgaagcttgggcagtgggagaggaaataatgagagatgaggcagggagggtattcaagacccagttcaagtaagtcttgcaagctttgataaggagtctaaatgtattttcctaagtgtagaaggatgttataggatgaggattttaagcagaggaataacatgttctgaataacctttcttaatagaccattgtagttctataaactgttctccatgcttgatttacatcaatagcttaaaaatgtacaattttaaagtgacttcatttgatcttctatggagtaactttttcaattaaaaaaggcctaaaaggtaatatttctcaatctataactccctcacggatacagcacatgtgtgagcatgatcatctctaccttctctaagaccaagaggagtagccaaaggtagcaggcccaagcctggacacccacctcttgccaggctccaggaagatgtggttaatcaagggtaagtttttttctaaaaaacaaaactcagacctctggacttaaaatcctgagattcttcctagttagaaacaaaaacgaaattagcttccagcactaaaatcaacctattttaaacagtcttaaaggtttttttgttcccgtctccaatatgcaacctaaagccaaaacatttcaaactcaaacaagagaatgaaataaaaataaaattaaccaaattacgtttattttaatttttttttcaaaaagtaaccattttatactaacatccatttgcaacgggccactttcttaaggagcagaaccacttaaaagaaaaggtcaatttaaaaattgttccagaatgggagtgaggagttcttgctataagtacatgcctagtttagcaactattatgcttctgccaggagcatttattactgttatgaggtcacccattataaatgtggtctgaatgttctaatttgcttttctttatacaatgttaatgttgcaagcttttgagccaaaacatattttgctccagttaaaaaaaaaccaaccatgaagcaaaattgcagaaagggaatcaattttaaacaaatttgttatattatatattttatatgtttgtatgttaaatttaatttcttttactttctccaaagcagccacaatactggctttgatgaagggtcacactataaccacttgagtcaactcctgactttttgactcagttagaaagataaaaaagcaaaacaaaatattccctttgccttctctccatacagcctgccttgtaattcttttcacacataaatctgaactattcattttctttgtatttcataaacttttgcctgctctagctcccttacgaacattaaattctctgcggtgagacttggtaaatagaacacaaaaaatgctccataggattagactaaatgctgaagctggctcagtgggactggtgatggccagcttccaagacggcacccagcggcctgcctctgggactcatgtgcttgtgtattgcctcccacttctgtccaagggtttaacagtctttcttcaagcacattcggcagaaatggaattagtttcaccctgccctagtgagcccttgaagctctgactgtatcttacctcctggagcagctgccacacccctaccctgtcgccatttcctaaaacaacaccctcaacaaggttaccttgtatgtaatagtcttctaccctcacaatcttttattttattaattcctctattcatctacattcatctagaatcacagcaatatttacctattttcccatgttatccattacatgctcaaattaactttacttttccccatagggaattataaaagaagatttgtagctttagcatattattatgtgtgtgctttggtttgtttgttcttgcagtgaagtaggcagagacagggattacaaagaggttagatcatttagcttcatagacagatatacaggactagaagggaatattcaaacacagttatctcagctttgggaatactgatgcatttttaaaactttacagatttgctaaaacaaatgtttaatacattttataatcagaagaatattaacaaaaagtatcacatgtattcatgtattagctgtgcttttgaacatagcactctcctaagacccgaaatgtcatataatctgaagaaaaccgctaaaaacctttaggagatgacatatggtacaagaaaaacaggaaatgatgacagaagagagtaggaggtcaaggaaattttataatttagagacattaataatgagtttgaaagtcgtttggtgcaaaaaaaccccacctaaactaaaatgggaaaatcaggttttacaaaaaggaggcaatggggagagcagagttcagcacaaaagccaagacaacattcaaaaaaagacatcacagaccttcagtctccacttgactgctacaattatctgtggagctgtcaaccagctgatgtagagatcttgtgggaataaagcattaaagaatgtaagtgataacagagttatcctagatcaggagaatgaggctaaaaggaaaaagctaagacagagatcgaaaattaggtggctgtgacttcggatagtcccgcagcctgcttcagaagcgctctgctctgtttggccaataaacgagtgtctagaaggcaccctggaagatgggtatgagtggacgccactgagattgtcaaagtgaaaagtttcctgggtacaatacacagagttcctctaaacaagactgcattctgaccttgactttttaactgaaattttaaaaatctgaaactgagtttatggcttgtacaaactactaaatccagacttttgctttattccatgttttagagaactccagagaaaaagaattttctcaagccacatacacaaccctggcagaagcaaaagacaggtcaaggacattatctttattatgtgctactagtcatactgctttaaaacaatattcatatttgtataaaactgtatcaaaacagatactatagaatctcacttgaacaagactttaaaaatcatttactccaaatactcatttactcgtttagctgagccccttgttcaacatcctaattgcacaactattcttgaacatttgcaggtcaaggaacccactatttcccgagatagtatgatctattcatggacacctccaactttgagaaagcctgacttgtttattctagtttattttatttttaatcttcaagttacctaaatctattctttagagctggtttcattttaaccagaaagctctgtaggaatatagcatatatctagatagcaaaactctgtatattttgctttgtcaaagattttttagacaatagttcttttgtatatcaggctctataaacacgaaggattaaagaataccaaccaggcctcttctgttcatagcgatatatgcatcatatttctcatatcgaaacccaaaaaggtaaagatacgtaagttttcttgcccttaatgccctaaaatgtaaaatagaattccatgggcagttatgactgccccattctgacccaactcattagggactactgccatttccaatgtatgggaaactcatatatgtagagaaaatctgcagatattcccttgcaagcagagaagttggaaaacaaaaacaaaaaaacaaaaaaccctcaaagctcctgctttgaatccaaaaacataaccatattttattaaaatggtcattaaagtaccaggcacattccaatcattcctggcaacatgaaccaccagatgtttactggattacacattttaccacaattggattctctgagcctcttaaggtgactctttggattgacaacacattttaataaaatatctaggaaaagggtataattttattaagtcaaggatgagcaatctaagaaaccagagttaaaaacaacaacaaaagcaaacctctatccatatcctcagactacctggaattatatgtgtttacagcaattaacaattggcaagaattagaagatcttgagtgggacataaatacaaaatacatgcaaaatgaccaaaaagtgaaatgaaaattgattcttacagaagtacatactgaatgtgccagtaaaattaaaagaaaaatccagtgtttagtacaaacccatcctccctgcctggccacccccacagtgctctgcagatggcatacaataccagtcacaggagcgccgatgcatttgctcagtgcgttttaaacacacacataattacaacaatccaagtcttcaggaaaataaaatgaggttaaagggtcacattccaaagcagtgatttattatttgtagtgatgccttaaaggttttattttttcctatttgatatcactctctcccaaaccccaggatctgagggcaaaaacaagcctctatttaaaaaagacaagatgaagaaaaaaattcatactgaggagaaaggttcatctgtcaatgtgaacaaggagtttacatcactagcattctactggttttcttggggaaagaagtctctgcagaaaagcccacaatccacatcccactcggagcaaaggcccttctcacccgaagagccctagtgattcatgtcatcgccatctgtcccaccggacacccctgaaaactcacttctggctagcaaaacaaggtgtgtgcaatttctgatactgttttatcaatcactgatttctctttaaggattatttcattaaaaaaaaaaaacctgccaatgttccaatacaggctccaaaggggtggggaaggcacccaggggtgctatgtaagactcattttgagacatgcctacaaatgtctatcagaatgaactaactgtatcccaagtaactaggaccaagtgcttgagccacccaagaccaggaactgctgtatttatccttttgtttttccttgaagttctatagcatagctgggaccattaaagccttagaagttaaaaagattgacgtttattgagacaataatgcaatgtctcattttatacatgaggaaggtgatattgtataaggttaggtgacatgctcaaggccatgaagctgtgtaacaacaagaccagagatgggcctgggtctttggactcctgttccaggaaccatactgcataaaccgatgatcattctggaatatgtgtcctattaacacagggcaagagggaggcatttgctagtgtaactgtttactaaatcgttccctaaagactgatcacacttctttacccaataaaatccagccagtaaagaatcatagtaagtatttatttaatgtgttgatgttcaaaatgtgttgcattaaaagtgagctttttaaaaggcctacgagacacccaatggctgcacacatattgttcccactgaagggacaaccatttttaagtaggtcacacatagtaatgccacgtaatttaaagtgtgatgactaacaacacatttgaaagcggaagccaatttattgttacaatttctaaactggtgcagacatacagactatgattgttgagccttgtttttaacagtaaaaattgaatttcaactcccctttctcccagctgcggtattgaacttaaaagtctactagatcggtgggtggacgatcaaagaacatttaaaacattttaactttactacccacaaggaggtgggagtaatatgtcagtgggactaaaatgtatgtgacagagtcttaagagattccctaactagacaagaagctggttgttcccttttttaaagcagcagcactcacccttacctttgctcagtctactttttagagctggcaaatagaataaaagagttaaatcagaatctaaaaatatccatgttcttatatgttctgtttccagtgcagttgaaaacactaatcacagttgataatctgagatttctcttatctagatggccttgtaaaaggtttcccttcaagtgagtaatacgtaatccacactaagaataaacttaatctttaaaaaatggaaaacattaattctttctctccatttcctcccccttcatttccacctgaaggaagtacagatgtgaataaatgtatctaaatataatcattagagaaagatgtcaatctcatttccaaaagactgaaaccaagtaggaggagaaagaagaagcaataatggatgagggagaaaagcatactgacctcttcggcctgggatgccctgaggctgcctctgaccagcgcccccttccatctgcctaaatctcatctatctatagagcccattcaaattctatcactcccaaggagcattactggagtacaatatgccctccaaactctaattttctgaactatttcagcacccgttatgcgaaccccacaatgagcaacaattatagaatgccgtatgtcccttgctagctgttttacatgttatcagttttgtttccctatttaaaccattaagatgaagaacatgcaacataactcatacttttaaaatgttttccataatactggcatgcaaatggacaaacaggtgcttgagaaaaacaaagaaacaaacgaacaaacaaaccatgctccgttgaattgacacagcaaaactcatgcctcttaagagtgacccacagtatttcctccgtgggcagtgcatgaacccaggagcacatgaaggacatgtggctgcagatgacacgtgtgttctagcttgtttgaaaagcccaggtgtaacgatcaatattactgttattgttactctctgcatagaaagctaagtgccataagtaatacttaggaatgagctgtcatgcaaactctgcaaatgcctttgtgcatatatggatttaatttttctttcatttttgcattcatcatccagtgcactttctcattttatagaaagtcattaaaaagatcttcagtagctattttaatataatctaagttagttccttaggcgtttctctactgaagatcaattaaatgcttagcacagagcgacatcctgaaagaaatacaaaaagacatatgacagagttccctttctattttgaggtgggggaaaaaaaccctgttccttctgtatctccagtaccatctctcccgaggccttccatacactaatggttcaaagaatatgtcagtggcactgcactgtttacagattaatgacactggtaagtataaacatagcaaagtacggtagcctttttaaaataaactatcatatgaaagccaagtacataaaaataaatacattttaagaacacatttttaattctgacttaaatttctagaagatttgattttccctgacagtgtcactgaaaaatcatttattgattttaaatctctcatgtttcctgaggcagaaattaatttaatgtgattggcaacttccgtttccatacacaatggaatacctaaggaagcttccagtagtcacagcagtgaaacactatcacagccatatgaactcaagtaaagatctgtaaacttacatgtctacagttatacagaaaattattcttttgagggttaatgataatagacataagaagaatgaaaatactaaaaagaagatgaaaatatgagcctagggtttggattctttataagcaggtaggggtggaagaatcatgtggattagagatctcagcatcaggacgagtagaggggtaatgcctgtcaccaaggctattacagcggtctataaatggaagaagaaaaatgaggcaaaatcatattgggcaaaacaaatagcagtaatattaaagccagaaatctccttagagttcttactgttgggccaggtgtggtggctcatgcttgtaatcccagcattttggtaggtcagggcaggagcatctcttgtggccaggagttcaaagccagcctgggcaacatagcgagacccccatctcaacagaaaataaaacatgagctgtgtggtggtgtgaacctgtaatcccagctacttgagaagaagctgaggcaggaggatcacttgagcccagagtctgaggctgcagtgagctatgatcactccattgtactccagcctgggtgacagagtgagaccctgtctctaaaaaaaataaataaaaataaaaataaaaataaaataattctttctgctggtggggacctggcgggggaagtgtagagagttaatgtgggcacgtaattcctcatttgagaaagatacatgggcttaacaaatgattcaagaacaaataagcttattaataaatggaaaaataaatgaaggcatgaataaaagcagcaaggaaataacatataactaactaacagtctgcgtccctggatataaggagaaatatgtggtcaaagaacaatcgtaacaactagatgggaacaatgggagatgtggaatgggcaggtgggcttaggcaaaattagtggctcagaaaagaaagaaaaagaaaagtcatgtaaaaggattttaaaagacaaagtgaacagaattctaccatgttgggaatcattgagcaaatctaatttccttgttcttttctaccaaataaacttccattaaagttttcagtgcagcaaacaggttctacgtattggctccccatcatatttcctatgtaacccatgcctggagtaagcctctactccaatccacccaaattctatccatcctttaggtctaacgcgacgcaagccccccaagaactcttttattttttaggaaacttagaaaatagtaatctttctcttttcctgcagtcagcttttggaagaggggctacaaacagacaagggacagaaatatcaaaaggagaaaatataagtaggatcagatcttcaaagaactgaatattatagatttccttggttggggtcagaagaaagatgaaaaacaaagtattccaatcccactttgtcctaaaggggagaaatccattatacttccttcaagcgggctagcttttgatttctggaaccactggggacaatgggcttggcattcttttctatcaccctcccacctcatgttccactttcccctcttttgagagacggggacatctaaaatggagtcagtacatgtcccaaagtaaaggacagccagggacaggaagaagaagacccactgaaaggaacttttatttttcctttttgttttattattatttttaatgaattcctccagcactaaacctgtaagatgaacagatatcatctcctaggttattggccaagaacacactgcctcaataccaaataagatataatgcagagactctaggcaactcccgaagaaacaagttataaaagagaggggaagcaaaattagtggcaccaatggcaatgacgcaaagaaaaagaaaaaggaaagaaatgccaagctgtagccaggcaatgcaatgtaaaaccattgcttcatgtcccgcccacttccacacccactgagagtgctgttcttggggactagaaaacagcttgaggtaacaacagaagaatcaatgccaagccatacttatctctcagccaagacactaacctcacagttcatggacgttattgaaagacagaagacaaacacaagaggagaagatgaatgtggttctctcctgccttgtccaccacttccctaaacccagaaaggcactcctgtgccaaatctgtttaaaaatcatatgaatcactggcctctgtttcttttatgcatttattgtagaccagcctacactgacatcgatgagctagtgagatattgccaagtaataagcagccagagacattaagttactgaactttaatgaaataacagcttagaatttaaagacaaagaaatgtcttttatcgtcttccacatacagaaaaggaacatagctgcttaaaagatccactgtaattccccaatattctcttgtatccttattttaatatcaactgctgtatagctgattataatcattacgttattatatcaaaccctaaatatagaggtttaaataaactacaggattatctgctacctagaactaggcccaaatctccatccattcccatgactttaattcatgctcatggcgaaagatttccaaacaattctatcttctcatctcagagtctattagaacatgaactcgatgtctgttctgttgcatctttataacccctagaacatgcttaataggtatcaactgaatgaacctaggtctaatgaaatctcagattcagcttatgcaaaataccttcattccaactaaaccaaaactactatcttaatgttccaaccacgcttcggggctctaactttagatagtcttaactcatccctgtcctttatttccactatccagacagtccaccatctaggaaattttctttagaaaataaattgctaggctgggtgcggtggctcatgcctgtaatcccagcacttgcactttgggaggcagaggcaggaggatcacctgaagtcaggagttctagaccagcctggtcaacatgacaaaaccccatctctactaaaaatataaaaatcgtccaggcaggccaggcgcagtggctcacgcctgtaatcccagaactttgggaggccgaagtgggtgaaccatgaggacaggtattcaagaccagcttggccaacatggtgaagccccatctctactaaaaatacaaaaaactacctgggcatggtggtgggcacctgtaatcccagctactctagaagctgaggcaggagaatcgattgaacctgggaggcggaggttgcagtgagccgagatcgcactactgcactccagcccaggaaaccgcaagactgtgtctcaaaaaaaaaaaaaaaaaaaaaaaaatgagccaggcatggtggtggacacctgtaatcgcagctacttgggaagctgaggcagggagaactccttgagcctgggaggtggaggctgcagtaagccacgattgtgccactgcactgcagcctgggtaacagagcaagattccatctcaatcgatcaatcaatcaatagctaaattaaaaaaaaatccaaacacacacacacacacacacacacacacacacgcacgcacacacacacccctcttattcatctttacctctctgccacaaccctcccctactacactattccaggctggctatcattacccatattttggcagtcctgtctaagctggactttttactttcagtgtctgcataccagttacagacgaaaagtctcttttgctcagaagttatttatacttccctattacccacctactctcccaagtaaaattatgctcttaaggaaaaccattcaaagtccaagtttgtaacatatcccacccatcgagttggcctcctcattgccctactagtctactaagctactttctagacttatatttaacccatttttatccatttagtctattagaacacatattccatgagggcagggatttttcactgttatatcttcaccacctagatcaatgcctgaagactggacccttaaatatttgctgaatgaatgaatgattttatgaaaaacagaaaaaaaaaagcggagaaagggaagtagaagagagagtgttaaacttcacaaaggagtttatcattataggttcaggtcaagtcccactttcactcatcacttcagccttcactgatttctctcttctctgattttccatggaatttctgcaccgtacaattgagcactgaaatactcattgcaagaattcaatgaaaagttgagaacctcctatccaccaaactctgcacagcacagacatggtttatgccttctccaaacttatagtctcatagaaacattcaacaaagtcaattaaaaaccagctaccacaggtgcacatagaaagaacacttagactttgatgacagggaaggcttctcagaggaagggacagctaacggaagacttgaagggtgagtatgagttacccagacaaaaaggagggaggagtgtttcaggcagaggaaacagcatggatggagacttagaggcaagacagagtgtttaggaaaagtgtttgggaattgaaggaagttcagtggttctggagtacatgggcagcaaagagccaaagctgctggggtgggcaaggaccagactttcaagggccaagcagtcaccttgagttacgctgcgtgagctaaaaatgtgagttatgtgaagtcatgcataagttaattagctcgatttagccattccaaaatgtatacagatttcaaaacatgttgtacatgacaaatataacctttatatgtcaattttgaaaaatataaaacttttgaaaaaaaagctatgaaaatgaatatgaaagggaagctgggaaggggaaggggacagagagggtggacgcctcacatgtcagttctgcttctcagttattctggaagatttcttttaagaaaagcagagatctggtttcaggctttctctgtatctcaaaatgtctgttcaaaaaatgtggaattcacaagaaaacctgttgatttgaaaactttgattcttcctgcacctttcccacccaaagaaaaagaacagctgtaaaatttaacaactaacagagactaataagcaatttttaacgctagagacttcatcaactataagaaccttatgtccctttcaattttcttcccctttgagactctgaactagtcagtagagatttctgaaccacacgtcccccacaatccacaaacctataaattttcataattatgcattctgtaaaagcttaagcaatgagctaaggaaacagctctaagtggttctgatttcaatttctctgttgcatcagattaactgactcctttaacccacagcagtgtctaacattagtccatactcaataccaagttcaagtcaaatgtgggaccttgtgtaaggttcttacccaaaattatttcaagatgaagagggctgtatctagacttatgcagttctcctaagaacatgccaccacattaaataaaagtagcatgcaacaaccataaaacgaataaacaaaagtcaaagctcctaagacaaaaaagggtacagtgcaggttcctatgtaaggtatagattttaactggataatttttagtaattgtatatcaagaaaagatacccaacatctgtctcatgtattaccttcaaaaactcttctttctctaaatagcttgcactctctctgggccatgaatgaaatgaggccactgtgagaaattacaaatgccattctggaggaaaatccttcacatccctatcttgagcctactacacaggagaaggaaataaatcctcatgctaaaccttccactgaggaaattactaattcaatttctcttaccaacgttgctacaatgcactaaacatttctacccagtaaaaactcttatttatcacattcatttatttccattttaattagaatagcaaagcctacattccataaagactggaaaaggaagaaagcatcataaagcaaaaaaagcttcctcatttttgaaacaggaatatcatacgggatactagctactgactttcaaaaataagaaatatgctcaagtattgcctctttctaatgacaagtaatatgctgtgtttttcccaaggcaccacttcttttgagatattttgactatgaaatgtttccgtgggacagctctaaaaaatctgcatttattccacaatcacacaacaataaaatgaggacctgaccttctaggtatgaaggtaccacagcacaatcatcaacactgctaccaaatctcatctgctaatatgtaaaatgtctccttctccagctgacaagcggtaagtattctccaatataaacaaacatatacaccccacgttataactaaaacattatctagctttgacttgtcattgtggaggaaatacaaaaaccctttatatataaatattaatgagatgaccatgccttatagttgaactagcaatctgatctttaacgaagttgacccttagtacctctgaggaaagataaagaaaagatacactatatccattgttacattcactggcctttcatccatccactcaaaaagtatttattgatcactttctatgtgccagatactgtacgctatacactgtttacacatatttttggcttctatcccttaaaataccagtagcagctaattgcctcagctgtaacaaccaaatagatctccaaacattgccagatgtcctttgggaagccttgtcttagagtttaagattctgtgggcactgtttttcagaaatttaagatataactgaaagacaagatgtgtgtacttaaaatatatgaaaacactgaacaaataaatagccgataataacattttagagttggcaagatggctaccaaaaaaaaaatcacatgtacctagctaaggtcgaaagtaatgtttatttttaaataaaactttaaaaagataatttctttctaaaagtcattccaatctgtcctctctagaaaattcacccctttacctcccccacaaaataaacactcttcaccagcctggccaacatggtaaaaccctgtctctaataaaaatacaaaaattagctggacgtgggggcgggcagctgaaatcccagctactcgggagcctgaggcaggagaatcgcttgaacccgggaagcggaggttgcagtgagcagagattgcaccactgcactcttgcctgggtgacaagagtgaaactctgtctcaaaaacaaaaaacaaaaaaccttcttcatcacatagcaaaacatttattctgactatggactaatgcactcatggagtcagtgttaaaaaataaagaccagaaggatggaaacagcaaacaaatcatgaaagtgacattggaagattctgccaattaagaaaggcaacttagattctctatacccttcctcttttatctatttgatacttaaaatttactgccctgtatcaaacatgatctcagtaattcttttttaatcaactgtttaggacagcttgaggaaaggaattgctaggcagaaagacaacaggagaaacaataaatcttttaagtacaaaaaactgacaacgaaatgagaaaaatactaccttgtgtgctcaaaggaaattgcttatagaaactgaaaccaggactcagaacagtcatgtgttctactcaggaaattaaaagttgtacttttaaaaagggtttcagatccttccagaaaatctaaaataaaactaggtaactaccttccaggttttcctgggaacacttgccatttgaacagaaaatacacattgcaaactctccttggagtgtctgggtctttgcttttaaataaaaatgtttaccctagatccttctgctttgttttctgcccatcagtgagtaggatgcacagctatttgaggagtctgagaggtcactatggtttaatgggtagcaggaaatattctttagggaaaataagtcatcttttttccactgtttttcttttgagagagacaagtaattttctgtctctcatatacaactagaagaaaatggtatcactgtgcccctcagagaaatgtccccctaggagcatttcaggagagtcacctgcttcaagtgaggacaaatataaagctggtaaaaaaacaaccctcctcccccccgaaaaaaaaacccactaactacaaagcaagaaatagcgactgaagaatgcctaacgaactcgtactaaaacaaaatactgattgtagatggacatacggagtcatagaactatctggacacaccgtaaacagatatgagaaaagaaggaagattaggaagctacaaatcctgtctcagtaatctattgctctgtaacaagctaccccaaaagcgaggggctttaaatcatcatcagttcatttgctagagattctgcacaagtgcagtctggggcagaactcagtgagaacaggatgtctcaaccccatgtgctaatggccgagctgacctggggctggaggatccaagatgccccagtccaatgtatgagcatggtgccagctgcaagctggagcaccttgatgctcctacacatggcttctccctccagcaggatatcttgagcttccttccttacatggtggctccgaaactgccaggcctcttaaggcctgccgttacaacagcaccacttctgccacattctgtcacacaaaccagcccaggcttcggcgggaggggaaatagactctacactcctgatgaatggaacaacatgttcgtgcagggatgggagaactccaagtgatcatttcttccttttttttttatttttttttcacagatattctaccacaagccccactattgtgaaccacgataatataaaatgaaattaggaaaaagataagatgaccgggacgaagtaccttgcctacacacgccccctccctatcaccaccatcttctgcccttgactcttcaaccaacgaaggagagaaaagaaagaagagaatgaaacgtgcaatgcagactatagcatcacggacagcagcgttggttacaacatcttattagggtcctttaaaaatacagaaagagaacaaatgaaggagaacctagaaccaccacttactgctttttcttatgacttttggctcaatgtatgttttacacaaaaagaaatgctacaaggatttggtaccaggtaaacaatatataaattgttagggaaaaaaggaaaatctctttttttaaaaaatgagaggttctactttttagggtcataattgtataagttcaatgtttctagcatatctttctagaagaaagactagaacagccacaggtgaaaaaggaaactgataaatggagggggtaatatagtagatcctgtgacgacatcctttatcctgcactaaaactgcaatgctgcagaatgccatccccctcttgaaatcctgactctttgagaatagcaaatggtggtattactcatgcatgacctttgccaaaaagtggctggcagatgggtttgcccagcaaagtggagatgtgatgagattattctgagtccctatgcaagtagcccagttgagcctggacaagaatttcactggatcagaggctttttactttcacagaacgtagacaaatgtgccatgtcacaatggcttccactcacgtcctggtttatcatcattcctccctccactcctcaacagaaaccaaaaaaaaggcaattatctttcttccagctacagatgttaatcctcaactaacatcccataccggcagtgtctgcaatgtagtagaaaggctttgaagcctgcaaatcatttaggaccaaaaggaggaaatccaagtccaattatgggaaaatgaaaaaaagaaaaagagcagaaaagcccttcaaatcagaccacacagaaggccaaaaccacagatgaaaggaactgagaagctatgggttttttttgctgccttttaaatacagacccctaggcaaaggcagcacttatttaacatatccacaggtattaaagtctataacatataaggtgctagaaaaataatttcagtgattgttacttatgggtctagataattcttaatattgacaaacattggtatccatgtaaaagacaaaagtagaaaatatcactaaacttggaggtagaaaccagacttgaattctgcctctatgtatagcctttggaaaattactttttgtttcaaagcccaagtttcttcatctataaaaatatggattaaaaataccttcattcaaagagttgtactataacttttcaatgaaattcatgtatatgtctgaaaaacagtatctaataaatataaactgtgtatgattctgatctttaatacagattaagactcccaagtaaaagtcctttttctttttttaaatcatggaaaagacacaaattttgttgtcacaagatgatggttcaatggttctaggtcagattttgttcctcctggcaagatgatcttgggtaagtcttttctctttccaagtcctaggttctccatttcatttatttgcttgtaaacctgaattcatttggaggcactaacagtaaacacggcaaataaagtccccgcccttatggaacttagcaagtcatgaggagacctaaaagcaatgaatgtacagtgttggctactgttttctaaacgatgaggtgactgggttagaatatcttcaagaccctctccagctttaagcctgtgaacccgtaactgtaaatataaaagtcaacaaaaagaaggaagaccacagtttctcattctgatgttttgtaaggtgttaaatcattttttctcaagccaaaatcaaaagcttccagagaacagcaataccattacaaaggctttctgaattaaaaacgaacagtcctcatctcagttgaaaacttaaaattctactgttaaagggaaaatcaagtcctcacatcaaagactgtgccctttatccccttgaaagcaataattcagagtaatattggcacatacgccgaggaccactcatgccttagcatacagaatcagaaactgtttactaaaactagggtctgttgattaatcctacattcagtaagagtttgagaagggaataatcaccaaaaatccctaagttctctcctctgatcatcagtggggctgtagttcaactccaggaaaacactttatagagataagaggagactacttaccgccagggcagaagagcatgttgagatacggaaataatggtgcccaaaaacaagagatgaaaaaaattgggaaagcttcacctaagaagagataactatgttgaatcatagaagtaatcttcaattatcagaatggtcattgagatactcacaatcagagtaatacactgaatggcgaatggacgataaacgtacccaagtggacacactactccctaggataagattcccaggggataggaatgctttctttgctgcctttacactttatattctttattcgccctacaaacatatttaaggctgtagtagttaaatggagggtaggttctacaagcacagtttttctctgacagatttctatctcctggtagcatggtttttactggcaacctcaagtgggtaagccttacataaaaagcttcagttttcagaatgaatcagacaaggactaagaaataatgatcataagcagttagaatcagtacaaatttatgaggctgatgaaactatgggaaaacaaaggattattggataccaacaacagttcttcaaataatttttcagtgacacagcaccagaaattttctgtttaagtcaactaagaaacacgcacctgaatagtaaaattaagttttaggaaacttatttggcaaattgaacaaagattgtcaagcagaattcattaaaaatacaaagaataaataaaaacaattgatttttatggatctaactataaatctaactagatatatctaactacaaaaaacaatctaactataaattgtttttatggaaagtagcttctgacaaatttcaactttcttaaaacaacgtagaattccaacaaacttgagcacatctcctatgctacagtttacctatttaagtataagcataaaccttatatatctcacgtaatttctataacctccaacttccatacttacaaactctggaataagatgccctatattatccaatcaacactctagctctgccacttactgtgaaattgaaggcaagacacttaactactctgctccttagtctgtttcttctttatatctaaaaagtaaaataatggtacctaccctcaagggttactgaaagaatcaaatgtgttaatatatttaaacactagaataatgcctggcacaccatgaaaatttttaaatgctgggaattttatcatcaactgtgtttattagtatacatatttatagacgagtatgtgttagtaaacaccatttactaaactgtttactaaaactagagtctatttattaatcctacattcagtaagagtttgagaagggaataatcacccaaaatccccaagttccctcctttgatcatcaatggggctgtagttcaactccagggaaatattttatagagataagggcagattaccccagagcagaatagcatgttgagatacggaaataatggtgcacaaaaacaagagatgaaaaaaattggaaaggtttcacctaagaagaggtaactttgctgaatcatagaagtaatcttcaaatatcagaatcgtcatcaattaaatcagtaattagacttattatttgtttttccaaaggtaaatttggctgatgatcagaaaaatcttttaaatcaaagctttctgatggcaatgagcattctttccaaatgaatgctaacattaaaaacaaaatgctgcttttcaaatatagagagatgattatgctgagtgtgagcctggactagatgacataaaaaaatctcagaattgtagaatattaaaatgtgaaaaggacttcaaagtcatctgcttttgtggtttagttgtccattggaatcacctggggagcatctgaaaaaatactgttctctttccagatcaattaaaatcagaactttctggggatagaggctgtgcactattttgctggtttgttttctttagtctttgtaattgtcccaggtagttctaacatatagccacagctgagaaacactgcattagttcacaaatgagaaaaatagggcccacagttagaaaataatggaactttaatttgaacccaggtactatgctgtgctatttgtttatttgtgtgtgtgtgtgcgtgtgacggggtcttactctgtagcccaggatggaatgcagtgcatgctcatggctcatgcagccttggcttcctgggctcaagcgatcctcccacctcagcctcccgagaggtgggacttacttttttaaatatatttttgtagagatggagtgttgccatgttgtccaggctggtttcaaactcttgacctcaagcaatctgctcgcttggcctcccagagtgctgggattacaggtgtgagtcactacgcttggcctctatgctattttcaataaattactcaaaaggtctatggctttataatatgcataaggctataaataagtcttgcaaatatcagtttcggaggggaaagtatataccttattttttttccccagggtacagactgttctctggtctattatcactttctaactttaaagacattatttcactgaacttcagtagaaaatatacacaaaactagtcttgcatcatggggtttacttctaactttgattttgacctacttgagcctgatttcctattgtttttgcaagtatgcccttgcacagatccttatcacacaggcaggaggcagaggctccctctactcaatttgtgatcaagagaaactgcttataaattattttctgcttgcagatgacaccaactagaagctatctttgctagattttaaaagtcttaatcagtgtgaaattgggagaagggcaaaggaatggaaatcaggaaatccgaatggctaacatggggtcacagggaaagaagagcaagcccagaactgaatgttaattccacagctcagcctctacatcacaaactgttaccaggactttctggtgaccaattttgcatatcatttcaaattagaggcctcctggcaggtgggaaaaccatggcagtgagaaggacaagtagctgtccttctctctgttctgtctttacccacactaattagggccttaaacaactcactatctctctgaaactccttttctcatttataaaatgggaaggttcatcaagatcatctcaagggtgacttcgaattacaatgttctatgatgagataacatctgcattgtcaaggaggacagggctggcctatgatgtttatactgtgaatagttgcttttcctgtggacagaatctaccacatgctaaatagaatccacacagcagccatattataaaagggatctaccatacacatcacatgttaaatttttaatacagtaatcattatcagaaatgtgaattccatcacaggttaaaccttaacacaagtaggctgaaaatcaaactggcatcttactctcagcaataaagactcgtactagccacctgataactccatgacagagatataaacagcatacacattcaagggcagactatagcttgaactgactgatcactttccagaaatgctattcttggattgctaagaagtaagctataccacacccgctccgaaaaaaaaaaacaaaaacaaaaaaaacaccaagaaatcccttcacctcaaagaatattctagaaaaaaattctagtcattttttttgttctgaaatgtaccttttaatatattttaaagacaaaaaaataccacaaggatttcttttccttttaagaagaaccttcggctcttaggtatcacagattgttcagaacaacttggactaaaggcggatttcgcctagtgatttaattaataaacatgtttgtggttcaaaaatcattttggaaggcacatatggaaaactaggaaaacttcagatggatgaatatttagtaataaatatatttaaggaagaatattaaccaaccaaaaattaatttaaattgaaaatgcttcccagttataatcagtaacaaggaagcagatgattcccccacaaaaatatagaactgtaggcaataaacagatctttgtggaagaaaaagagtaagctatttaagggaaaaaataggtgttcccatacttaattattagttataaactcgctgttgaaataccaagagtatttaaagaaacaagaggccgggcaaacctggaaaacaacacatgtaaatacagtgcctttgtctggactctatagagaaccagaaagtgttctaaaacatctgttttattatagggttgaaaataaagaagaaggtaatatgtactttgaaatctattttctaatttccatttttcatgtgtctaatagctaaagataacacattcattttataaatacagtaccactattagctagcatggtcacagggctctaatttatcctatttatagtagcaaaaaaataaaccacattttttaattataaatcaacaacttatcattgtatatatttgaggatacaaagtaatattatgatttgaaaattcagtgtgaaataatcaaatcaaacaaattaacatgcccattacctcaaatacttttttgcagtgagaacatttgaaattgacctggctttctggctaagatcaactatagtatctgtcttcatcagtctaattctaatatttgtaaagaatattagaaatcagatgaaagtaacattatcagctatctttagaacataagttatttctaaaagaaatgtcaagaactcacaaataatataatatcaaatctgggataacagactgcgtagtaactttcttgtgcatggacaagctcacagggacaaaactgcaagatgttcctatcaaccagagtggaggccagccagcctccacgagcaggagctgctgtccatggagctgctctggacccactccacattcccctagcacggcgttgctttcctgtcttctgttcccaggtctgatctccgactggcccgcaaaactggacgctgacacgggttccacagtgacagctcctgctgtgttaactcagcctggatcgcccccacactgctttatgagcactaaattttggcaacctactctctctctcctcggaatctgacctcaactgcaccctttctgttccacttcacttctcctcaattctgacagcttgcagtgaccttccctagctacaaagagaaaactgtgttgggtttcatttgcaaaattctcaagtagaatccatcacaccttcagtcctgttctctaagggcccttttagcagtcacattattgccctcttattattggcagagagagtctgagtgaccttggatgaatctcaactgctttttgagcttaaccttgacagcccctcggtttcattacctaatgatttaggaatatcagactatctagaaaatcttttaagattacttccatttctaataacctgctcatattccttatctcagtgaaatgaccctaccaggtacttaaatcccaaaagtcacatggaaatcctctctctcactcatcctcatattcaaatgaacaaatgattccctctgtcccacgactttgtctcctagtcctcctaatgtcccttaaacctcagctctgtgaggctgacttcacttcccctaccttccagctgcttccgggttcagcacttccactagactttcccagtgacttccggcttttctctgagtgtggattaacctgggtgcctccctgaggtcagagggcttatctgaccctcaagaaataagtcctggtgcaaagccaaaaatgaatgaaggaatgaaagggagaaaggaaatatctaaagattttcagatcctaacataaaaagggattaaaatattgttttctgttgtctgttttttaaatcttagaaaacacaacactgagtaagagggagatgagagtaagtggtggggagaaaggaaggaaggacacttacaggtacgagttacggtccagagaacgagcgaagcatgtgacacatgtaatctcatttcctcctgtaacaactgttcacaagatgcgatgtcatctccattttatggttagagaaagtggactctgaaagcctccttaatttgcccaatgtcacaatgccagtaagtgtcagggtcagaactttaaccaagatgatgtgactccaagagtccattgatctttccctagagtttgttaccatgatgatctcaactttacaacagtggtccatgggagtagcttatatcatattaaaatcttagaatttcagtgtgcaggaagaagagtttaaaaacaatcctagaatttaagaaaccaaagtatttgggaaataggagggaaaactccaccaacactgcagctgtgctattcatctatagactctactcttgtactggcactagctacatatgtcggcacctttgaaatgcagtattttaaaatccaatcctgtgctaagattatccgtcctatcagcggcatgctgcattttgggatgccctctcccacctactttaagctctccagagactgtgatacaacaatatgggcttcaacacactgcatctaattttattgtaaaaaaaaaaaaaaaaaaaaaaaaggctatgccatatggttaccaacaaatgaaatagtgactgttgcaaacagaataaaaaagcaggtggagccctgacaaaaaaaagtacaactgaaatgagatctaaaagatttaaaaatagctggtcaaccagtaatgtatacttaaacgaaagtgtttaagaaaccaggatgaaaaatgtataaaaacattaccaggagtaatatgaggaaaataatgctttcgacattttcattttatccttggaaagctttggtgattcaaatttaaaaggactataatagggaagatataaaaaggaatcacaagtccaagagaacagaagaaagtttcaccttttgttctaatttcttagaatcatcttcctatttccttgcaatatacctctttaagaaacctggtatactttgctttatatatgatttaccaaaaaagaaaaaagagaaagaaacaaaccaaccaaccaagcaaccaacctagtatcaccaaaaccacaaagacagacgggccttaaatttgctacgtaacctgtatacacttaaattagaatggtcaggctgagttctctagtaaacactataaagaacttcagaatgacacaggcatcaaaccaagcaaggaagaaaaaatctttataatcgtgaaacaaactgatgttatatccaaaatataaatataagcatattctttgaaaacatgtagttatttccatatatattttacctacagtgtatataatcatagatagcttttgtgaaggtattagtgaattccggatccccctgtaactcagttggcccatcaccacctaaagattaaaaagcaattgatatctatcctatttttaacttcagtcctggagattacatcaccattttggtgcccaactccaggttttaatcactctaataaaaatgtcaggaattatttattactggcaaaatgctacagtttagaagccatttggtttatttttcataaagacaaagagctagtcatacccatccttacctaggttatccataacctttcacaacctaggattatacactagagtaattagttaatcttccaagttaagacccacatttcagagaactgtagacatcaactagttttaagtggctgagagcacagtcaggtctcttacaatttccaatgtgagggacaagtcatatgaccttggacactatgcgatgcctttagctttagaaatagttttcatggctggttttacttaataaatattgatagcaggcttctcttaaaagttgctatgcatacttcttcaactgtattgcaggaacaaagggcaaacctcccctttgccctttgaaggttcactgaaaatcaactggccaaaggtagaataacagcgaaaaaagcatacaatttattaatatgtacaagggacaatcacagagtgattccccaaatattccaatggggccaacatactcctacagcttcttttcatagaggagcggggagatagcgaatgcagggaactctgtcaaagggcaataaatgattaccaaggagaatgaacggatgggaaaacagagatgaacttgtaaatggtcctctttagaaaatgttcgagcatgcttacattctttagtattctttgttacaatagataatgagataacaaggaggtgaaggacaaacagtcgttctccttggtgggtccagtctttacttggatgggggaaaagtctcttcccacatttactgatctctaagaacctttcattcaaaatacctattataccagggagccatattttggagtgaagttccctggataccttcagtatactttatgcaaaataaattttaaaatatttaacttagaaagtggaagttcctatttgggaggccgagggggaagattacttgaggccaggaatttgagaccaatctgggcaacacagaaagaccctgtctctattaaaaaaaaaaaaaaaagaaagaaaattagctaggcttggtggcacatgcctgcagtcccagctactttgaggggggaggttaaggtgggaggatcccttgagcccaggaatttgtggttgcagtgagatatggttgcatcgctatattgcactccagcctgggtgaaagtgcaaactctgtctctcaccaccaccaccaccaccaccaccaccaccaccaccacccagaagttccctaatatgctgctcccctgacatcaccactattaacacattcatcttctagattctcacatatgaattttaacataaatggtatcattccatacttaattttgtattgatgttccccaccatcaattccttgaaaataataattaggtaatcatattttatgaagtattttttatgtgccaagtatcatcctgtaggctttacatggattttcacatttaaacctcattcctggttcataagtaggtatatttacttttcccaagttccagatgaggaagctgatagaggaataatttccccaaggtcacagaattggtgctaagtatcagagaatccaggcagcatgaataaagaagctatactcttaaccccttctcttcactttgccatccataccactactcataactctacgtggtctttttaacaactgtattaattacatgaataaagtataactgatgtaatccttcactgatcgagatttgtattattctcaattttttgctattgtatacaatgctgcttttaatgtccttgtacacatacctttgtacgtttaactacccagcatctttcttttttcttctgaaataattttagacttacaaaaaggttgtacaaatggtacagagttcctgtaaatcctccacccagtcttcccttaatgttaacatcttacgtaaccatcagtgcaattatcaaaaccagaacgttaatgttggtatagtattaactgaactatacaccttattcaaatttcaccagtttccccattactgcccttgtcctattccatgatcctctctagaacccacaaggccttcagttactatggcttcttagtctcctccatttggtgacagttcttcagtattcccttgtcttttatgacctcgacacttcaaaagaagatgggccagttattatatagaatatcttgcaatttgggtttggctgctgttttctcatgtttacaatgaagttaggcattttgggaaagagaagtgatgttaagtgatgttatcttctcctttagagcatcagaggcttcatgatgttgagatgccttgccactggtgatgttaatcttgatcacttggttaaggtggtatctttcactgtctacattgtaaagttagtattttcccctcataatgaataaatatcctgggagagatactttgagactacacaaatatcctgtttcttccctaactttcatctactaaatttagtatccttcaatggctctatcaacaacaataattactgcgatatttgccatttcctcctttcctttcacaattgttaaaatttttctgtaataaaaacctgtcccttctccacaatttttaaaatgtattcaacggatattcattttcttctctgagtataatctaatactatcactttgttgctcaaattgttccagctttggccattaggagctcctccaggttggctaggttggccttctggcacaccaccctcttcttttgagcacttactttctggcaccacaagatgttctaggctcattttatattttccctgccccaggactacaaccaaccaattctccacagagcattaattcattttactggtgaacagtatttagaaaccaaggtctggaagctacgctgctcattgatattgagatatcagtgcttctagatccgctcggcaggcagagctaagaaatatatgcaggcgtatatttacatgcatatatacatacccatcatgcaaactcacctacgtttctgcatcaatccatacattaaaaattacaagttcatatgaataacgtcaactggaatccaataccacagggttccttattcataatttctttctcccatagagagaaaactgcctcttatcatctatagtatgtttgtttatttgcatatcctagtatacagataaagtaatgatagaggcagacaaatgcctagacagacagacagaggcaggtcccctgcaaaatcctaccttcaggccaaagatagtttaaagcctgaaagctgagctacaagttaaatctttggaccaaactgagagtgtcttcctgtctggcatactttcctctgatgggtccccacccttcacgtattttacatataccctttcctaattggtttcctaccctttcctaattggtttttctacactgtcctgcccacctttgagtggtgtttttgctttaatcttttttgcatacttacaaaccaatcagcatgcactccccattctgagtccataaagggccccagacccagccacacagaggaaccccctccctcccctgctgacccttgctgaaagccgttttcataactcgaaaacattcttctccatcctcctcacccttccatgccccacgtgtcctcattcttcttcagtgcagtctaagagttcggaaacaccaaacaaaggtacaagctctaacacaggtaagctggggcacaccagcgtggccaagggaggtccagggggggtgttgctggtcaggggtccccaccttgcgaagtgaccaagaagaaaaattctgcatcagtaatagtttcagaattaatagctcatacccctgtaaaagacaaatttactaactggagtacagtgtttgtgtactgttctttttgtcttcaaccacacggcatacagttaaaaaactgtttttcaaaattatttatgttcgttctttccttttccattccctttagtgtaaattacaaaatacttaatttgtaatacaattaggttcatttgttactgtttatactttccactttgagttttcatggactggttggtcttaattattaatttgtatcctaagagggtaaatgccagggttgtgatttaatgtagcaaatgaatagaagggcacattcagtgaggactgaaagaaatgcccttaggcatggatattttctcagcatgtttgtgcttgcatccatgtgcctgcttgctctctctctctacctgtgtatgcatagcctcagtttttaaatggcggtgtcacctttgttcatatgagataatgtgaagcttagaaccctatagattttaagattgaaaagggcttctcaaacgtaaataatgcccccacatcttcaattcttaatactaacgatttaaaaatgtaccacaaattggagcttggccttttcataaaaatgtatgtgggtacctgcaggtgtacagacacagtttacttgaagttaacgacactggaaggatccttataataagcttttaattagatattacaaacaaggaaaatataggaacatgagagctggaagaaattacctaagagagtttctaaaggtttggtttcatttttaaaaaatcaattttccctacaggaaagaaaccagaagtggacatgactgacataatagatgggcaaagtaatgtattctcaaagtcagatgcattgtggaaacaggaagagaaaactacaggtgaaagcaacagcaatctttctgaattatcagaaaacataccttagcatattaaagtgggaaaatgaatggaaaaagaggaaaccagaaacagttcccagtgtctctgaatctgaaagcacaaagctttaatcagaacaccagcagagattatggctggatagtgacaagaatgagactgccacatggtaaggaaggtagtgcttcctttccagctgctaaatagtgccaattaactactatatgaattacatgtgtaccaatgtctgctcagtatgcagagagcaactccaagaaaaggctatttttcttatcaaagtgagtaaaaaaaaaagaaaaaaaaagacacagaagaagacgagtttccttttgcaggcctctaatcatcaggaccagcacttcaggtttcggtggaaggtgggaagagaaggaaggaaaacaaactctggcaagagagagggagaaaggtttggaaagactacggaagtcttcgtatgtactagaagctttaagggcaaaatatgagtcaccaaaggcaagtgaaattgctgatctctcataaaacaccccttggctttctgccaccataacttccccttttaatcctatttctcatatgcagcatgtgaaaaaaggaccagctggctgcactggttttgttattttagcccttatgtatacacactttaaaaggctgaagaaaagcaactgtgggcagttacatcctttgtatttttcaaaggttggcagaaagtattctgtgactcctttgtatagatgcatgctttcaaaataaaaaggtatatacaactctttttaaagcttataaataaattaggtgaaaaggaagggaagtggtagagagtaacgctaataaagatttttccaggctgggcgcgatggctcacacctgtaatcccagcactttgagaggccaaggcgggcggatcacgaggccaggagatcgagactatcctggctaacacggtgaaaccccatctctactaaaaatacaaaaaattagccgggcttggtggcaggcgcctgtagtcccagctactcaggaggctgaggcaggagaatggcgtgaacctgggatgcagagcttgcagtgagctgagatcgcgccactgcactccagcctgggcgacagagcgagactccgtctccaaaaaaaaaaaaaaaaaaaagatttttcctttatgtggaattgttatagaaaatcagttataatacggcagtaatgtttagagacaccaaggacctgccaacatgacctcatcatctctccacacaagctgggactgtgctgaagttatcatccacctaaagtagggtacaaagcccactcagaatggtcacagaggtaagccctgtggggcaatacaaaaggagagtgggagacttttcccaaaggccacattctctggtttgtatcagtagatatggagcttttaaaagtttagaaataagaaaatcagatttcacattttcatgtgtaacgctactcagttctttctaacagccaaagagaaggtggtacaacaatcacaccacacaactgtcttagtccttttaaaataatgattctgcatgctacgtgttgattatcttcttgacgttcctcttatttctactttgatctagaaaaatctgatgttaggagcctgaataactctgtaaatagtaactaacacatggagtacattcaagggatatggctgctcttagtggaccacacgttatcatccttcctgtctccacactggcatctaagctgttaccccacaaccagagtcccttctactccagctctatagcacccatcggaactacgtttcaatagacgacaaggtgctaccatctcaaaggggcttttccagatgctgcccagttgaaagtcatttctctttattctgaaatcccacagtattttatacgtaattccgcatttatgcaggattttaaagatgctggccccctaagagtctcatcccttgatgatttaatcaaatgttcatctagccactgctaagaaggcacacggcagatggaactaaggttactcatcaactaaccttaatagagggagattattctggattatctgggtgggcccagtgtaatcacacaagaccttcaaagaggaagggagaacaggcactcagaagatgcaccagaaaaggaaaccagacaaagacgaggcaaaaagaagaggatgaggaggtcagacagtaccagagagtgagaagaacttgggccatctctgctagctttcaaaatggaggtagcggaccacacgcaaaggactaaaggtgaccgctagaagctgaggaggacccctgggcaacaaccaacaagaaaagggggaccgcagtcctatgaccacacagaacttaatccttccaacaagcttaatgaacttgaagcagattcaccttcagagcctccagaaatagacacagtcctgcctaaatcttgatttggaaatggaaaaaccagaagtagaaaaaccagccaagcaaacccaaacctctaacccacagaacgatgagataatgatcaatctgtgttgtttcaagccactaagtttgtggtgatttgttaacgacagcaatataaaactaacacattctccttcatattatatcctatttaatagttcaagtctcagtgggcattagaactgtgtccggaattggtgggttcttggtctcactgacttcaagaatgaagccgcggaccctcgcggtgagtgctacagctcttaaggtggcgcgtctggagtttgttccttctgatgttcagatgtgttcggcgtttcttccttctggtgggttcgtggtctcgctggctcaggagtgaagctgcagacctttgcgatgagtgttacagctcttaaggtagcgcgtctggagttgttcgttcctcccggtgggctcgtggtcttgctgggctcaggagtgaagctgcagatcttcgcggtgagtgttacaactcataaaagcagcgtggacccaaagagtgagcagtagcaagatttattgcaaagagcgaaagaacaaaccttccacagtgtggaaggggacccgagtgggttgccactgctggctccggcagcctgcttttattctcttatctggccccacccacatcctgctgattggtagagccgagtggcctgttttgacagggcgctgagtggtgcgtttacaatcccggagctagatacaaaggttctccacgtccccatcagattagttagatacagagtatggacacacaggttctccaaggccccaccagagcagctagacacagagtgtcgattggtgcactcacaaaccctgagctagacacagggtgctgattggtgtatttacaaaccttgagctagatacagagtgccgactggtgtatttacaatccctgagttagacataaagactctccacctccccaccagactcaggagaccagctggcttcacccagtggatcccgcaccggggctgcaggtggagctgcctgccagtcctgcgcgatgcgctcacactcctcagcccttgggcagttgatggacctgggcgccgtgcagcagggggcggtgctcttcggggaggctccggccgcacaggaacccacggaggcggggaaggctcaggcatggcgggctgcaggtcccgagccctgccctgtgggaaggcagctaaggcccggcgagaaatcgagcacagcgctggtgggccggcactgctgggggacccagtacaccctccgcagccgctggcccgggtgctaagcccctcactgaaacgatccttacaagatcaccctgtgaagttgttccagtttcttttttgccacataatattttgctcaaaagacatcaccagaggaagttagaacatgacagaaaaagagaacaacttctggagcagaaggggagcggtgacagggaggggtgaacactggacacaggctccagaagcctaaaccgaaaacctgaaaaccataggcacaggccaaatatcttattttacaaatgaggaaactcaggcacaaagtgaaatgatcacccggaggcgccaccactagtcactagcaacactaaggcaggcttagagcccagcgacttccataacccagtcagaacaactagtgcattccacacgggcacactgctagccacttaacacacctcatcatatttaattctcctaaccgctcttagaggaaggtgtttttatcccatgccgtacctgagaaaactgaaaaggattaagttgcttggccaaggtaagatattgggattactttccagatctgtaactactcattttactctgccacacagccttccatgacattcagcctaacaggccaaataaacattaactgggatctggacgcggtggctcacgcctggaatcccagcactttgggaggccgaggtgggtggatcatttgaggtcaggagttcaagaccagccttgccaacatggtaaaaccctgtctctactaaaaatacataaaaaaaaaaaaaaaattagctgggcgtggtggtggatgcctgtaatcccagctactcgggaggctgtgtcaggagaatcacttgaacccaggaggcggaggttgcagtgagcaaccatctgaatatctgatcataggtatagctcctctctctcaaaaaataaaaaattatgcatatacttacacacattaacaattctacatacaatatcaagttgtacatgcagaatcactgacactgtgttttacggaaaactgaaattatttctttaatgagtatttgttgagtatctgatctgttctaagaattacactaggtatgaggcatactgtggccaacaggagggtctcttgtccttaagaatactggaaggaaggagatcaaatgcaagtgataagcaataccaccatctaatcagtaagttctcaaaatccctaacttttcaaatatatatattattatatatataatatatataatatatataatatatgtaatatatataattatatattatatatattatatataattatatatattatatatataattatatatattatatattatatattatatataatacatataatatatattatatataatatatataatatatataatatattatatttgatatatatcaaatatataatcatatatgatataatatataatatatatatatttttgtctaagtctatactgtatgacaaacaacctgaaatgcaaataacctttcgagatacgattttgagtatacatatttgcctttcattgctgtttttgggagtgaaagaaagagcatggaaatgaggcaaaaagagtaacaatgtacctgtcttgcattctcaaggaataattgcttttgattgcttttagaataggtaacctcatcgtgacatgatttgctccaggagcaggaattcacttccctctgtgatcttttacaaatggcagtggtttccaaatgaacagggtaagttcatttttttctgggaaaaagtgtgaaggtatcaggatttttctcaacagtctggggtgatgatgagcatggtggttcacgcctgtaatcccagcactctgggaagccgaggcaggtggatcacgaggtcaggagcttgagaccagcctggccaatatggtgaaatcccatctctactaaacatacaaaaattagtcaggtgtggtagcgtgcgccttagtcccagctactcaggaggttaaggcaggagaatcactcgaacccaggaggtggaagttgcagtgagccgagatcatgccactgtactccagcctaggggacagagcgagactccaactccaaaaaaaaaaaaatccacacaaaagaaaagaatgtgtgaactccctctgacaagatggtatgttgtgaagaggaaagttcatgtacctgcattatccagaaaatacttccttgcaagatctggataatgtggcttctggcgtttctgcaaaaacaacaatttagcacaaaaactatgctgctatctatggaaagtttaagggaagagtaaatgttaaaacaattaaaacaagcaaataaaatgttttaaataacagtaaaaatccaacattgacagggaacagagttcaagaatggttttagatagagaaatgaattatcctacattagcgcattttctgattgaaggtaatttctttaaatgccaaaaaatctttataagatagttttactggcaatctttccaatctatttcacactccctgtctccttaatcaaaccaagtaaacaaaatgtaacatttttgatgactcactaagtacatccattactttgcagtgctgtaatgcagccattctgagaggctactgacgacacagatttgactgcctctcttcaaaacaactccagatgtaccatttggagacctagtgccctttaaggttgcaacattttctctttacctcattagcaaatcacttcttgctactgcccctctatctgaggaacatcacttccttgaactccattcttctaattcatggccaaactgagaaaacaattgtttctttaaaataatttcaatttaggccaggtgcggtggctcacgcctgtaatcccaccactttgggaagccgaggtgggtggattacctgaggtcaggagttccggatcagcctgaccaatatggtgaaaccctgtctctactaaaaatacaaaaattaggagggcgtggtggcggatgcctgtaatcccaactactcgggaggctaagacaggggaatcacttgaacctgggaggcacaggttgcggtgagctgagatcacgccactgcattccagcctgggcgacagggtgagactccatctcaaaattaataaatgaataatttccacttaaaaatttatgtaataacctaaatgtctgtgttctattaaattcatcttattaaaatcagttggatttggctattaacttgcccacgaacagctggctcggtgatagtcagcagtaacttgtatgctggtatttgcctgtgtctacaggcccaagattatgatatgccagggggaggatcaggtcaaaaatttcaaagtgaaaactaattgtgggtattattaaaaacaggatctaaatacaggttgtgtgaaatttgtgaggtcagttattaatacatggactctgtaattattctggctgttgagagttatttttatttttttgcttgttttcactttttttagtcattttaaaaaaagattgacctttagctaagtgaagcattactataacaacacactgttttcctttatgggatattttgactatataattataaatgcctttaaaataaaatttgtttttctgtatccttattggctaagtaaataccatgttcaggatagaatatttgccatggtagttccacttatccttgcattgctggtctgctgaaaggagggcatcaatcatcccaaggagctcctcagtctcctgacatatcataagcaaaaagaggatagcttttattcatgatgtgaccagttacattcatatcaataatacatgctcatgttagtgagaggggcagcaatcttggactgttatgacactttaaacatgctccaaacaaggccgggtgcagcagctcaagcctgtaatcccagtactttgggaggccatggtgggcggatcacttgaggctaggagttcgagaccagcctggtcaacatggtgaaacccctgtccctactaaaaatacaaaaattagccaggcgtggtggcacgcgcctgtaatctcagctacttgggaggctgaagcaggagaatcgcctgaacctaggaggtagaggttgcagtgagccgagattgtaccactgcactcctgcctgggcaacagagtgagaccctgtctcaacataacataacataacataacataacataacataacataacataacataacataaaaatgctccaaacatacaaacattcaaacgtctatggatgcatctgaataggaaattctgtagcacttcttcatgatcaaattgaaaataaatttcaatataaattcccactgggaatcattaatattccattacagtacccttaatgattacaaccaccaccactcaaacttttttccttttttctttttttgggggttaaaaatctgtttgtactcttaagcagcatctgttctgttaaaacattgtaacagacttctttttggtaatttttttttttttttaagaaaacacatgaacatgatttgtggatcttcagttacttcaaatattaccctcattatcgtcaccatttttcattcatggtctgaaccacaccaaaagcagcatcattattctgcccatgatgagcacgtgatcgaaagcgaaagcaggctgccagacctccacggggagggcagaagcggaaacacgccacgcacctttcatcacctaactcagcttgatttactttactgaaaaaagcagcaatattccatattttaagccagaacctttaaagcttttctcttaaaaagcttgcaaacctagcttttctcttaaaaggctctccgacttacacaggacaggcatccaagccctcttcctccatggatactgttgctaccaggtttccatgaccttctcttggaaagaactcacctactctaggcaacagttgatgctctttttttagctacacttaaataccacccataagttcctattttcaactacatactccgaatataactcagatcaagtatttttgagaattcagttcaggcttttcctttataaaaagttcagacctttttctgactgaggtctgcttcttcctcttgtgtagtcctttgggaataatcttttgaaaatgctgcaatgacaaaagcaattttcttggatttaaatctgaacattctctggtttcattattaagtatacacttctttgtctaaaccagtaaatacaaggtgagagctaagagagttaacactttagaaatgcgatttggattcaaaatgacgttaagaaaatgcccagcacttagactgaaacgatccttacaagatcaccctgtgaagttgttccaatttcttttttgccacataatattttgctcaaaagacatcaccagaggaagttagaacatgacagaaaaagagaacaacttctggagcagaaggggagcggtgacagggaggagtgaacactggacacaggctccagaagcctaaaccgaaaacctgaaaaccataggcacaggccaaatatcttattttacaaatgaggaaactcaggcacaaagtgaaatgatcacccggaggcgccaccactagtcactagcaacactaagacaggcttagagcccagcgacttccataacccagtcagaacaactagtgcattccacacgggcacactgctagccacttaacacacctcatcatatttaattctcctaaccgctcttagaggaaggtgtttttatcccatgccgtacctgagaaaactgaaaaggattaagttgcttggccaaggtaagatattgggattactttccagatctgtaactactcattttactctgccacacagccttccatgacattcagcctaacaggccaaataaacattaactgggatctggacgcggtggctcacgcctggaatcccagcactttgggaggccgaggtgggtggatcatttgaggtcaggagttcaagaccagccttgccaacatggtaaaaccctgtctctaccaaaaatacaaaaaaaaaaaaaaaattagctgggcgtggtggtggatgcctgtaatcccagctactcgggaggctgtgtcaggagaatcacttgaacccaggaggcggaggttgcagtgagcagagatcatgccactgcattccagcctgggcaacaaggcaagactccgttgcaaacaaacaaacaaacaaacattaactgcgtagagaaaattcagattctactctttgtttcttttctacttcgttcaggtaagggacaaaggggcaatgaggaaaccagtctaccagcagaatctctaataggaagctctaaataattcaatacttaatatatttccttcaatactgtcaccaccagcatccgagccaccatccttctcacatagacaattgcgattttaccatctttccacttccactttcctaaacaattcttcaaatatccagagtaaaacatgacaataaacataggatcatgttactttccagttttcaattcttcaaaacaattcccattgtctttttcttaaaacgtcagtgtttttaatactgttatatagttatttctgaactgttggtcattacactgtactcagtactttaaaagaatgaccaagagtagtaaaatttcattaagcctatttttatatgatgcctaaaacctctggctgaatagacaaactgccccatttttttttttagagtggacttgtccattatttttgtcattgttttactgacagaattacaaattcacaggcagttgtaagaaaagaacagagtccttgtgccatttacccagtatcctccaatggtaacatctgcaaaactatagtatgatagcacaaaccagaatgttgacattaataaaacctagtcttattctgatgtctccagctatacttgtactcagcgataatcaggaagtaaagatgagagaggagagagcaacaatgagagtgggaagatcaaatagggaaaaaagacttcatgttgcttaggttaagccttctggtagaaaatattgaaaagtagggcaattgtcagtgttaaatttccaatcttctccctggctgaaaggggtagatggaactcagaaagagagatgggtcagttttactctttttttttttttttttaagaagaatcattacagcttttgctgtcactccgtgtgaacagatcctttttggggtttgaacttacaaaaatggcttatctctagatttttaatggctgattcatctgttgttctttacccttatatacagctgtaactgattaaaaagcctaatggttacaaatctgagagcctcactttatattttctaattatgtttcttccttatccaaaaagatgcattaatctttatttaaaatgtgttttatctttgctgatcttttgagtctgtttaaattctaccttcttggctaattactccatcattttcacaaattatttttccttaagaaaaccaaatgagaaaattatgtttaaaacaacatatataatcctttcagctgacaagataggttaaaaacgggatggaggtatcctacatattcttggaactgtctcctaagagaatcttgcctaaactctgtcctttgagaaagcaagggaaaacaaatgtatttgaatgacaactttcattaaaattctaaccaacagactatgtaacaatttaattcactgtttttttatcactccattcatggagtgaagcttataaatcctgctaggccaagcatactgatttacatcctttcaatttaacccattcttcacacacacacacactctctctctctctctctctctctttcttccacattaaaacttttgctcttcccttaagggaagacgtgctaatttcaaagttcataaattcccaagtaaagcaatttctataaaaaaacttaaaaatttaaagaatattctaatgtcaaacatctaatagcaagcaataacctaaaagactgtcatattgattggtatctgtaagatttatttccctacgtttttaaatgatttccagtgacactgtcttctaactagaattattcttagacctacttgtgtatttaaatacattcaaggtatgtttttaaacattctgcaaattgtgttcagttttatcacaaatatttggaacattttgttttgttgtttctgttctttccatcaataagttggtataaaaatttttaaaggagagactgtttcagctaatttctttctactctcccttggtacttactgaatttaactgctgctcaaaaaagaaataaagatctaacaatgactggaataaaaatactaaggagagcagtatcagagtattaaatggtagatggcaatgggaaagtgggatagaaaacaattgggttcatgtcatatcaaaatctacagtctagatgtctcttcagaatgaaattatgggacggccaataactgaccttccaccctttatgttcctagaccatttgccaggatcttcttgtcatttatttctcagtttcttcccttctttcatgtaaatacattttcaaatggacaattcatctctaaatatataaatacctggtgaccatcactgaaaggccctgtgtcttttctgtatataatgagaaatggacaattatcaaccaccagagttagaaatgcagagcagattcgatagaagatagaaacgcagcttttctgttacaaacaagaacaagggtttcctaagaaactcagtagaaataaaattcagggaacagaaatgcagaggatcaagacactgcattttgaacattaagatagaggaactttcaagaaaattcttatttttaaatgttttaattgacaaatgaaaagtatatatttgtggtgcacaatgcagtattttgagtacacatacatactgtacaatgattaaataaagctaattaacctatttctcacctcacatactgttttgtgatgagaacattcaaaatctattctcctagtatttttcaaacaaacaatatgatgttattaactatagtcaccatgctatacaacaaagctctatgatttatttatatagtcgaaaggaaattgtaccctttgtttaaatccccaccatccccagacccctggtaaccaccatttaactccatgaatctgtgagatcaacttttttagattccactgtaagtgagatcatgcggtatttgtctttctgtgcctggcttatttcatttagtgaaacgtcctccagatttatcgatgtcacaaatgacagaattcctcctttttaaggccaaataatattccactgtgcatatctaccacattttatccattcgtctgctgatgaacatttaggatgattccgtatctgggctgttatgaattttcaaaggttattctacagagtgaagagtttcagaaatatgcacataatcaaaagctaacacttcactagttggtatcagccgctgataagactgggtgaaagaagtccccaggctgacacagtcaagagtccataaaaattgccccgagacaaagcagaatcccaacaattcctggacctgatccttcagaccaacgcctctccattaggaaggcacatctctagcaacccttgtctcccccagggatgttttaatcacttcaagtaattcacatctccatcaatattccaggataatcttgggatcttagcagaatatgaactagtttgcttcctcaaaggttcttcaagattccaggaccagttcaagagccaatgcaccctagtacttcccctcttgtagcatcaaagagggaagtcactaaaaacgcaaatcaaacgtcaggtttaaaaatgtgggaagaaggataggcccaggagaaagaggctgttaacaaggtaaaaaggtaagggttaagcaagattcattttcagtcaacgtcacaggtgcttcctttcaaagagcagaggctatgtatctttggaaagcagcaagctaaaaagggatggtgggtagaggttttgactactgccgctaatctcactcgcctctaaaaagtcttaaaaccagatacctgcaggaagggatagggtccttccagcccactttaggctaagtaaaataatatcaaaaataaaaagttttaatagctaacagacaatacttactatatgtgaggactctaaaatctcccattttatagatgaggatattgaaatacactatttacttgacgtagtcccctgactattaagagacagaacctggtattagaacccagtcagtacagttctcaaatcataatctcaatcctcataccgtactgtctctcaaaacacagcctacaatacagagctagcctgcattctacattcttatccctctttattcacgtcgttagtacctgtaatacttattagagccttacgaatgttttacaaaatctatcagacccaaagcagaacctcccctttctcttccattgtccccaaggatgcttgaatacaaaccacatccaaccgctgggatgggtggagccagtagaaacatgatcacagggttaatcagaaacttgtaagacagtagcaaatttttctgtgtttatctgtactatgtgaatcataccagatgatctggcctattttgttatatgaatgactgtcttgatttggtcatgtagttgagaggggtaaatatgagaatgtctttgggtgaaagaaggggcaggaaatgcaatggaataataaccaagataacaagtcttttacctatacttcaaaaggccatctgacatggtttgtgtccccaccaaaactcatgttgaataataatccgtagtactggatgtggggtctgttgggaggtgattggatcaggagggcggagctctcatgaatgggttagcactgtccccttggtgctgttctcatgatgacgagtgagctctcctgagctatggttatttaacagtgtgcagcatctccttccttcctctcttcctcctgctccggccacttaagatgtgcctgcctccccttctgccacgattttaggtttcctgaggcctccctagaagccaagcagatgccagcatcaggctttctgtacagcccgcagaaccatgatcaaaataaacctctgttctttatgaattactcagtatcaggtatttgtttgcagcagtgggagaatggactaatacaccatctcaaacatcacctcctcccagccttctgctttgaagaacctaagtaatatgctatcactggttgtcttctgatatccaacttatttcacttttattacacatatccatatcttacactgtaaacaccctgtaggggaaaaaatgtcaaatatcggtttaggttatttgagtaaacaacgaaagctgcaatggaattttaaactaaaaaaagggctcaatgtatcatctatcccttcaatacagtataaggcaaattcagaagcaaaatattaattaaatcaactgaattgaaggactgtacacaagcttctcatttctcacacatttaaatatgtcaaggtctattttttcttaaccctttctcttcagaaaacaactacaacaacaaaaaaacagaatttggcttatacttttatttcaacatggaataactgtttattttatggagaaagacacctccaatatttctcagtagtctgtgatctctgaggacaggtgcccatttggtttcagcatcttctccaatcccacaacacctagtaaacacacagcagacctttaataaatgtttccagctacaaaatgacatggaacaacagacattcaagtacaaatgttacttctgggccaaagaaatctgaacagacataaatccaaatgttacttttgaaccaaattaatctaaaagtatcaaggtcaatacgtaacaataaaagcctcagtttatgtaactttaagcttttttaatattgaatctagcagtttctatatatgattatgaggaaacctaataaaggtcataatttttccttttatttcacacaaaaaaaacttaatgtcacacatgcctgtaacatggagattggaaaggtggcaaagaaagagagaatgaccatgatattaaaaacctgtaagatgacaccaaattttgaaaagtttctatgtatgtatgtatctgtgtagcacatatgtaacaatattttcccccagaattcaagtatatactccacccaataatttatctcagcagggaatccagcgacagctattctaagagaaagagaatgagaaaaaaagacaccaaaagaaaaatagaaagccaaagagaaagtaaaagacagaaataaaaagaaaccaggagaaaaggaaggcaggaagaaagggaggaaagggaaggaaaaccgaacagcacacagaatagaggaatgaaaccaacgtggtttaaagaaaaccttttcttactgaaattttcagtaaaacccattcctactgaaatggaaaactatcttgggtgggtgagcggctggggtttgttatggaagagaatcaatacttcacttgacaattaccatgctaaccaccaccattttcggtatcatttcactatcatcttctcacaacaaaaaaacaaataatacatactttcccatgaggtttataaacataatctcattgcacaacagcaacaaatcatctggcaaattcttggtagaggaagtcaaagaacacgtttactcaaggtgaacagtagcctctggactgtatattaaccatacacggtttcatacagctccgccaaacatgctctaaattagccaataatttgccaaccgtcatgcaggttaccataagcctaccactaaattctaaaagcttcactatgaaaattttcctgtcaactttcatttctgacataagttgataaaagcctcacaaatcctctcttagagagactccataattttccatgcaaatatcactagactgaaaaaagtcttgttaacaccatacggattcaatggaagatgtaaaacatctttatcacgtcacaatcctgcaccatttatctcccgctcccatttggatttatacctttagaaatggcagcacttgctgtacaaaggacctaaagaaaatgccttctttactccataaattaaagctacttttcttcctgatttttttttcataatttcttgtaatgtgctgcaaataaagttagtaagactaagaatgtcgtaataccacatcgtaatgccttctttcatttaccatagtagataagtctttccaaatctggcagaactctattctatgtagcttaaaggttacataaaacacaacaaaggacttctctttcaacatttccatatcatatcatacatttccataccatagctgattcaaatgtcacctttcttgaaaattcatttaaagaaattgattccaaaagaaacctatacgtgtactgttttttaaaaggctagaatcaaaaagacaactgtaaaaaccacattctcaatgtatacaatcttaccctacaaccccccaaatactcatattatcattattttgtactcaatcaaatgcccatctcatttacaatgctggagaatgcatgaattccaaagttgattttgttgtctccttgaaaacaatctgatgagggggaaaaacatcatgctgatgttaccaataataaagccaaatgcaaataattcaggcattctacaattactgagaatttaatttaatctatttccagagacaacatgagtggctctgagactagggattgaacacagttggaactgtttccattatagcctgcaaatgctactctgtttccgtagtgcatatacctttgggatctttcttaaattctgatagtctatttacaaataaatcgaacaaaaactgccactcactatttgtatcaccaaccattccaaatttacttacctcagtattattgattataatgcagacttctagaaattatcaacttaaggtactttgcagcacgaaaaatcaaggacaaggcttaaaagaaacatcaccaataaaaccaaaagcaaaaagcaaaatacttaagtgatccttagcctacttaggattaagctgtaagcagcaaacagaaatacaagcatacactaaaaaccaatagttccatgcttactttcagcagatccttggagaaatcaacaccctcatttaccccttgcagatttgcaatgaactcctgacaggtcatcttctttccaatattctgaaacagaggcaaacagtacatcactatgacattcatggaattaagactgattcataaatatatgatgaggcagaccaataatttgtttctaaaaacataactaggccaggtgcggtggctcacgcctgtaacttccacactttgggaggccgaggtgggtggatcacgaggtcaggagatagagaccatcctggctaaccgggctatgtttagcagaaagcccgtccactactaacatgtttagtaaaaaccccgtctctactaaaaatacaaagaattagtttggcatggtggcatgcacctgtagtctcagctactcgggaggctgaggcaggagaatcgcttgaacccgggaggcagaggttgcagcgagcggagatggtgccactgcactccagcgtgggtgacagagcgagactccatctcaaaaaaaaaaaccaaaaacaaaaaacagacaaacaaacaaacaaataacataactagacatctatttacaaatacagggctgggcacagtggctcctgactcatgtctgtaatcccagcactttgggaggctgaggtgcgtggattacttgaggtcaagagtttgagaccagcctggccaacatggcaaaatgctgtctctactaaaaatacaaaatttagccaggcgtggtggcaggcgcctgtagtcctagctactcgggaggttgaggcatgagaatcacttgaacccaggaggcagaggttgcagtgagtcgagactgcactactacactccagcctgggtgacagagtgcaactgtatctcaaaaaacaaaaacaaagcaaccacaggtttatatacacatacatacaattttactgcactaaaaacatggtttattatgcttttaaaattctcattaaatataaatagcaaacttataccaaaaacttattataatgtagaaaaaaacttgaaaaaccgacgctacatttatacaatatataatacagtttttaatgaaaaacatgggtaaaaacggacatttctgagctgaactcagctgtttatgcatttatttgtgttacctacatactatcaagacctgtgaaggatctgagatttacactactttcaaactaacaagttagcctgtcacaagctaataaaatgctggcagaggaaagaagtctcctgggtgagagacaaggtatttattacttacactaacaggggcagccagaatatcaacattatcttgtgaccactgggctctagttccccaagtcccaaatgtcacagagcaacctgaatagggccacaggccacctgcacatgcagtgtgttgcattataggagagaaaccctaaccttcaggagctggaatctttaatcatgggaaatacgcctatccctttgcactagcgggagataccagctctaccttccagggagatatgcaaacctgaccgctgctgtgaagtcactacagcatcttccaaagctactcactgtatatagaaataatcttgaaaagacagaaaagaacaaaggcagtcacagcctctgttcgcaaaacgtacaggaaagtgtgagacccatggaaaattatctcccagcacgtctccaagctggtttaaggacaataaagtttaacaaaaggaaattgcattaataaagtaattagaaaatccaaactacaaaaagagcaaagatataaacaaactaagaaaactaacaaaattgttatcacagagaatcacctcttattctagttccaaacaactagtagaagctgctagctgtggaggatttttaggttccgtatagacagcaagatacatctgttacgagtgcaggagaggaacgcagagcacagagaagtgtcacaggtatcatctctagcaaaatgtagtccaagtgaatacaaagtgtaccaacatcgtaatatacctgtgaccgggcacggtggctcaagcctgtaatcccagcactttcggaggccgaggcaggtagataacgaggtcaggagttctagaccagcctgctcaacatggtgaaaccccgtctctactgaaaaatacataaattagccgggtgcagtggcggccgcctgtaactccagctacttgggaggctgaggcagaataactgcttgaacccgggaggtggaggatgcagtgagcagagatcgtgccactgcactccagcctgggaaacaagagcaagactccgtctcaaaacagataaataaataaaaaataaaaaaaccaaccaaccaaataaataaatatacctgcatacactactactatgcataaatgtatgcttttcaaggtcacgctattctttcgtaaaaggctaacagaagggtagaacagcacctagtgaattcatttgaaagtgaattcatttgaatacctacggtattcaaaatgagaaagcagacttctggagatagacttttaaaaagtagcagaggccgggcgcggtggctcacacctataatcccagcactttgggaggccgagacaggcggatcacttgaggtcaggagattgagaccagcctggccaacataatagaatcctgtctctactgaaaatacaaaaaaaaaaaaaaaaaaaaatagccggatgtcatggcgggcgcctgtaatcccagctactcagggggctgaggcagaagaatcacttgaacccgggaggtggaggttacagtaagccaagattgtgccactgcactccagcctgagcgacagagagagagtccagttcaaaaaataaataaataattaaaaataaatataaaggaggccaggcatggtggctcatgcctataatcccacactgcctgggaggcccaggaaggaggatcacttgagcctgggagatcaagactagcctgggtaacatccctctctagaaacaatatgaaaattagctgggtatgaaggcacgtgctttgcagtcccagctactctggaggctgaggggcaagatcgcttgagcccaggatgttgaggttacagtgagccataattgtgccactgcattccagctcgggtaacagaggaagactttcaagaagacgcacaggcatcattttaagggaatatgtatacacaacctcaaattcaaagacagatttgcctgagaacatacacctgtgtgccataggagtcatcacttcccacctcccctttcccagccacccttctcctgtttcacaaaataaaacaattcgtcccattcaagctgtctaaatagttacaatgacagtgctgacatttttgttgttgttgttaaaaaccttgcctctttcatcagcaaagaatgcatagtttgtatgaaacactgaaaaaaatggtttgacagaagtggctttgtcagctaacttatttagtagatatttctcataagttaaataaattaaatctgcagtttaaaaattttgttgataattagtttaaagcacagaaaggaactttaatgaaaaatattgttttgcaacagtatactgaagacgacaataactcagttttcccaatcctttccaactgtatcaggtcaaacaaggtgtctcaaggtaaaaaaataacacatacaatgaacagtcattatgatataccttggcaatacctttttagatatgttctggggagatgaataaataatgactaggtaacaaatctttttccaagtcaggtggtgtttaattctttgctttaaatgaaaataaaggaaggtctaatttagtcatcagttaatcaccaaaactattttttgatatgtgatctgcaaaattcaactgcttgtaacattatctgctttaaataaattgttattaataaacttctttgtaaaagtacactaaaatatgagtataaaaacgaaaatttttctcttaaaaaagtgtgttaattttgttacatgatgatagcatcaactactataactttaaaaaagtatcatctttattaaaatacaattcacagtatattctttcgaaccatataattcagtgatttttaataaaggtgtgcaatcaccaccactatctacattcagaacatttactccctaaagaaactccatacccaccagcagttattctccaaatctcttccaccaccctcactagggaccacctggcaagcacaaatctgcattttctttatacagatttgcctattcaggacatgtgaaataaatggaatcatataaaatgtagccttttatgactagcttcttttacttaacatgttttccaagttcatccatgttgttgcataaatcagtatttaatgtccttttatttctaaacaacattccattgtatggatataccaattgtgtttcttcatttataaattgatgaatgtttagactattttctttttttggctattataaataatgctgctataaatattcatgtataagtttctgtgtaaacatgttttcattcctcctgggcatatatttaggagtgggattattgagtcctatggtaatcttgtttattcatttaaggaactgccagactcattttcaaagtggctgcaccatttcacattcccacaagcagcgaatgagggttccagtttccctccaacctcacagacactaacatctgtcccttttactttaggtattgttatgggtatgaacgggtatgctatggttttgatttgcatttccctaatgactaatgaccctcagctttttttcatgtgctaattatccatttgcatgtcttctttagagaaaggcctgttaaaatcctattttcccttcttattggaatatttatatttttattattcagttgtaagacttctttacacattctagatataattttcttatcacatatgtactttaaaaatatcttttcccattctgtgggtcttttcatttttttcctttcactttcttgatgatgtccttttgaagcaggatatttccctgaccccttcatgggcagatatgggagtatatgagcactggagtcagccaactccactcactcaaatctgctgtgttccaccccttgctggagggagcaaacaggtgagtgggtacggcagctcgggcaaatgccttcgggcaccagcaggagtgaactctgtactggtcccgcagcaacatctggggaggggtgccagtgacccctgaagtcccagaggaagtgtttgggtgctcttttagcttggctgtctgcatatggcttaagtgttaacagctcagtggatcctctgcctttttgggtgagatggctgccttctgccagcaagggcaaagggtcagtgtgacagccttttgcaaccacacttggggcacctgagctctttaccagcatccaggagaaaagaggttgcacaaacaaattggaggatggtaaatgcaggaaattttattgccgatggaagtggctctcagcaggaaggggagctgaaaaggggacagagtgggaaggtaaatgccactgaagtttggctgtctctggccagattcttctcagaagttatgctgtcagactgtccctctgaagtcaagccacttctctctgacatccagctgtagtctccaatgtccagctgcttctcctctctctgctggctgaggctggggcttttatgggcacaggaatggggggcagagcaggccatgggtggttttggaaaaggcaacatttgaacaggaaatcagggatgtaagttctcactttgggccaccgcatcaggcttttcagcttgagggtgcagccctcactggggacccatcctcttctgcccagaatttccctgcctcttgtccctatcactttgaagcacaaaaggttttaattaggtgaaatccagtttacctgtgttttattttcttacttgtgtattttatatctaagaaatcattgcctaatccaacatcacaaagatttactccaaaaaattttgtagcattagctcttatatttagatatttgacccattttgagttcatttttgtacgatagaaagcagagattcaacttcattcttttacatgtggatattcagttgttacgacatcatttactggaaagactacttttcccccaccaaattgttttgaaactctttttgaaatcaacagaccataaatgtatgggattatttttagacacttgattatactgcaatgatctagctgttgagctttatatcagcataactcttgattactgaagctttgcactgagtttaccatgttaacagttttaagcattcagttcagtactgtttcacattagtatattcacactgttgtggaacagaattccaaaactttttcacctcactaatctcaaactctatacccattaaagagctcctcttttccccttcatgccagccacttgtaaccaacgttctactttctgtttatatgaatttaacaactttacttacctcaaacaaatggaatcatattttttctttttgtgactggcttatttcacttagcataatgtcctcaaggttcatccatgttgtagcatgtgacaggatttctttcctttttaaggctgaacgattttccattttatgtagagacaacattttatttatacataaatctgtggatgaacatttggtctgcttctacttcttggttaatgtgaaaagtgtggctacgaacatgggtgggcaagtatctcttcaaaatccagctttaaactttttatatatatacgtgcagaaatgagattggtgtatcacatgatagttatatttctcatttttttgtggaccctccaagctattttccacagtgattgcaccattttacaattcctacaacagtacgtttccaatttgtctacatccttgccaaaaatagtttctattttttttgatagcaatgatcgtagtgggtatcaggtgatacccaactgtagtttttatttgcatttctagattagagaatgttgagtatgttttcatatgcttgtgaacacttcttttattctttttttgaaatggagttttgctctcgtggcccaggctggagtgcagtggcacaatctctggtcactgtgacctccgcctcccaagttcaagtgtttctcctgactcggcctcccaagtagctgggattacaggtgcccaccatcatgcccggctaattttttgtatttttagtagagatggggttttaccatgttgcacaggctggtctcgaacccttgacctcaggtgatctgcccaccttggccttccaaagtgctgggattacaggcatgagccactgcgcccggcccttgtgaacatttctagaccatctttggataaatatctattaaagtatttttccccttttaaaatcaggatatttgatttttagatgtggaaatataggagttctttacacagtccgatattaactccttataggtatatgatttgtaaatattttattctattctgtaggttgcctttacacacccctttgtttttaaggcacaaacgtttcagtttgatgtagtcccatttttgtttttgttgcctgtgcttttggtgtcacagtgaagaaattgccggcacatacaataacgtgatgtttttcccctatgttttttctcaggattttatagtttcaggattacatttaggtctttaaaacattgagataatttttatacactgtgtgatataagggtcctacttctcttttttttgcatgaagatactgtattcacactaccattttttaaaaagtctgacatttccccaatgagtggtcttagcactcttgttgaagatttgaggatttgtgcactctattctattccattagcctgtccttatgccagttccacactattttgactactgtagctttgtaatatgtttaaaataacatacgagtactctaactctgttctttttcaaaactgttatgattatttggggtaccttgaactctcatatgatttttagaacattttccatctctgggataaatgttattgagattttgatagtaatcgtgttgaatctgtagattactttgtatagtataatatataaaaaaattaagtcttccagtccatgaacatgaaatattttcccttttatttgcatcttattattctgcagcatggtttgataagttttgaaatggagaaatcaggagtcctccaattttttgcctctttttctatattttgactattctgggccctttccatttccacataaatttcaggatttgtctgtccatttctttacatacatatacaaagtgaacttggattttcacagtgattctgtggaatctgaagatcagtttggagagtacttcagtcttaacaataaagttccaatacatgactataaaagatctttccacttttacagttcctttcttcagtattttgtagtttcacttgaacttattttgttaaatttattctctaatatcttgattttttgatgctactgtaaaattatttcacttttaatgttcattgctagtatatagcaatgcaattgttttgcaaatgctcaacttgtattttgcagccttgctgaacgtctttagtcctaataggttttttcttttgtatagtcctgaagatcctctacacacaagatcagttctcccatacagattcctttagttattcctttaattttgttttaaagacacaaaatattttattatgctacatataaacagagtttttaaaaactgaaacataatagctacatatatttttagagtacatgtgatatcttgatatatgtatatatcgtataatgatcagaacagggcaaaagagacatccatctccccaaaaattcaccccttctttgtgttgggaacatttcaattgctctccaccagttattttaagatatacaaattattgttaactatagtcactctactgcagtactgaacaatacatcgtgttccttctaactgtatttttgtgcccattaacctaacacctttttttttcctccagtttgaattttgactcagcaatgttcatgcctagacctcttacttctgtcgttggtacagcctgttcctgctgctgctgcttcttggtcttcaggttctccctatgcttgttcagccagtggcacatgatacaagtattcttgggccacagatctgggggctagtatttcttgcccttgtagaacttcctgaggtttgttttctgagtttggctaatgacggtgagaacacaggcaacagatttggaaatgactacaatctaagagaactggaatgtcgggcacctgtcacttcggcgacatacatctgggacaggtctaccttcaggttgtccagctgtcttagcagctcctcttccttcttgcctcaaagatcctgagccttaatcttggctacggctgcaaaagccaccaccgctgccaaatgccccgagggaaagagaaaagtgcccattaatcaacctttcaaaaccctttctaaatcccctgtgcccctcctcctcctaccttctggtaaccaccaatctactctctaccttcatgaaatctactttttaagcccccccaagtttgagaaagaacatgtggtatttgtcgctctgtgccagtttacttcacttaacataatgacctctgtgttccatccacattgctaccaataacataatttcatcattttctatggccgagtaatattccacttatatttatgtaccacattttctatatccattcatctataaattaacatttaggtgaattccatatcttggctaacgtgaatagtactacaataaacatgggagtgcagacatttcttgaatatactgacttcgtttcttttaaatatataccaagcagtgggaatggagagtcatatggtagttctatagtttttcaatgagcattcacactctttttcatactgtctttttcagagagtgtatgagtttccctttcttttcattctggccagcactcattgtttattgtctttttgataaaaaccattttaactcgggtaaaatgatatctcctgtggttttgatttgcatttccctgtaacactgaacatctattcatgtatctgttggccatttctatgtcttcttttgagaaatacctattcaatcaaaaattttgcccattttaaaatcgagttatttgaccatttgctgttgagttacttatatattctggttattaatcccttttcaaatggatagctcaaaaatatcttctaccattctgtagcttgtatcttcactttgttgattatttcctttactgggcagaagggttttagcttgatgggacaccacatctaaatattttagcatttgttgctcataatttagaggtcttcccctcccccgccgaccccctgcaaaatctttactcatcccaccattgtagtgtttccccaatcttttcttctagtagtttcatatttttagttcttacatttaactctttaatccaagttgaggtgatttttgtaaattgtgaaagttaagagtctagtttgattcttcttcataagcatatccagttttctgagcaccatttattgaagaaactccccattcctcaaagtatgttcttggagcctttgtcaaaactaagttggctataaatgcatggatttctaggtttctctattctgttccactgaccaatgtgtctatttccatgccagtaccatactatattggttaccatggctctctctctctctctatatatatataatgtataaatatatatataatgtataaatatatatagtataaaatatatataaactatataaatatatatagtataaaaatatatatatctaaatatatgtatatatataattttttttttttgtttttgagacggagtctcgatctcttgcccaggctggagtgcagtggcacaacctcggctgactgcaacctatacctcctaggttcaagtgattcgtctgcctcagcttcccgagttgctgggactacaggccaccacacctggctactttttctatttttagtagagacagggtttcaccatattggccaggctggtctcgaacttctgacctcgtgatctgctagctttggcctcctcaagtgctaggattgcaggtgtgagtcaccgcatctggcctggttcttctttaaatgtctgacagaactgagcagtgaaactgtcagatcatgagcttccctttgatgggagaccattttattagtgctttgatctcgttactcattactggtctgttcaagttttttctttcttcaaagttcccgatgaacttcgtggttcttgaatcttcttggtagtttgtatgtttctaaaaatacctccacttctcgtttttccaagtagttggggaatacttcttcataagagtctctaatgattttgtgtttctttgtatttctgcggtatcagtagttatgtctctttttttgtttctgattttattgattttggtcttttttcttagactagcaaaaagtttgtcaattttgccttttgtttttttgagacggagtctacctctattgcccagactggagtgcagtggaacgatcttggctcactgaaacctctgcctcctgggttcaagcaattcttgtgcctcagcctcccgtgtagctgggactacaggcatgcaccaccacgcccagctaatttttctatttttagtagagacagggtttcaccatgttggccaggatggtctcgatctcctgacctcctgatccacccacctcggcctcccaaagtgctgggattacaagtgtgagccactgtgccttgccaattttgccaatgttttaaaaaacccaacttttcatttctgttgaccttttaaattgtttcttaaaatctgaacttcactttttatgctctgacctttattgtttccttccactaatgttgagtttttttcccatgcttttctagttctttacagtgtttcattagattgtttatctgaaatctaagtttaagaaaacattaacacataataactatacatatttatggggtacatgtgatattttgaaatatgcatgtaatgtgtaataatcaaatcaggatattttggatacccatcacttcaaacatttactacatctctgtgttgggatcatttcaaatcttccagctattttgaaatattcaacaattataaactatattcatcctccggtgctatgaaagaataggacttattccttctaactatatgtttccattcgcctccctttaatcccaccaccaccactatccacagcctctggtaaatatcattttactctctatgtccatgatatcaactttttaaactccctcatgagggagagcatacaatatgtgtctttcaatgcctgacttacttcactcaatataatgaaatgtaattttatccacgttaccgtaaatgccaagatttcattttaatggaagagtaatattctattatgtatatatgttacattttctttgtgtattcataagttgatggacacagattaattccatatcttggctatcaagaatagtactgtagtaagtacagggatgccctataactctgacattaatttccttccatttggataaaaacatagtagtggggttgctggatcgaatgaaattactcctgggttaaatttattcccaggttttttcttttgtagctgttataaatgggattactttcctgatttctttttcaactagttcattattagagaatagacacactgctgagttgtgtacactgattttttaccttgaaactttactgagttcatctatcagatctaagagtttcaggtagagtctttaggttcttctatatataagatcatgttatctgaagaaaggacaatttgaattccccttttcaaacgtggatgcatttcttttgcctggttactctggctaggacttccagtactatattgaatatgagtggtgaaggtgagcatccttatcttgttttagttcttagaagaaaggatttcagttctgcctcagtatgtagttagctgcagctttgtcatacatggcgtttactatgatgtgttctttctatgtctaatttattgagtttttttattatgaagggatgttgaattttatgaaaccctttttttgcatttgagatgcaaaaatatataattatattaaaaatataatttttgacctttttgtgacgtatcatgtttattgatttacatataataaaccatcctaccatccctggaataaaacccacttgatcatcgtgaatgatctttttattgatttgttagatttggtgtgctggtattttgctgaggaattttgcatctaagttcgtcaggaatactggcctatagtgttttcttattgtatccttatctggttctggcatcaaggtaattctggcctcatggaacaagctaggaaaaaatccctcctctccaatttttcggaatagtttgaggagaactgatgttagatcttctttgtaagtttgtagcattcagcagtaaaaatctcctgggctcaagcttttctctgttagaagacattttattactgaatcagtttcattactcattattgatctgttcaggtgttctatttcttcatggccaaatattggtagtttcctcatgtccaggaatgaatctgtttcccgtaggttccaatttgttcagacagttgttcacgatagtctctaacaatcttctatttttgtgggatataagttttactgtctccttttttggttgggattttatttgtgtcttcttttttaatcttggttagtctatccagcaatttatgaatgttgtttattctctcaaaaaaaaaacccaactcttcatttcactgatcctctgtatagcctttttttcacctctaatttagttctgctctgactttattatttcctgctgttaattttgtatctggtttgttcttgcttttctagttccttgaggtgcatcaataggttctttaaaatctttctactttcttcatgtaagtatttgttgctattaaacatccttttatcatggcttttgctgtatcccacatattttgatatgttgtgttcccattttgatttgtttcaagaaactttttgtttcttatttctccttaaatccagtgatggctcataattgtggcttaatttccttgtatttgtacaatttccaaagttctcattgttgatttctagttttattccatcgtggtctgagaagatacgtgatattatttctatttttttaatcgttgagactacttttgttgtataacaaatagtctagcctcaagaatgtcccatgtgataagaatacttgttctgtagctgttggacaatatgttctgtaaatgtctatcaagcgcatttgatctaaaacgaagtttaaatccaatacctctttgttgatgacttggctagatgatcagtccaaggctgagagtcagttgttgaagacacctaatctgattttattggactcagtctctccctttagattcaataatgtttgctttctatatctgcatgctccagtgttgggcgcacaaatatttagaattgtttaatcttcttgctgaaatggtccctctaccattatagaattaccttctttgccgctttttggcttaaagtctattttatctgatactagtgtagctactcatgcttgcttttggtttctgtttgcatggattatctttttccatcccttcactttgagtctacgtgtctttaccagtaaagtcagttttttataggcagtatatagttaagtcattttttttttgtttttctattcagccaatctatattttttaaggggggaatttaaactgtttacattcaaggttattattcagtacttaattcctgtcattttgtgaattattttttggttttgtgtatcctctcatcctgttctcctcttatcattgtggtttgctggttttctgtagtagtaacacttgcctcctctatttatttatttatttttttgtgagaccgacactcactctgttgcccaggctggagtgtgcagtggtgcgaccttggctcactgtaagctctgcgtcttgggttcacgccattctcctacctcagcctcctgagtagctgggactacaggtgcctgccaccaagcctggctaatttttttgtatttttagtagagacggggtttcactgtgttagccaggatggtctcaatctcctgacctcatgatccgcctgccttggcctcccaaagtgctggtattacaggcgtgagccaccgcgcctggcccagagttttatacttttatgtgttttgattatgacagatattgtcctttatcttctaaatgcagggctcccttgacctcttcttgtagggccagtagagtggtgattaacttcaatttttccttgctttggaaagcatttattctccttcattttttatatcttccccaggtataatatttttggctgacagttgtgtttttttgtttgttctgcttttcaccactttggagttatcatttcatttactcctggactgcagtggccaaagtaattccatccaccacgttgatttcttattaaccccagttccaagaaggcctctaagatttccagtttatttttacttaagagcatgtacttaccataaatcccattcctaggtcaaaacaatgtaaatgttattgtacttgctataatcaatgcccttaagcagttatcctacacagcccttctgatgcatgcatatcctttttctatggcatataagccctaggtcttgggagtaaaggcacagggatccaccatctttgtctcttgaagtacctcccaagacacaatccctattaaatgttcctaagtccctattaaatgtttctaagaaactgaatttgtcagcctctttctttggcctctcatattccttgaactttgggggtagggttgtatagacttttccaccgtggaacatggcctggaaggtttctgctaagaaatttgctattagtgtgatagggatactcttctctgtgacttgacccctttgctgtatttagaattctctttttcttggacttttaacagttcgactatgaagtggcatggagaaggcctttcagggtagaatatatttgaagatcttcgagcttcctatatctagatgtctgtatctcttccaagacttgagaagtttttacctattatttcgttaaatgggttttctatgccattacccatctgttctcttccaggaaaactgaaaattccactatttcgtcattgtatgtgttacataagctttcttcgtttttattttttttaaaaatgttatctgctcaggttatttcaaaagacctgtcttcaagtttacaaattcttctgcttgatctagagtctgttattgaaactgatgattatattttttattttactctttgaattcttcagtttcaggatttctatttaacttctttctgacatctttgttgaatttctcatacagatggtgaaatgtttctttgcattgttcatctgttttctgtagtacctgggttttcagaaatattttgaattcattttcaggtatttcatagattttttttaatattggcatctgttgctggagaattattgtgttcctttgatggtttcatgcttccttgatttctcatgtttcttgtgtccttacatttatatctatgcatctggtgtaacatttgcttcatccaactctatggattgggtttcgaagggaaagacatttttttctatagagctatctatagagttgtttgggtaaggcgttttggctttgattctgggtgggagaagcagtgcagtctccatatgacttctttgactatctttagcatcagtggtgtctatgagttcctcagtggataaagctgtggcttttagtaacggctgtagtgaggctttgctagtgaaagggacatcaggcaggccagttcttaggcaacagtgatggcaactctgggatggatatgcaggatctcggtcaacacacgtggatattggtaaaagcaggtcaggaggacgaatccttggtcttcaagtggattgtctgtgtgctagcagtggcaacaatgggctgagtgaatgggtcctcaggcccttagatggtatgcataatgtctgcggctgcaacagcagcagagggctaacttggggccccaagctacagctttgggtgccagcagttaggggtacaaagggcctagtggccatcaccgagcatccaagtggcacgcagctgggtggcacatggccgtaggcagggcagtggcagtctcacttggtcatgctatataatcctttttatattttgttgaattaggtttgttttagaatgcaagaaatattcataagggatatctttatcatgacttgtctcattttggtatcagggtaatagtgctctcatagaattacttaaaaagtgttactctttttttctgaagggtgtaaaaaaactgatgttaaaacttctttaaatgtcgatgcaattcacaagtaaagccatttgatcttaggcttttctttgtaggaagttttctgattactaaactcttcacttgctaaggatctattcaggttttgtttccttttgagtttcagtagtttttatctttctaagaatttgttcatttcatctaggttatctagctgttgacaatattcacttacagtagttacttccataaggccaatagtaatgccctcttcattactgattttagtaatttgagagttcttttactcatggtcagtctaattcaacttttgtcagttgttgatcttttcaaaaaacaagcttctgatttcattgctttttctctattactcttctattctctgtttaattcatctttgctctgattattctttcccttctttggactgagtttgcttttgtttctttcattaggttagactgtaaatttgacatttttctaaaatacagcaatttagagcaataatttgcaatttggcaattcatcagctgtataccataagttttttatgttgtattttcattttgctttttttgttgttgttgagacgtagtcttgctctgttgcccaggctggagtgcagtggcacaatctcagctcactgcaacctccgtctcctgggtcaagtgattctctcacatcagccactcgagtaactgggatgataggtgcatgccaccatgcctggcaaattttttgtattctgaagtagagatggcatttcaccatgttggccaggctggtctcgaactcctgacctcaaagtgatttgcctgcctcggcctcccagactgctggcatgagccactgcaaccggccaacatatttttattttcatcactatcttttagttcctcttgtaaattttttttggacctattggttatttaggagtatattgtatgactacataaatgtcctttaattgatttctaatatcattctattatgtccagaaacatgttttgtatgttttcaatccctttttgcgaattttgtcctatccttgagcatttttcatgtacactttaaagattactctcctgtcatcaggtatctgttagatctagttggtttttatgttgttcaagtctatttccttgttgatatcgtgcgtggtgattctaagcattatttaatatacggtgctaatttctcaataaaacaatttctccctccaattctgtccattgttctttcacggcttattatgtgttcagaaggaataagactttttccctacactcatacaccactcaacacaatagtcactgaagtatgtgggggtttctccacattcacaaccaattctccaggagacaccagttgggtgttttataattcaattataatactatgtatctgctgatttcatgagctcatacaggttaagggctcagccctacaagatcaccccaagtttcgggtgtcaattggtagcagtgggttgtcagttatacttctgaccaatcagctataaatgggggtttgcaggatcatctatctgggtttaatttactaggagggctcacagaactcagggaaacatttatccctttaatatcaaagatattgcaaaggatatagataaacagtgagataaagagatacacagagtgaggtctgaaaaggtcctaagtgttggggcttctgtccctgtgatgttgggatgcccaccttccaagcacatagatgtacttgccaacctcaaagctctccaaaccccatactttgggtttttacagaggctttataacacagacatggctgattaaatcaatggtcagtggtattaactaaaccttcaccctattcttgctccctggaggtggggtgtgtgcggaaggaggggaggctgaaaattccaaccctctaatcacatggttatttcccctaacaacctgtccccttgctgagcttatctaggagctcaccaaggcttgcctcattagaataaacaatgctcctatcattcatccaaggcatctaggaaccctgtgtcagaactgctgtcactcaggaggtccatttcaagaaccaggagcagagaccaaatctgtatttcttatttgtcatagtatcactggggcttatattgattggaagtgttttatcaccttgatgaaatgacccttattataaaatgttcttccttgtttctaggaaaaaatatcttacctagaccttctggatagcttgcctcagattctacattagcacttgctgctccaccaagcattttaggttatgaagacactttctttcctaaaacttcatgaaccaagttctcctagcttccaacttttcttctgcagcttcctcacctctctcgaccttcatagaattgaagagactcagggccttgctctggattaggttttggtgtaagggaatactgtggctggttggataccctatctacaccaccaaaacttgctctgtatcagtaataaggctgttttgctttcttattcttgtgatcaccggaatggcacttttaatttccttcaagaacttttcctttacattacaactttattaactgtctggtgcaagaggcctagcttctggcctatctcagcctcactaaacttaatcatttctaggttttgattcaaagcgagacgtatgaaactcttcctttcacttgaacacttagaggccattctaaggctattaattggcctaatttcaatactgttgtgtctcagggaatagggaggcctgaggagacagagatgggggaatggccagcctttggcgcagtcaaaacatatatatttatcaattaagtctgctgtcttatatgggaatggttcattgaaaaatggcactgataagactcgcttgacgcagggttccatcaaccttcactttgttaggaaaaatgttcagtgactgcaaagtgtaataaagcaaaggacaataaaatgagatacgcctatacttaaacttacaataaaaagtttccctgtggtcccagctgctcgggaggctgaggcaggagaatgacgtgaacccgggaggtggagcttgcagtgagtcgagattgcgccactgcactccagcctgggtgacacagcgagactccgtttcaaacaaaaagttttccaatttaaacttgaagaagagatactatttaaaaaaaattcttttgggagattcatgaacaagatatttaaaggctacagagtcaaaagtgttttttcaggacaccattaatttctactttaaggaattattaaaaacatcatttaagtaataattgtcataattcataacattttaaaacagtaaagtctatgaagctattttggtctatgaaatcatacctcatcctaaattcagatttactttaactgcttatttggcagtgccttctgtccaatttcaacagtgaccataccattatctatgtcagcacaaagataccaatttgactcacgtggactttgaaacagccattaggaaaaatagcagttaggtgggcaagatggatatatagattcagaccaacaaaagccaattcaaatacttggagtcctacgcagtaagcaagtattagtacaatcatccaatagactgtaccttaattttctttactggttcagagaataaagataatgtggttttctatgtgttaaaaatgtccaacaacttctcgaatgcttgactagctgaagttgcttttatctgttgattgtactcctctgactcactgatcattcttctaggcaagaattattaggaacaaaaggtgaggagtcagatcagtccattttgctgcttactggcacatatttaaacacattccttccactcaggcgtttataccatttccaaagggaataaaagtaaaatgaagtctttgtcatcaagaaatactcctcacgatgtctggatttttttctccttgtcatgtaccaggctgtctcaattattttaaaatactattattcaggcaaacactactcaacgaataaagcaaattctaatcagtgattttgtggctcaaggcttcataagtatccaagagaagctcatacactatcacagttccattcattttcttcccaaattagttttggataactttgcataaaagtagttctgctctgaaacaaatgttgaccagttgcatgccaataaagtactttaataatactttttcatattttaaatttcttcccattaaatcaataaagcatggagatttgaaaatgcctcctgatgcattgagaggtacagaaatggtaccttgaaatcaatatattttctatcaaaacagatgcaactaaagatgaagctctggatcattacctttaaaatcagtaggcattttaatcaaacttaaaaaatatcaaataacaaaatagatgacaaagtggaaagtttaaaaaaaaattctatttggaaccccaaaattccaggcaggcccaattcttaaatatttggctaatcaaggtatcatcctttatgggagcaaatattaatcaaaagtcaaaatactctctatatcggaggcctacgtcatcccgcaacaatttaaggctactctctgcagcgacaatattaccattttcaaatgctttcttatgataaaaagatgttttctctgtttgtgttcgtttaaagatacattaaatgccctttagagcaaagttccttgataaatttatcatttctggaagaacttatcctcaatatgtttaatacattcccataaacaatttttagtaaagaatttggggaaacaagtgtccaagctctagcaggtttcgtgaactaagggcaagactccaaaacagacaaattctgtaaatttctgtaaaggaccagagagtaaatattttaggctttgcaagtcatatattctgttacagttattcaacactataattggtgtgaagatgtaaacaactgggtttggctatttacgataacactgatttacagaaacaagccccagatggattttgcctatgagtcataacttgtctaccccttgtcttaaagaaaaccagaaggaagtggtattggtactgaggacaacatcgtgagcgagcaagcaaacaggttaggcatcctgatgtattctattctccaaatgcaggttttcgctttgttaaaataaagggcactttcccctgaccataacagagaagcagctcccaacttctgttgcaataacgagagcaaaggggaaaatgaagatggagaatttcattcatatcaggagcagccagaaaccgtatacaagcttcggcaccaaactcagcaagcgggtgaccaaatctttgagcgtgccatccctggcaatctggggaatgtaacctacaaagctctgaccatcgcctaacttaaaatcagccctaggagagctgcgaatagggcagctgtgtcaatcaggtattcactaggaaagctgacaacagcatatactctgattcagaggttgaagaattaagcataatgattctaaaattcttcatttttgatagtgtcaggtctggaagctttgcggaaaacgtgcttttggagaaactaaaagccctcatcatccattggtaaaatctggcttcataaatctcaggatattaaaaacacagcaggcatactctcccatatgacaattccacctcctccaacatgttacaataaatggtggaaaggcatactactgatttggtaattacttcagttatgtggctctgctgaaagctcctgttttgcttttattttgcatgctttgctatcaaataagtttgattatgtcatgctgccctcaggtgtccattcctttttaaatgtatgactggggggcaaaggaggaccctttgtaaattttaaaaccaggactacagtggatattcaatgtgctctctcacaaaccctaatcacagagctcatttaagtgctaaaagctcaacatttaggaatatctgatatgtcactgggacttctcccacctgtcctataatatcctgcctttgaaaaaggaatcagagtggtaaaaagaaaaaaaggaactaaaaatagtaccacagcacagtggttctcaaagcgtttcagagatactgttccagatgtccatgaggtcaaccctatttttatagtaacactaaaaacatttttttcattctctcaaatatacagtagagttttctagaagatgcatgacttctgatacactgcaaccgactataaacacaaacagatatgagaatctagccatcttttactaagccaaatataaaaagactagcaacaattttaagtgctattctttaatatatttctcacttaggaaagtatgactattattcataaatgtgttattcacttaatgggtttttaatgatttaatgcaatttaaaaatcttatcagtttcagttccagataaatattaatatgtaaacaaaagattttggggcttctcaaaaattttaagagtataaagctatcctgggaccaaaaagttttagaatactgaaatatcagacttctattgatatttcatggaaagcacttcccctaaaatttgaaaagataaacacacctaactcactgtcaaattacaaggactaaccaaacaatttttaacttgattgctgtagcaggactggcattaaagtaagcaacaggattggaaacaagagtcaggggtttcagccaccatcatcctcattcctccctccttcctccacaatcaatttgcagaaagtaagaaagagcgaaactgacttagaatttgacctgctttccttgatcacgttctataacagaactgtgccaatgtaaaaagcttacagtgataagaagactgaataatgtgtaagttagataatatgaggtccctcaataagccccactgacacaactgattaaagctaccctgaggtattttccatatataaacctgttcttaaaaaagcaaaactaccaaaagtgggaggctagagggtggggaaaggggacaggtgaaggaacagaggatggaaaaaaggaaagaaggctttcattctaagaggtcatagaatccaacaaaattgaccagtgcatgattaaactatggcatacttagataaggattcctattaaagtctagaccattggcaatatgatagtaaattatattctcaatttcaatttacaattcatcatttttagatcataacatttttcttttttcttttcttttttttttttttttgagacggagtcttgctcgctgcccaagctggagtgcagtggagtgatctcggctcactgcaagctctgcttccaaggttcatgccattctcctgcctcagcctcccaagtagctgggactacaggctcccgccaccatgcctggctaattttttgtatttttagtagagatggggtttcaccatgttagccaggatggtctctatctcctgacctcgtgatctgcccaccttggcctcccaaagtgctgggattacaggcgtgagccactacgcctggccaacattcttctataaaaacatttcaacacctaatggttaggttctcaggctattctctatatccttattgtggagacagaaagagtattggtgaaaatgaacgccaggccccactagaaaccctctgcaactgtgagatctagccctgatccttctcttaggaccaccgagaagctgcagggatgacggccttggggccactgtgtctgggaagctccaagtcaggtaaaaacatagaccaaaagcttctcaaggtgataagcaaccttggcgaagtctcaggatacaaagatcaatgtgcaaaaatcactagcattcctacacaccaaaagtcaagccgacagccaaatcatgaatgaactcccgtttataactgccaacaaaagaataacatacctaggaatacagctaacaagggaaatgaaggacctcttcaagaagagctacaaaccactgctcaaaaaaatcagagatgacactaacaaatggaaaaacattccatgcttacagaagactggaagagtcagtatcacgaaaatggccatactatccaaagcaatttatagattcaatgctatccccattaaactaccattgaccttcttcatttaattagaaaaaaactattttaaaattcatatggaagcaaagaaccacccagacagtcaaagcaatgctaggcaaaaagaggcaagctggaggcatcgtgctgtctgacttcaaactgtactacagggctacagtaacccaaacaacatggtactggtacaagaatgaacacacagatcaatggaacagaatagagaacccagaaataagactgcatgcctacaaccatctgatcttcagcaaacctgacaaaaacaagcaatggggaaaggattccttatttaatacatggtgctagaaaaactgggtagccatacgcagaaaactgaaactggatcccttccttacaccatatacaaaaatcgactcaagatggatttaagacttaaatgtgaaacccaaaaccaataaaaccctaacagaaaacataggcaataccattctgcacacagacatgggcaaaaatttcatgattaagatgtcaaaagcaattggaataaaagcaaaaattgacaaacgggatccaatcaaactgaacagcttctgcagagcaaaagaaagtatcagagtcaacagacaacctacagaatgcgagaaaaattttgtaatttatccatctgacaatggtctaatacccggcacctacaaggaatttaaatgtataaggaaaaaacaaacaatcacattaaaaagtgggcaaaggacacaaagagacacttctcaaaagacatatatgcggccaagaaacatgaaaacaaccttaatatcactgatcaatatcgcaaatcaaaaccacaatgagataccatctcacaccagtcagaatggctacattattaaaaagtcaaaaaacaacagatgatggcgaggttgtgaagaaaaaggaatgcttttacgctgttggtgggagtgtaaattagtttaatcattgtggaagacagtatggtaattcctcaaagacctagaaccagaaataccatttgacctagcaatcccattactgggtatatatgtaaaggaacagaaatcattctgttataaagatacatgcatgcatatgttaattgcagcactatttacagtaggaaagacatggaatcaacctaaatgctcatcaagggctggataaagaaaatgtagtacatatacaccatggaatgccatgcagccacaaaaagagaatgagatcatgtcctttacagggacagggatggagccagaggtcattatccttagtaaactaaggcaggaacagaaaaccaattaccatgtgtgctcacttgtaagtgggagctgaatgatgagaacacatggacacatggggcagaacagctcacagtggggcctgtcagagggtggagggtgggaggagtaagaacatcaggaagaacagctaatgaatgccaggcttaatacctgggtgatgggccagttagaatggtgatcattaaaaagtcaggaaacaacaggtgctggagaggatgtggagaaataggaccacttttacactgttggtgggactgtaaactagttcaaccattgtggaagacactgtggagattcctcaaggatctggaactagaaataccatttgacccagccatcccattactgggcatatacccaaaggattataaatcatgctgctataaagacacatgcacacttatgtttattgcggcactattcacaatagcgaagacttggaaccagtccaaatgtccatcaatgatagactggattaagaaaatgtggcacatatacaccatggaatactatgcagccataaaaatgatgagttcatatgctttgtagggacatggatgaagctggaaactatcattctgagcaaactaccgcaaggacagaaaaccaaacaccgcatgttctcactcataggtgggaactgaacaatgagaacacttggacacagggtggggaacattgcacaccccctgtcgtggggtggggagagggaggagggatagcattaggagatatacctaatgtaaatgacaagttaacaggtgcagcacaccaacatggcacacacatacatatgtaacaaacctgcacgttgtgcacatgtaccctagaacttaaagtataataacaaaataaaataaaaaataaaaaaataactctgtaaggtatcaaaatagaaaaaaaaaacaaaacaaaactgggtgacgagatgatctgtgcagcaaaccacgttggcatttgtttacctatgtaacaaacctgcacatcctgcacatagacccctgaccttaaagttagaaatcaaaagatctttgcaaataataatttaggaaaaaaagccaggtaagacaagacaaacacggcaccaaggagataggagagaggactccaaaggagaaggcagtgctagcacagtagaaattatgaccatggatggaatctacagcaggggaaagctcagagagaaaactgaatgccaacgatagctttcatggcagatggcatcacctttcaaggcagagggcatcacagatacagagaagcacagacagaagaggtatccacagggaagatattatcctgcaggacgatgagaggatagcctgcaaatgtacttaacagctgccagttacaatagtgatcattacagatgcagagagttcttgaggatattaactctatgaggttcatcaatatcatggaagtctgtgatgtttttgacagtgaaaatataaaatagcacaatatgaagctgtggggaaaagcaagagagatcagattgttactgtgtctgtgtagaaagaagtagacataggagactccattttgttatgtgctaagaaaaattcttctgccttgagattctgttaatctataaccttacccccaaccctgtgctctctgaaacgtgtgctgtgtcaactcagagttgaatggattaagggcggtgcaggatgtgctttgttaaacagatgcttgaaggcagcatgctccttaagagtcatcaccactccctaatctcaagtacccagggacacaaaaactgcggaaggccgcagggacctctgcctaggaaagccaggtattgtccaaggtttctccccatgtgatagtctgaaatatggcctcgtgggaagggaaagacctgaccgtcccccagcccgacacccgtaaagggtctgtgctgaggaggattagtaaaagaggaaggaatgtctcttgcagttgagacaagaggaaggcatctgtctcctgcctgtccctgggcaatggaatgtctcggtataaaacccgattgtatgctccatctactgagatagggaaaaaccgccttagggctggaggtgggacctgcgggcagcaatactgctttgtaaagcattgagatgtttatgtgtatgcatatctaaaagcacagcacttaatcctttacattgtctatgatgccaagacctttgttcacgtgtttgtctgctgaccctctccccacaattgtcttgtgaccctgacacatccccctctttgagaaacacccacagatgatcaataaatactaagggaactcagaggctggcgggatcctccatatgctgaacgctggttccccgggtccccttatttctttctctatactttgtctctgtgtctttttcttttccaaatctcgcgtcccaccttacgagaaacacccacaggtgtgtaggggcaacccacccctacatgaagcattaaatttttaaaataatttttataatagtcattttccactactaataaaccaaatatttatccactatttaagattctaggctcctagaaagccaatgcaataattaagtttatagattagaaaagaaataatgaattcttacaatctatctcacactgaactccacatttttttaacactgttctgtgacaaaacctaaacatactttcttccttgattatattcttctccctaccagtaagttgtactagatatggtttcaaccctttccaaacttacaacccaacactaaaaacattagtaaggtcgtgcctgatcattaaactcagaccacagggcatgatactcaacatgctctgagtatgtcaagggtaaagtatatgtaggaggcccagcccgagaaagagagctacctctaagaaccacaaccaggctcttataccaattgtacatggtgggctggcttctgccaatactggagaacagagggatgctggacaaaactgctactgaaaatctcaagccttgatgttaaaaggtacattttgtcaaaaaatcttgattaaaaacaatgccctggctactgcctcttaccatggcctgaccttggccagccactgacttgtgtatctcttgtgactttctagttgtggaactggccagctgactatgctctgatctatctcactcctcactgctatgcaattctatacttaaccctcctaccaccttagaacaccagccctgggtgataatcctgccaggacggtaggaacctgactaaactgtgactgaagtacaagcaagctagttagtggtaggaaacagaacgcatttgaagatccatccagaaagggagtaagtataaacttattctgacatatcaaatcttatccataccatttcaaacaaggttgaagaaaaagactttcaactcttaccttgttgatagttgaaacaatattcaataaaacttagttccaatatagcaaagaaagaaactctagagtttaagagaaatgtatctgtatgtgtagaagtttaatttacataagtattttgtagataaagaggcatttcaaaaataaaacaaattatatagcaaattcaccacacgactacaattataaaatatttaatttaagggaataaactacttgcagacaagtaaaaacaagtagatactcttgctaggaaaatgatatatcagtcacatttttttaaaagcaggtactgaattctccccccaaatattgtatatacttcagattgttttttatctagcctaattagagaagtttaacatgatccaacatgaaattaaaacacctccccagtgttttcccatcatagcacctcagcaacctgctaccatgtcttcagtgaaacctgactaatgaggtcagcctagccaataccatcagagaggattatttggcttccatgaacattgtctcattcacctctgatccttacccaaatggcaaagagtatggaaaggaggaggcacacgcatgctatatacatgtttgttgaaggggaaagttagaaaaagaaagggatttcaacatgtcacattagctaaatgtaagtaaaatattagtatacattccattattttattagtaaggaaattagcaggccaaaccaaggcccatattaatgcattctcagtgcctcattcctcagagtaaaggaaaggttcaccaagagcagccaaaacaagttaatctcccaagaggggagtcagacctcctcataggggagtcacccctcccctactgaaagcatatgaggacaagctggtcttggcacttcttagaaagatcatgctgcagtattgctattatgacacaacggtaaggaaaaaaagaataatggttgattagtgtattccccatgaagattattctggcatcggatcaagtaatgggtggtcatattctaggtagtatagcattaaggagaaggtgaaaaggagcagaacagtagaaataattcattttatctcctgcatgattcgatttcataggggccatgctgacaagtcaaacagacactaaaacaacaacaaaaaaatcaggcaatcatgatgcaagagaagctacatccagaattatggattaaaaacttaccacctagaagaataatttatttttaaaatgaatccagaggagaaagatagaagaaacatatttacatggttagttcttatgatagctactatatattcaacagacttgtaacagcatgcattatggaaaactaatacataaaacctaaatagacaatcccaagtatatcgcacacatttttaaaacagagaactacttatcaccaaacacatgatcctgaatatgacagagattcactgttattgataattttctccctcttctatcagtaattttgccacgactgccaattattaattatccatgattggcctaactcaaggtaatattaaaatgttaatttatgtaaactcttttccatcccagttgccaagaagaagcaggatgcttcatctaatctccttacaattccttgtaagtctaaagaagagcaaatgtcctagatttgcagctctaaacctgtagctactgaaacctgggtgtccacagctcatctagacatcaagcatgctgagatatctaataaaaaataacatctttattggttgctacatttcaagttcttatgattcagatacatgcttatgtaaaagtattattaaagctatattagctttttaaaaatgcaatctaggatttagtagaaacaaatcatcaaaaatgtgacaaaagctctaagagatctgcaacctttaaagagaaattgcaatattactgaatttttttcctcccaccattaaacttttctcagttaacagatgctaaacgtacaactcttttatgttgatggaacctcaaaatatctagtgtgaagggaattcttcacgctggtgatcactgacttgattcaatgttatatgtggccaaacgcactcaaaattttctcctttggccagaaaggctaaggaaaagaagggtgcaaagagcaactgttatcaccaaacagccagacaaagcagtgaaaacttgcttggccagtaacacgaaaaaagtggtcatgacaatccactgactggccatccctttaacaagctggatgaacattagattgcggtagtcatgtcaagattcacactgtgaaatgcctgcatttccacatggtgtattagccgtgctatactgcccaagaatgcttcctgaaagtattttcttttcatctgtattatctctggacacgtgctacctatgtttacaagccactaagtgattctaaattcacctcttatatatggcaaaaggaactttctagctgagtattttgagatatgttaaaatgatgttaaaattaggattctatcactatatctcctgtttgctttctggtggtggaaccctttctccctgaaccccttcctcttataacagctagtccaacttaatggtcccatagagctccatggttcctttcttaaaagggaacactatattttccaaaaaaggaaattatgtgactagcagaatatctaaatatcaattttttatatgtaatttttaaattgtaagatatattacggcaaatcaagggataatatactctacacagacacctgattttctcttcaaaatacaatcagaattcgttaaatatggactaatctatacttacttagagcaaaaattacttcatagtcccaggttcatttattttaaagagtattatgaagagttcgagtaaatgctaaaattctacttctacaaaacttgcaaatttatatataattatacattttaacactttatcttgtatcttaagtagatgatgagacggtaattagtttgttttattatttcaactagtaaaagactagataagctgaggggcacaagaaaggctgagttattcaactcactatggtatgtagggaaaacacaattcacattttcagatctaatttgtattctctccatcattatctatcaactgtaattctcaaccagaaaacaaaaataagtaaaagctctgtctgccatctactggacaaagaagacacagaacacacacattactgctaaaacaactccagacaccaggacgatggatttaaagtcatactctgtgctagcatgtgaaataaaaaaattatttcttttttcaaagatttctttttattcacctgccatgggaaccatgtagagaatgggaaacggggaggcagaaaataaatgtgtttgaacataaaagcagagataagcccgacatgttttggatctaagtttcacaaatccacacttacgtggccatgtagatcggtattaagaagcattattgcacaggtaaggcaatggactccatctaaagaaagatacaagaaaaaaaagcatgaattcgcttttcactgttggactccaccttattatcactaataggatacactcagaacctatgaaaacagtactgtgctaggtacaattagtcctgttttaagaaacaaaaaatggataagaataatttatagaaagaacctcaatgcacagaactggactccactgttgataagttgttcttacctctctggaggacagtttggtagtagatatgtaaagccttcaaacaatgtcttttgatacaacaaatcggcttctagggctttgcactacagcaataattagtgatctatacatagtacaaggatatccagacaagcattgcttacaatgggagacaagtaaatatgagcctccaaagacacattactgttaggttaaagtcatataaaaatgttctccaagtagagttaagattctcctttccaaacactacaattagttgttctcgttactctcactctgctaattctctacacaagtacagtagacaatagcagtttcagatgcagtaaaaatcttttcaatttacgctaaattagaaggtctaattattgcactcataaattaaagccagggtattttcaaaagtaagttctttagtatagtaggtgatttctgttatcagtgtctctaaatagacactaccaaatggctaaaagtatatttattctagtaccactttattatcacaagttctacatatatttaaaacaaattctcgaaagtattttaagaactcagcagccaactctcaaatatcctcatcaacagccaattaagtcacgaatccatatttcttattttatccaagaatgtaaacatattcttagatttgaagaaggttctaataaaaatggcccacttttatctccttcattctcttgtcagggctaatggtgacagagatagtgaataactggtctgaatagcatcagtttaccgataggaatgtgaccttaatcaggtgataaactaactgtgactgcagccttggacatggaggggaggttgaggcaagcaccttggccaataccaagtaaactatccaggttaactggcaatactgaagctaagaggtaattactatttcttgggaatctagtctcagtgatttactccatcatctgtaagtttatgaaacattttccagtcacaagtcaaagtgcttcacttcaaacactgaaaagtgtactttattgcaggaactgaaatggaggaaagatctctcttcacaaggtaggtccacaaacaaacagtttaccattaagtcacttactttgtaaaaatagtgtaatatgcataacctcatagtttattaaaatcatcaacaaaagtttgtggtcagtatagtacaattaatatcaaacgaaagcaccagagacacagcgcaaccaccagtgagatttgttaatttttccaaaactaactccaacactcaggatacatgagctttcatcaagaaacatagagaccaaatgtataagaaataagaaaactgaaatttcattcattacataaaatctcagagtgacaaaccatgaacaatttaaagaaagtacgctgtcacactagagaagtggaaaacaaaataatttaagtaagagtagaggatatcatgctgtccttaaatattatgcttttaaagaatatttaatgacatgagaaaatgctcacaatgaaataaaaaggcagctaaaaacaaaactctaattccaatttgacattaaatattaaatagactagaatgaagtaaacagaagtgttaatagttatcactaggtaactgaagatacataatttctcacaataaaatttaactttcataataaggaaaataaccattgatataaaaaagaaattcaaggatttgtatcagattaccttgtgaagcaatggtatctgggttacaataaaaatatctattggagaagtgtattaaaactctctctcgttcttgagtttctcccacaagagagaatgctttaaagaaatacctacaagagaattaaaaatttaaacagtgaaattttcgaaaatgctatcacactctttcatagttaaaagtcaatttatataaacctaagatattaattatacaaagtaagatattatgaagttatctccccccaaaaaaatcatttactagacagccattcaatataaattggtattagtatttaaattctataaaaagcactgtgggaggccaaggcaggtgttcacttgaggtcaggggttcaaaaccagcctggccaacatggcgaaaccccatctctactaaaaatacaaaaattagccgggcatggtggtgggcgcctgtaatcccagctactcaggaagctgaggcaggaatcgcttgaacccaggaggcggaggttgcagtaagctgaggtcgcgccactacactccagcctaggcgacagagtgagactccgtttcaaaagaaaaaaaaaatgtccacttaaaagatgacagggtgataacagagtggtcagtacatcaagaaagccttgggaaggtaggtaatttcctcattatgaccaagtgtcaagtagccaattttaaaaggtcagatttaaaaaaaacaaagaccgcttaagactcaatacatcatcataaaggctatgttttaaaactctacacgcatcagggtgcttctgtcattttgttacatgactgtcatctctattaaagccactatggattgcattgctttgtgcacaggagatttctgttaattgtgtctgttatcacattttaatattaatttgttataggaggaggaaattgggagatataagtaatttattccttacataatggaattagtttatgtataaaaatatctttaaattataggaagtgtatcaaaaaccacacattaatctactcggagtcactaagagcactgtttatttgagatgaatccagatgaccctcacttgacaatgtagattcattttcctaaacatgagatgggaaggaaaaaaaaaatcattcaaaatgtctaagaaatcttactatggtaaaaaacataccatgagcctcatttctatgaaaattttgccttcttccttattataggtataattaagattaacaaactatatattgacaaaactttaatttttcataactttaataaactacatcagaatgcaaggcaaaaatacagatctttcatccactgataactgtttttgttagaaaatctgagtacctttgctgcatgaaaagagccccacgataaatcactgcagtactacactccagtccaaacatcctcccttcacctcccagacctcagtttcttgatttgtaaaattaaagggttacactagatgatctcagaattcttccagacatggacattttataaatagtgttgaaaattaaatgctgactaggttttaccttcagctacttagaaacttgtaatacaatataatgtaaaaagtgagaatcagtgagttttagacaccttcatttgaaaaggtcagaaaaagtggatattgttgcaaacagttttatagatactttctactgattatgctgacattcatttttattccactgaagagttaattccaaagtatcaccttaaaaggctattggggctaggtgcggtggctcacgcctgtaatcctagcactttgagaggctgaggcgggtggactgcctgaggtcaggagttcgtgaccagcctggccaatatggcaaaacctcatctctactaaaaatacaaataattagccaggtgtggtggtgcgtacctgtagtcccagttattcgggaggctgattcaggagaactgcttgaacctgggaggtggaggttgcagtgagccaagatggtgctactgcactccagcctgggtgacagagcgagactctgtctccaaaaaaaaaaaaaaaaaaaaaaggctattgggctatagtaagcaaatataataagcaaatacttaggaaaaaaatctaattctaattctacaatctataaactgtgtgtgtgtgtgtgtgtgtgtgtgtgtgttaaactcatcattcaaaaaccaaactccctactcaaaacaattgaaaacagggtcttgaagaaatatttgtccactcatgttcacagcagcattaatcacaatagcaaaagcatggaagcaacccaagcgtgtcctgaagctgacggtggtatatatattccccataatggggtattactcagccttagaacgggaagacattctgatatatgctacaagaatgaaccttgaagacattatgctaagttaaatgaatcacaaaaaggcaaataatgtatatatcaatttacattacagtagtcaaaatcatcgagaagagaagtagaatagtgtttgccaggggctgggggaaaggaggggaaggaaaaaaaaagtcattgtttaacgagtatggagcttcagttttacaagaagagaatcatggagatggacggtggtgacggctggacaacattatgaatgtttttaatgccactcattgtatacctaaaaattgctaagatgaaagattttatgctatctgtattctaacacgataaaaaaacgaaaaacagaaaaactcctacagatggcattttttatccagatttgctttgctaccaattgtttaccacctgaactcaggcttaccagtaggtgtagactatcaattcatgtgtcatttcgttaaatgaatacgtttttcttactctttgctgtgtttaatatctataatacaatttgagctaagttcacaaactacaggttaaacgtcccaaacccaaaaataagaaatctaaaatgcttcaaatcagagatgctccaaaatctacaacacttttcagtgctgaaataaggttcaaaggaaatgctccctaaagcatttcagattttcagatttgggatgttcacttggataagtataacacaaacatctctaaacctgacaaaatccaaaatccacaacacttatggacccaaacattttggagaaggaatactccacctatacatggaggtttaaaaaaaaaaaataagattctagctagaagacattactttcttctctaagaactaatcatttgaaagcaatgacgagcagcaaggaggcttagtcatacctgagtgactgatccagcgtcattcctgtaaaatcaaaaaacttcagatattcttctgcaactagtttgctaaattcgttgctataagaaaacagaatagacttggttattgaaaggtaaactatttaaaacacacacaaaacaggagagaattcagactccagcaatgggtcagaacgtacttcttgccaaggtgttttgcaacatctgatcttttgaatctgtccagctgataaaggcgtttggccaaccttttggctgcttccacattgctgctggtaccattactgagattttctggggtctccttttccaaaatttcagtgctccccatttcagaatgagcttctagccgtgttgttttcaccccagcattgctatgataattgataaagagagaaaataatagatttttcttatatggcaaaaaggaaaatatctgatgaaatattgatagttttcttttagttcagctacacttagatgagatcactgtatgtttaaatattcataaaaattttttcagttaccatattttaaagaactaaagaacagattgcctaaatcttaggcaagcagttcccaaacttttcagtctctagacctttacattcttagaaggactccatacggctttcacttatgtgggttatacctaccgatatttaccctcgtagtaatgaaaatagaaacattttaaaaattcactcacttaaaaataaatctgttttacataacaaatactataaagatacaactattgttttccagaagaactaaaattcactgtttttttaaaacacaaatttctttaacagctggcttactacaagacagttgaattctaagagccatttctacattcaatcagtaacaatatattattttggttgaaacacattaagaaaatgtgccctcactcatatttcattggaaaaaagaaatattttaatatccttttcagataattgtggatattcttttttgatacaacaccaaagtgagacaagtggtagtttcttaaaggatattcttacttgcaatatggaatctaaatttgtgtcgattaactttttgtactcttatattaaaatctatcttatactttgaatggatcttttaacccttacatgattttgtaacatcacacattggttatctgcaaaacatgtgttgacacatttcattatataaccttaaaaaaatcatattcactaatgtcaccattaatgaaaagtctaagtattgggaagctgccaaacctttgcgggcagatacaagttttccaaaatcctaacttttgttcaaaagctcaaatgtaatcatttgctacaaattattatcagctgttttccttaaagtaataggcttactccattttcaagaaaatgtttgccaataaccatagtttgtcagtcattctctcaaggaaaaatgacattcaatgaaaaaagtgactagtttttagccccaacttaaatgacagacgaatgtttttcctggagactaccaggaacagaagtgctttattcccatttcatcacacacaaaattaaaaagacatgatctcaagcgctgaaatgaaataaactgtactggtttcatcaaggatttttttaaaggtgaaactggcctatatttttattttgagtgcatgacagtggagaatacgatgactagaagagtttggtgccgctgccttaagttctactaagacctccactattgtttttgcaccataagatatcaacgcagtgaaaaacaaaaatagtgttataataattagtgtaaaacaattttgatctcataaacctaactgaaggaagaaagctccacaggcaacacgttgagaactccgccctagaaagggcttaaagactacagcctgtggtcaggtatagagggttctcttgtatttataacagtgaaactaatgaggatacattaatttccaaatctttatcttaacttggaagtaagacatgctcataataaaatgtgcttacacggccttcgaacacacttaccacagatgctaaaccaagggcggtcagaatttttccataatggatgaaataataaatatcgtaggcgtgcaggccacatatggcccctgtcacacatgctgctttgttgttgttgttttgttacaaccttaaaaaacctaagagccatgccagctgggctgaattgggcccatggatgggagtttatctgcccttgctctatcccatagttctttaacttggcttgcattaagcacaataaccatttactgtctaaaccaggacactctaaaggggaaacggagataataaatccttaaatattctattataatcattacaaaataaataaagaaggcattatcaataaaaaagcagtactgctaatgggcattgtttcttttggggtgatgaaagcatccttaagacagtggtaacgactaaacaactctgaatatgcccaaaccaccggattttatactttaataaagcaagtgatacagtatttcaattatctcaatggtgttatgtttttaaaaatctgaacctaaaaaataggttgtaaacttacatcacgaaatgacaaaaaccattgtagtaaaaataaatgcatttctaagcagaactgctccatcttgtcacttattctacctcatttacaagttcccttttcccactgctctaccaaggaagcactggccttatgcttcaaggtcactgaaaaagcagccagggctcctggacaaccagctggtataacaagtagctgcaaagtctcatactccctcaaccaccacaggattagaaggagttaactgtccttagcaactcttctccaagcacactttatcggcaagcacctgacatcctgcccttgaaatgaagctctaagaatagggaaaagagagagagttttttagactcaactgtgtaaaaatgtcaactcacacattcccagatgataccatgggagaagctgggaatacgaagttaggtctaccaaacccatgctggcttattttgccatagctattaatggtaatagttcagttattaaaactctaagtcaaataccaaaccacagtcaatatcaatggcagaacagcaggcattaactggaactgacccaggcaaactaacatgtatggtaaccctcaacaccttgaacagtttcccaatacacatgcctaccagttaaaataaattgcttcattatgataaaatctccatgaaaatacatttttaaatgcatgattttttcatcctacatcttcctttatagacttaacattacatggctgggtgtggtggctgaaacctgtaatccctgcacactgggaagccaaggggaggactgctttagcccaggagtttgagaccagcctggacaacacggtgagaccctcctgtctatgatgtaaacatttttttaaaaagagacttaacactaccattcagttttgtgaaatctatcccatcaggaaactgaataatcattatcgacagtataacctataataagaaaactcacagtagaaatttcttttaggcaattcatggttactttgtgttttcccatacaagtgacagaaatgtaaaatatttattccaagaactacgttaattacaatcaagtactttttataattatacaaaacacaaaacaaagcccttggagttgtgtttccatgtgtgcttttcctatcatgtagtaaaaacacatgtcaaagaaaggattttcttcttaattaaaccactactcactgctcatttcccagggaaaattcatggcatttatttaatcattctgtgcaaacaatgtaattataccacatatacagtactggcccaattttgttcaaatacaagaggcttattctaatgagaacacattttaaaaatttattacccaaaatcattccattcctcatgttactcattctccatatttgccccttttctactatgctgcccagtccagatgatttcacctaattttcctcacattcaccaaaaccatataattgcaaaatctgtgtgcatcagactttctggatcttcttcaaaaaggtttcagtaaaaggagaaaataaagcacaaaggataaatatgtccctagatggcttcattctgtccatttcacagtttaggagattatttgaacaagaaccggaattgctccttttaaatcagaaagcttgacaatatgatggcaatataaacttaccagcaaccatacagacaccaagaagagcccatcgcaacccctggggtgcgcctggaccatccttcctctccgaagccccgtccagtattcttcagctcccaagttcagtgactgccgagcctcacagccttccaagaacctggctccctgtgaggtcacactactatgacctcacattctcagccgagtgttcattgttgcggtttctgtaatgtttctgcagttctaataaaaacagcagccagaacacaagggccactgtctatcgagaacgtaagaaacagtgagcccagcctcgttcacacttgataaagccaactcagtgatccctctcggaggggataacaccccattttgttttcttgaatacacaagacattgcagctctagtctgctgagcattagatgcgttctgtagtttggattttctcttttctatggttgttttattttccctctttttcttgatcaaatcactttacagcctagtaaggttgcaaataaataaatccctaccagtcacttaaatgtgtaagagacttcccaaaaggttctccctgtgttctagaaaatgcttccctggggcctttatttctgacctccaagtaaacatggtaataattctctcatcaaaacactgcatcatcaaatgaaggaccagatcattgactctgatcaccatgccttctcacaaccttttgaatcatactaagattggcagattttccaaataaaaatagggtacccaataaaatttgaatttcacatcaaaaaacagtgtctagtgtaagtacgtcccaaatactgcacaggacatacttatacaaaaatattattcatcgtttttctgaaattcaagtttaactaggcatcttatattttatctggcaaaacttcctgaaatgtttttttctaaactttatttcaagaattccaataatggtgttccatgattgccaactggtagcttattcacaattagaatccttctggattttttcacttgtttctgcgattttattcctactgtttttctacagttttatcaagactttgttgcctataatctactgattcttctctaacgtcctctaaatacaaaaaaaacaaaacaaaaacaaaaacacaaaaaccctcctctgtgttttcatccttctctcttgacctgcatgctaccaccacaaatgtgataatgtagccactttacacaaatcctacacaagatccatattctgtagcatgtcctaaggccttttccaagctgaccccaatttcttttttcaacctgtcctctaccatttccctcctacttgaaccacacaaatacaagctgtgctcccatgccttttacgtatgttgttccctttgccacactcatcacccccagccctaccatgccaaattctgtgaactcttagtgctatcttttaaaatctcatcgctttcacctaccactgtcttgaattctggtttgaatcctcaacacaaggggcggctgaaggtactcaacagccatctgctaagagaatgcaagaacacagccatctgccatgtctacttcctccactgtcttccatgctatgctatcaataatggtatgtggcactaattttccaattcactgtagctaatcctggaaaaaaactgacatcagtagaatactattgcctgtataaaacaatatactcaatagtgtactgttttactttcaatttttcccagaactttaataaacagtatactattgcccgtttcatacaggcaatagtatactttgaatttaaatttaaaatttctttaaatttttatgtaattgtggtaataaaactaggaccaaaaagaagttaggttaaggtgtcaaagctccctgtatgaccctgtatttataaagtgtaccccaagggttgtacatagaaaataataacagccacctagtcgagttgaattttatacataacttaggcaaaggcaaattagaagaatctcaaggagtgagaagaaatgacttcagctgcaagtggaataaaaagaccagtgggaacaacatgactcctttgccattcttcaggctgatgacatagaaacacagaagactggaaccaacagacaagagggcgggtacaaacgcacagcttccagggctgaaatacaagtcagaagtaagtacaccatcagcaaaaaataagtaaaaccctaaatcataaattgcctctgaaaagggaaaagaaaataattttgtccatcattatctatggcatttatttcctaggcattgtagagagcacatcatctaattcccaaagaaatgtaaatgagaagttattcagaagagccatagcacccaccatggtaccataaacctaataggttaacaatggttaggcatttactatgtgccagcctctgggcttcttcctagggattgaattgtcagtcttatgaaacaggcaatagtataacccattttacagatgggaaaactgaggcaaggagctggacatggtcagtgagactccaatgctttactacttttataagctttactactatccattttgctcctgccagtcatcttctggtatgtctgtcttcaatgattcaatgaatacgtatttaattccctatactgtgccacatattttaggtgcttggtagactacagtaagcaaaacagaattaaaaacttctaccctgggtggggaggggagctaaaaataaagaatttaataaataagtaaattctacatattagaaggtgacgtttgctctggaaaaaaatagagcaaagatagaagaggaaccctaatttggggatgagggtggaaacatttttctacgaagtggtcatggtaggcctcatggagaaggcaacatttgagcaagatgtaaaggagataagccttgcaaatatgataaaataacagcattccaagcccagagaaggcccaaaggctgcagcatgttagatgtgtgagggcaagcaagaaagccagagtggctggggcagaggcagtgaacggagaatacccagagagcaaatgggcttgtgggatggaggttcccacattttctcgactcagagtctttaatatgtaagttttttatgacactccaaggccaaaggaaatatattccatttagtaacagaataatagtgtataaatgcttattaagtttggacccaacaatttacagtcatttgaaaaaacaatacatacaaattgaaagaaaaatcatttttattattaaataacgattgcttactaatagatgtgtgtgcctctgggccatatgacttcctaaatctcggatcagactgaacaccgccactcatttgttttctcatagcacttaatttttatcacaacaactggtgaaaatccagctcaaagctatgacgtcaaaaggaatatagcacaatctgatgttgacgctgaactagctgttcacatgatgtttgacagatgatgaggagagctgtgtttcccttgacaatttaaatatcctgagaaacacctgtgagctcactgcaatgccccagaacacctctgcagagttggggaacgactttgttgtttaaaggccttgggggccactatggagactggtttttactcctagtgaaatggttaatattgaagggttctgagtaaagatctaacattaatttatatttttaaaggatcactctaagtattgctttgaaaatagactggagaagcagggtgaccagtcagggggtaatgcatgtgccagggaggagctggcttgggtggcagtaggggctataggtcccggaggacctgccaactggtcctttgggagggctgagagaatagtagttaagttttagtcctgagcaacttcaagggtggggttaccatcgaccaagacatgaaagaccaaagttaacacaggttgtgagaaaaagaagttccatttttgatgtgttcaccttgagatgtccattggctatccaagtaggatgtgaggacacgtggagatttcaggaaagacacgtgccagggtgcactgcagggaattctcagtcgctggcctgcggtgggccctggcattcttctgtttaaggaccaagatgatcctgatgcactgtcagagctttgagttacccctctaacacacaggaagtcactataggtctaaagagaggaacaacaatcagacttgggttttggtaagatcagttttgcttgtggtgtggagggaaaactgcagggactcaaaattgagacagaaaaaccagctacaaaaggtatcagaatagtacagtcaagagatgagaaactaaattgcgtgtctgtgtgaatatgaaggaaaagcctcctccgaaagctatttagaaggtaaaatggaagaacgggatgagtggcttgagatgtgcatggagctatgttcaagggtgggtacaagactaaccctgacttaaaagctggtggaaggtgatgccaccaaacaagacaatgaacacaagaggaagaagagggaatgggtaacagtgtgcacacatggaaagaaacaagcactcgtggaagaccaggagtttggttcgaagaaacgataggtacaaggtacacacaggttaaccaggcagagctgtctggtagcaatggcaaccatcccctgtctgcaagaattcagtagatgtgaactagtcacccttatgttggtggagggaatcacctgggagaggctagagcactcaacatgaccaaagaacaccaaagtgcgccaaagaaatatgtctagcagtagtgtattcatttgaattctgttacaacagaagaattcaggggtctcccttcatttgttcaggaaattctacctgtgagtgttcagtttgccagcaagcaatgattattaatttagaagatgccaaaagcaattatctgctggagaactccagttagaccacccaagttcaaacactggctccagtggtcaccagttctgggaccttaggtaggtaaggtcatcattgtctgtaacccttaaggtttttagctataaaacagataatagtatcatattcacaagctgttgtgaagatgagatgagaagatccatgtatgatgcttggcatgtaagatgtctggcatacggtaaacaaaaaacgtctgctcctatcaccagatccatcttcgtcaccaacaccaccagcatcattaaggttatgatgacgtgagataatacatgacagcactttattaaatataaatctccatacaaatgttagttagcgctcagtaggaatacttaggacaaacgtctcaaatgaacctgttttcaacagttacatagaatacattccctggaagggacagcctcttatgatttaagactctttataaaggaaacacacaaaacctaattagcagaattcctaagagctatttctctgttcagcacagaagacaaaattcagtcttcaccaataaaaaattttagtaagcatcacatacagattctgcccccagccccacccgccgcataccttccaaatctcagtcctttttctcagccttgctttcactattccagaagagggcacccacatgcaaggcagtgccatggaaaatgacccaaactcactgtatgagtcggggagtctgcatttgctcctgaggcactggcttccaacataacaactgtacttttcacccatgtaggggttcaaacgtttctaggggcatgatgcaggttttcactttttgttttatttacttatttatttattttcctatactaagttgctgctcttgtgggatagctctcacatgagaatgtaatatgtgcaagtcaatgttaataaacccatattacaatcatttcaaatgaataatttgcaaagaaactcttactggatatccagctttagaaatagaaatacatttagatgcaaacaaatgtatatgctcattgtttgcatagaagcttctttgggcaaggtaggatcagtgagccccatttccggtggacaagacaggaagagtgactcacttacagtctgaccaactcatttttctggagtcttcttaagatgccattggacattctcttctgtctgaatttctgtcaggttgaattagtatcagtgtatatgcactggacatcagaagctgggcagcaaaaggcggcacaaagcacaaagtagacatgccttatgtggataagaactacaattttcatatcttaaacagtttgtttagtgtttatgttaaagagctgggtacccacaccaccaccagtccttagaatactcacttcctgtctagtgcacaggtaaaatatacttataaatatgaatttagtttgatcaaatactctcctttcttgattaggtaataaatgctacaatctagccagggaatattagagaagttctggcctcccattgctcccacccccttttctcttctaactcttccatcttctgggatacaagaggctgaacaaatattttctatggttatataatgtccaaattttaccatctctattggtatattctgccctttcttcaaattcttttttttgtggggttggaggtgtgggggatggagtctcgctctgttgcccaggctggagtgtagtggcatgatttcggctcactgcaatctccacctccagggttcaagcgattctcctgcctcagactcccgagtagctgggatcacaggcgcatgcccccatgcctggctaatttttttgtatttttagtagagatggggtttcaccatgttggccaggctggtctcgaactcctggcctcaagtgatctctccacctcggcctcccaaagtgctgggattatgagagggagccactgcgtccagcccctttcttcaaattcttacgacaccttttccagtgtcctatagcacaggcgttgctgtgtttctctttggcgtgtttggaactgcgtatctgttctgcagtgtccctctcctgctgacacacccactgacgacatggccgtacggtctcaccttgcacataacttcactttctctttatgcacgctacaggcagtttctacagcagcagcctgacaacatatcctctctacactgagtttcccctaagtgctacctactacaactacactgaaagctgctctatgcgatatagggaaggtttcttggattcacttaattttgtgtgcaatgttaaaaaagaggaaagaattagtaccctggcaagaatacaaggagtaagaccctccccttaggaaataaaatcctatctctgtcacttcctgctttcatctctttaaaatattccagctcccctggagacagatccaaagggtcatcttcatctggggctatgggattaacaggggacgtttccactctttagtacccaatatgaatgaattagtaataatatcaataaatattttgtcttaacatatttttatgaagaattccagaatgtttactctgtttaatacactattttaagcactttatactaactcacttaatgcccttgaccttacgataggtacttccatcattcccattttacaaaaaaggaaactgaggtatggtgcagttaaataactttgccatgaccattctgccagcaggaggtaaagctgggattggggctcagcaatggcggctgcagttgtgcattcagcctcttaactaataagctatgtggctttctaaccgatattactacaggttatactgcacgcataactttggtgtatataggaacaaacatttctactttttaaaggacatctgtatatgtgtttactatggttgcataattaagtatacacaaccaaacctgcacaaattttcactccaattatttatttaaacattgactatgtgccagcacatttctaagtgctaggggtgcagccttgcccttgtggacttttaccttctaataagagagagaaacaataaaatacatgaagagttttccctctgttcctgcctttcaccctcccacaaatatctgaacatgttacgactcacacactgttccaggtaaatattaggtctaataaagcatcaacagatgaaagtccttgctttcaaggagtttacactcagacagtgacattcataagtgccttggagataaatatagctaggtatgcaagaggagagggaggggttgctattttattcacagcactcagaaagtaccatgtgagtagaaaatagaaggaactgaggatgtggctttgcaagctatcttcagatcatttcaaacaaatgcaggcctgggcaagatggcgtttggtaagttttaagtgatggcccagaggagcctccatggctggagaggagtgagcaaggggaagaggagttaaagagtcccaaggaaggcctgaattcacttacaatttcaaagtagtcaatcacttggaagcttcaaaattaactgccgattctccaacttccacaatcggagaaggtacaacaatttacaaaaggttattagtatcatatatgtactttagacacatgttagcttccaaagttcgtgggctgtttcgcagttccccctgtaattctgcagtacctctccatgaccatcacatcatctaagggtccagactcttatcaatcacctaattcaccctgtaggtcatggattcagagcatactctccccagcactgtgccccgagggctagtctgtgatttttctaaggctgaatccttatcttaatgaaatttctaacacagcaccttggataatggctgggctttaacatacgctcagtacaactgtcctaaatcaaattgcaagaagcttaaaggaaaagtcaaacaactgtgtactcgtctcaatgcagctatcaacttgagtagaagatgcccaaaagcagtaattcaaatgttttctttcatgaatctgtatacaaagctgaaagtttctgagttttattgtaagcaatttccttattacggaatctagagactctgatcagcggaaatcatctgccaatgagctctctctatgttgcagatcttttaatgcttatcccttattgttgccaaatggggagcaacgtgaaaaagtggcaaaagcaaagtggacagaatgcagcggtgaagaggggaaggtcttcagctcttaatatctaacctaagaaaactaaaaccatgattactaaatagattatatgcattacgttttttgtttttggttttggtttttttgagacggagtctcactctgtcgcccaggctggagtgcagtggcgcgatctcggctcactgcaacctctgcctccccggttcaagcgattctcccacctcagcctccctagcagctgggactacaggcacctgccactacgcttggctaatttttttcatttttagtagagaaggggttttgccatgttggccaggctggtctcaaactcctgacctctggtgatccatccgcctcggcctcccaaagtgcttggattacagacgtgagccaccgtgtccagcctacgttacctttatgaaagacaactattgttgtcagtttctacgcttttaaactagtttttccttcccttcatttattatattttaaagtagggagctactttttttttttagggagctatacatgatcttactttgccctttgatttcacactagcgcctcctagaaccaaactacctgtaaggcgaggagggtgagcgctgtgttctttaatgtgaattagatgttatctgccatctaactcaatctcaaagtgtttggtattttaagactgaaatcatggcattttggaggtaaaaagaggttagtgacataagctggaacagattcagttattgggcacaagacaggacaatctgctctgcaaataaactgagaattaaagagacccagtagacaacaaatttagtgaataatgtcctctccataccccccccaacaaccagcaaaaaaaggaaagaaagaatgaagagtctttaaaatcagttgggaagaaaaacattgcattttctggctttctaaaatgtgacaaggcctttacatttataatcttatattagtgacagtcagaacctcctaacagattgttagagtaaatttaaataggaatccccttggactgataaatgggggcaggtgggttggggggaaaagtcatccctgccagggctcacaggtaaacaagcagaattcagggcatgtctgcctgttacatcagagacccttgatgtgatccagaggaattgtggagtaatctggacaagcacctacctctaggccacaaggacttaagaaagtgaactggagaacttcccggcaagactacctaacgactgttcatatcaaaacaactggtacccagagacagaactcctgactccaaatccaacactttttgtccactgcaccattgtatacagcagagatgacaaggtaaacagctgttgacaaagccaggctttccagagggtaggtttagtcaacaaatactttgacaagtatttttcaaggaaactaaaaaagacagagtctaaaggagaggataaagtaacaggcagcacaaaccagcttgaatcaccaaaaagaatccttcagaaccagatcatgagccttcatgaagggaggggatgaggacagaagcagccagagatgctactcaatagaaacaaaaaaagccctccccaaactcttcccctgaacctctccagagggataaggcaaaagtgctgtttttggcaaaactatgtaaatacaaattcatatttcattagttcctagacacattttttaaatatttcaaattctttaaaattagaatggatttttttttttttttttttttgagatggagtctcactctgtcgctcaggctggagtgcagtggcgcaatcttggctcactgcaacctccgcctccagggttcatgtgattcgcccacctcagcctcctgagtagctaggactgcaggcgcccaccaccacgcccagctaatttttgtctgtttagtagagatggggtttcaccgtgttggccaggatgatcttgatctcctgacctcgtgatctgccagcctcggcctcccaaagtgctgggtttacaggcgtgagcctccgcacccagccagaatggttttctcatgcatcaaccagtgtgaaccctggcagccaggtggctgtcagacttttattacctgtgcacaacgcaaaattatactgttggtttaatcttgatttaattgatgtttacagtgtcttcaaaaagatgctataaaaggtactgagacaaaagtattatttatgcaggcaagcatcgagaatatgccaaagtcatttgtatgtaaaaatctgtaagtttaagaattattagaaactccaagagaaagcactgtgtcatagttaattgctggcatttttttccttttttttttttttttcttgattttgtatttaacaccattttctccaagtgaaatggcatattcttttctggcagtagcagaaaatatatgaaaatatacttttaaatatgtaaaatataaaatataataaattaagatactgacttatctcccaatcaatagtatcttagattcaaaaaatttgatgttgtttgttttcactagtactgtcatcccttggtatctgtggggtactggttctagaacactcccctacaaaataccaaaatccatggatgttcaagtccctgatataaactggcactcagtatttaaatataacctatatacactctgctgtataccttaagtcatctctaagctacttttaatacctagacaatgtaaatgctatgttaatagttgttatactttattgtttggggaataatgacaagaaaaaaatacgaacattctcagtagagatgcaaccatttctttttttttaaatctattttccatctccagttggtggaaactgccaatgtggaacccacaaatacaacagtctgctgtatgcagttgccttaaaactcagtaacatttaattctggttttcttttctcttttgagacagcatcctgctctatcacccaggctggagtgcagtggcggaactgcagcctcagcctcctgggcacaggcaatcctccctcttcagcctcctaactgggaccacaggcgtgagtcacaatgctcagctaatttttaaaatgtttgtagacacaggggctcatgatgttgcccaagctagtctcgaactcctggacttaagtaattctcctaccccagcctccccaaatgctgagattataaaaggcatggagtcactgcacccagcctaacgtttaatgtttaaaaacaagattttattctgtttattttcatttataggtcatgacattcaaacaatgacggcataaaaattccttctgctttgggcaaaacaaggtattttgaaattcttttttttttttgacatttaattctaaagttttatggccaattcctcaaacaagaccattcaaaaagctacagaaattctctctattcaacgccttttaaaatgctatttttcagtgtagctaaatgagaatgatattttgtaagcactgctattattagagactaagaatacatttgagattattattagaattttactttttcattttccaaaaaaaataataccaggttccaaaaagctgcaccttgagattataggtaactattcctcatgaaaaaaaattacaggttggatgaaatttgcgtgaattagttaagaccagtatttataatcaaggcctaacaaaattacaagctcttgagtttttcctaacaaaactgaataatattgtttctcatttgtgaccagtttctatggaaatgaacaatattccagctaattcaaacactgctgcagataatattaaatagcaatgtcattttaattccaaaattttgacccccacaacacacacacacacacacacacacacacacacaccccaataacaaagctccaattccaggtggctcttaaacttctatacccatggcttcaaataataattttgattttaagtcataatttagcctctcacttcaagtgttttgagaagggaatacccacacacacatgcacacacatgcacacacaccacacacacacacacacacacacacacacaaatggttgcttagaggacaacctccatcctaagaaaaaataagactggcaagtaatcgagttctttaacttctaagcccccgactgcagagtcacaatgcaccttagtacccttagcaaagacaataaagacgtaaaagtccttcagaaaagaaaaaaaattttctttgtttcaccaccttgataattttttgtttacttcctatttactttctatcttttctacatgcaacacactctttgtgaaacaggcattccaacttttgctaagctattagatttacacaataaggtttttttctacacagaaactttggttgagaaggggccatgggaaggtcttgtacatgatacaaagaaatatcctaagaagaagtatgatgcatagccctaaataaagtctgtcctgtgtcccatccagttctccaaaggacatcattcaggcatcacttgacagcagaaccaacctgtgttgttcctttagtagtagtacagtccatccccgggagtgtgttccaagtaccccttcaccaccccctaagctggacaaacatactcttaagagcaatactccacctggtgcgagaataaagtagaatcatcctcaaattcaactcttaaaatggcaaaagtctgtgacctggctgtgatgtcctgtgtcaaactgtccctcctacgccaatatctccctagcgacagtctctgcctcctgacctaaatgacataagctatcagtgtgaaccactaagcaattcccaactatctgcctcaagaagctgcatatcagagatgaactcagaaaacagcttgcactcatgttttatgactttcagagaacactgacatttcagaatgaaattcaccacggaaaagtcatatgctgacctccctagtatattaaccccatgtacatctcatcttctcaaataaaaaaatccatgtcagatgaccaggttcaggtattttaaagtttacagcacaagaatatttgcttaaatgtgcttctcctaggtcctggcactacctcactcccatccagcacatgtgctcactccaaaaatggcaagccgatccaatcaatcagctcttgaagtttcaatttaagctccattctttaatattatttctaaagcatataatagataatattaatctggttttataaagaaggaggaaaagggagaatggagagacaggaaaaaaaaaaaaaaaaccttatcacttcaataactagaaaagcatacctgaagccaaaatagacctgccagtctggaacttcccctcagaggatacactcctttcttcggagtctgcagaaaataagatgcactttggcaccattcttcaagctcgctttaaaatttctccttcaactataatcaagtcatctagacagtctaagttttacattttgaattcctatcattggaactagggctgataaaataaaaactaaacatcctttaaatcagttaaaagatctttaccctagccactcaaaataagaacaaaatacaagtaaagtggcaataatagcaaaggcgtgaattctcccctcccctttattcactagaggtatgaaaagtcctgccctattgatgatcaaaccgccttctgggtcctgccacaagagatcctgaattccgcaacttatcattgaattctgcaatgtcaccagctgcaagtcacccaagagatgacgtttctacaccttgtcacacagtactgtcacatgctagtcactccatagcaactaaaatacttgcagatgtaactctcattgataccatttaaaacttgcctaagtttttgggaaaatgaggacaccatacctcctctctccttacaattacacatggtgctttatcttaaacacactcacacacacacacacacacacacacacacacacaccccattccatgttcacaagtgtttcctaatacgctgacaaggcggcctagaaagcactataaacttagtggagaaaaagtgaggtcaggcatggtagctcaagcctgtaatccctgcactttgggtggctgaggcgggaggattgctcaagcctaggagttcgagaccagcctggacaacaccgtgagaccttgcctaaataaaacaaatttccaggcttatctgtacatgtctgtggtcctgcctacttgggaggctgaggcgggaagagcacgtgagcccaggactttgaggctacaatcaggtatgatcatgccactgcactctagcctgggtgacagacatggccgtgtctctaagaaaatcagtaacttttttaaagtgagacccaggctatgtcaattttccaaagacacaaagatacttagatataaagttagaattaaccacatgtatctgtcttcagtcctagagtaccttccacagtaaacattccactgcccttatatagttgaaaggaaggcaacatggtgaagagaaaagaaatgataaatttggaggctcaagccgaccaaagttcaggtctcagctctaaattatgtcacctttctcatccttagtttcctcatctgtaaatactaaggatcagaacacctgccttacagggttactgtggggattaaacaaaatcagtaactcaaaattaggtattagtcttaagatatttaagactttaatggtttctgcttcccagaattcttgattttacaaaatagaaatagaaaaattaaattctgcgcaattcccagaataaattcaggggccatctatcactggctaaggcatacactttattatctatggtaaatgctacaaagaaatgtgtagtgtttgggggaagcagtgaataagaacagagatcaagatggctttgtcaacacctgactgcgatacagataactagaagagtcaaattagatccctaggcagagtatcaataacacacagtacttcagccagcgtgccagggcatacacgagtccagcatcatccttttagtcaagtatttgaacaaacaagaggacaagaattgccctctttccataagtccccccaaaacagtattctataaaaccctagtgtgctctaggctctgaaaaatcaaagctataaaaaaatacacacatacaatgttttaactttccagcatttctcagatttatttgactatgaatcattttgtacctaaacagaatttgaaaaaccctgcctttctgcaatactacaatatactagtgcagtccctgaaacttatgtgtgtattagaactacatgggaaattgttagaggcaactttaggtcccatctcagacctaaagtttgagaacccaaaagttagttatatttcaaaaggcatcctaagttctaaacaaatttagaaaactactgcaccagtaggtttttagagttgtcagttgtgaagaccaccagactctccaaattcagtgtctgtaagagtcacctgggaagcttgttaaaaacacacatggccaggtaccacccccaagagtcagattcacaggttctggggtgcaacccggtttgagaatcacaaatggtctaactaggcattcagtgtccactggctataagcatcctcaccgtaactaccttgtattttattagaggataaataataattagggatatgagtgttgaggggaagagaatcctattcactggtacaaattaactcagagggtttcagtattttgaatgaagatgatttcttctttttccagtcccagctcaaaggagaggatgatttaagaaattatgattcatactttgaacattactgttttaactgatcaatattttcaatggactgagaacaacctgtgaaaatctgatctcttccctaacctccacacgcaactcattgctggctttaaaagcattagcaaaatcagcacatcccacagggatctatgtagtcgattcacagtctcttcatttgatcagaatcaagttcttccgtatttccccctacagcaaaaaggtcctgggatggttaattttacgtgtcaacttgactgggccacaggatatctagacacctggttaaacattgtttctgggtgtgtttgtgaggctgcttctagaagagatgagcgtttgagtggtggactgagtaaagcggatggccctccccaatgtaggtgggtatcatccaaagcccaaaggcctaaatgaataaaagggtagacaaagtctgaattcaatctcttcctgactgctaaactgggacatttctcttttctgccctcagagctcctggttctcaggctttcatactcagactacaatctaaattatcagctctctgtcgctcaggccttccaacaacaccagaggcttccctgggtctccagctcgcagatggccgatcgtgggacttcttggcctccgtaatcacgtgaaccaattccctataatgaatctcatgatagatagatagcacctattgattcaatttctctggagaatcctgttacaattacactactctctacatgaactggacccaaagagaattgtatcagtagcaatttcccttctaacttgcctagtccaacttactatatggctcatcaaacagcacatcttattactttattattaccttatattccctgtgatgtaaataagattattcctcaagatcttttgtatctttcccttgggaatataaattgaaatgttaccatcaaagaaggaaagagtcatattacctacagctgattttggaacatctactgtgttatctttgaagtttgaagaatgcatgtcagcctccataagtttggcaaaggccctttggaaaggcttgaaggttttgtttttgatttttaaaaatctaattatggctataaacacccaggatcaactttcattttgtactcaacactgagatgaatatttctaaagccagaggcagtgtactttctacctttcaaatgtactgtaagtcctgggccttaagtgctataatataattagtaccagctcataccaaagtgatatcaatggtatgataatattatcagctcacaccaaagtgatatgaatggtatgataatagtatcagctcataccaaagtgatatgaatggtatgatggttctgacattgtttcgtaccaatattaatgtcacagttaagagcagcagcttaagaggaaaacaaagttctctcactgatatcagttaccaagcatgcatccacacctcctgccgggcaccatatgaataaagagcaaaatacagctccctatacccagaacttcatagtctagagagtgaacacaaactctgcacagaaaactatatgcaagacagaaataatggaccaactagtgcttcaatgggaaaaggttacaccacacacaaccctgaaccaaaatgtggcatttaccaggtggagagaaaggaaagaaaagttttcccagcaccagggataggtcacagaagacagagacgtgtaagactgaatggcttgtccaaagcagtgcaagagccaatgtcactagactacagggtgcgaagatggggcagtcagagaggggcgtggaatgcttaggcaagggagctaggaaaagactttaagtgggtacgaaaaatggccagattcaagagcggtaactaggtggtattatggaaggtgactggattaaatagatagattaaatgaattggaatttataaagtgcttaaagcagtatctggcaagtaagtgctatgagagtgttttttaagagggtgagactgaagatgggggtaggtccagttagcagactcctgcaagggtcgaggtgacagatgagaaggattccatgtaaagtaatcaatacagggtggatggagcaggattgtgagtaaaaaagtaaaaccggttgaatttgaggccaattatatatgagagatgaagaagagggaggactcaaggtagacttcaaggtttctgacttgaacaccttggtgaatcatagtgcctttagccaacctttaagcaacacaaagataagccagacttttaggaaggcagcagattaaaaaaaaaaaaaagaagcaaaagctagtatttcacaacacttaaatcatttgggtctcataaactccatacaaggtagacaatttatatatacatatacatatatataatatatatatgtatatatatatatatatatatttttttttttttacaaaaaaaatgaggttaatgagctattccctgaattgcataattaaaagttgcaggcagcagagctacaagctatgtcctctggctccttggctcatggtaatttccatgtcacagatttgccaaaggaaacatatcatcctcatactccagctttctactttttctcctaagccaactatagaaagcagccaaaaatccacccaaaaaatgactttagttttatagttgctggttcttccattgaaggctttgttgtacctccttattagtaatgggaaatacccacaaacattcaagactcaagttcatttatacgttacagcaacaaccaagtgaccacattcaagcttcgatacaagaaagccatcttactcacaattttttttttaattctcttgacaaaaggtattttttacgatgaaaagtcaaactactggccaggcatggtggctcatgtctgtaatcccagcaccctgggaggccaaggcaggcagactgctcgagcccgggagttcaagaccagcctgggcaacatggtggactcccatctctaccaatcaatcaatcaatacaaagaaatacaaaagttagctggggctgggcgaggtggctcatgcctgaaatcccagcattttgggaggctgaggcaagcagatcacatgaggccagaagtttgagatcagcctggccaacatggcaaaaccctgtctctattataaacaaacaaacaaaaaattgggcatcggggcacatacctgtaatcccagcactttgggaggctgaggcaagcagatcacatgaggccatgagttcaagatcaggctggccaacatggtgaaaccctgtctttactaaaaatgaaaatataaaattcagttactaagaggctgaggtgggcggacggcttgagcctgggaggcagagattgcagtgaacagaggttgctgctactgcactccagcctgggcgacagagtgagactccgttaaaaaaaaaatactgaaaatttaaaaattagttgggcatggtggcatgtgtctatggtctcagctcctaacgaggctgagacaggtggatcaactgaaggcacaggctgtagtaagctgtgatcatgccactgtacagcctgggtaacagtgagagagaccctgtctccaagaaaattttttaaaaaacgggcaaattatctaacatttagaatttgaaaagtatgttctctataccatagaaaaactaaaaactcatttaaaaaacacacacaagggagaaagttttaaggttatctagtaacccaagaatcttgagatacatccaaattcttccatagttccccagcaattagaatggatgtcattccctttatctaaaacgttctagtgcctatagaatcccgtccatcaacgccctagcatgctgttccagatttgctgcgtttggctgaccaagtcttgagcctcatttcccactaaatttttcccttgtacactatgtggtctttggctcatgttattgtttcctaagcttcaggtgtcctctcccttctagcacacacatctactcctcctgcaaggctcaaatcagatgtctctatgaagcctgcggaaaccctcgactgacatgacttcacaatctcgtagcactgttgttaagcctctaatagggcacttctttaactgtcttgaaataaaatacatgagatgaattaaaggatactctaccgtttgagagaatttttactacaattttgtaaaaagacatttttaaaagacaaccgtttcacagggcctgatagtaaaaaataataaataaaaataaaaaataataatcacaaccataccttcttccccaaaaagctctgaagataccaaatcttaataactttattttattttattttatttttttgagatggagtgctttgtcagcgagcctggagcgcagcggtacaatctcagctcactgtaacctctgcttcctgggttcaagcaattctcctgtgtcagcctcccgagtagctgggactacaggcacgtgccacaactcctacaaggttttaccatgttggtcaggctggtcttgaactactgtcctcaagtgatccacccaccttggtctcccaaagtgctgggattacaggtgtgagccaccgcacccagccagtaattttctactgaatgaaataggctccagatcccactgagtcctcaagctccaaggaccttgctatattaaagcctttaggtcctacaagtgctgttgctgaaatgtgctcaagttatatttggtgttcccaattaaactccaatagaccacacctaaaccagactcattgtgggtgactcttgccttacaacaagttttatacaccaaaacttctgggcatctcttttagtcatttcccaggaggacacagaacacaggcacaatgcaacttgtttaaaagaacaacagaaattatcttctgtcattcaaagcagaggagcagatatcaggtatcaaagtacactttggttatccaatcaatcactttcatttgttggcttttgggcaaacttttttaaaaaatgagttacctaaagaacaacatggtcgcgaaaggagataaaaagactgcagcataacccgaactccaccccttcggaaggcgtagctgtcctttggctgcactgctcccactgcagtgtagacatggaagtatctgcttcccgtttcagggttctctaatcacagactggattctttcaacctaaaccatctatgagaacagagcatcttggggaaaggccaataccattttcagctatggaaaatacctacaagagccatttactggggaaggagcttccctgaaaccattcattctaggaggcaacattgttaagggcagagaataatggactgcctatccagaaagcgaggcagaggcaaaacaacttagaggttaaaagcaaggacttgtgacaccgaccaccttggttcaaatcctgactctgacgtttgcttctgtgcctcagtttgcccatctataaaatggggtaggagtgcacctaagtgcataaaatagggcagctactattaatctggttctgaagctaaacgcctgcatgacctcaatcaagtcacttaacatctcagcttcctcatctgtaaagtgaaagtattaaatacacacccttctgcagctctagaatggctctgaacttaagtatagtaccacctaactcaatgtaccaggattagcagtctcaacttgcttaattttattagtcatatagtaatttcacataaaatcagtttgatcaccgtatttttagttccagttctccaaggtcaaccctcagttcaacatgacatcaggccagatgccgtggctcatgcctgtaatcccagcactttgggaggccgaggcaggcagatcacccgaggtccggagtttgagagcagcctggccaacatggtgaaacccagtctctactaaaaatacaaaaattagccaggagtggtggcgggcgcctatagtcccagctagtcaggaggctgaggaaggagaattgcttgaacttgggaggcggaagttgcagtaagctgagatggcaccattgcactccagcctgggcaacaaagtgagactccatctcaaaaaataaacaaatgaaataaaataaacaaacaaacacgacatcaaacaggttccctcatgaagacatgttgcaaataaataagctatagaaaatagccaaaaaaggatttggtcttgctattcatattcagttctgagttcagtgtgtaatttatagtaacagaataaatataacaaaaaaaaaatagaaaaagtatgggaagaaaggtaagtttactataacttgagaaaagttgaaacaatgtctttgtattaacttctgaaaacattttcataaactggaaccatccaggctcacaaaagcaaaaaccttcctttctgttgccaacaaaacagcaccaaatacttttatgtacattcctgtgttttcctccaactgcctttttcactctagctcttgaaatatggtctttattataggtggagttctcatactttatgagccagcctgccattttagatgctgtaaaagcccagtggatgtatcactgcaaccctaaagagtaaggaaattaaaggataaaagtataaagtatagggttatatcttgcttcacgtccaaggatgcacagaggtcatctatgtataaaactgcttttttttttcaaattcctcaaaactgtgcacaactccagtaaacagaaggcaggctttcccttcagttctgcatagattcacatcaggataaaactcaaacgttttgggcacaggcttattggccacactcctttcaactccaatttccctacgccgctacttctgccaaccagtacagctcactgtggttgctcaagttcaccaataacatgtcaagcattatcctccaacccccttttaactgttaacttaggaaacactgagtgactattgtgtgtcagacataatggtcaacatattagtccattctcacagcgctaataaagacacacccaagactgggcaatttataaaggaaagccgtttagtgggctcacacttccacatggctggagaggcctcatcgtcatggtggaaggcagaggaggagcaaaggcatgtcttacatggtggcaggcaaaagagcaggtgcaggggaactgccctttataaaaccatcagacctggtgagacctattcattatcactagaacagcatagctcccatgattcaattacctcccaccaggtgcctcccatgacacacggggattatgggaactacaattaaagatgagatttgggtggggacacagccaaaccatatcagtaaacaaggcagatatgctctctggcatggcagtttgaggttataattgagcagccatgagagatgatttttaaaaagcaactatgttaaagatgaatgttatttttaaagatttaaaatgttactttaaaggagcaatgcaatagaacacatagcctagtctaaggacatcagccttcctggagaaagtgacagcgaaactgacactgaggaccaggagcaggaaagccccaggcaagataacaagacatattttaaaaagcaagggacattcactcaggttgaagcttgtgggacggaggtgagacagtgtgaagaacacagagcaggcagaagatgaaggtggaggtgagcagctgcttcattatgaaggctcacactgacagcaccatcaaaacacttttccctttgcttgaggtccatcttgcactttcccaataggccagtaccatttattagaaaataatcagataactaaatatgtgacatgccatcttagcaggtataatacattttaacaggaactttgtggaggcagtgctttgaccagaaagactgataaatgagtgaaattttaaggctccaagacaagccagtggagaaaatctttggggttaaaatgagttttccactagtttcattcctgtatttgctgtgtaagttaccagagcattccagttatctagacagcatttagttatctagtcagaataattatcactaaaaaatacaacagtgtaagacatgtgctacctgccattacaattattatcctcattttaaaagatctagcacaataaattgagaaaaagaaatgaaagaaaaaatagaaaaaggtagaaataaaataattacttgcatataactgttgacatgtaaagcccaaaaatattaagcaaaaaattacaactagtaagatagtcagttacaaaaatataaaaacaatagctttaataaatcatgagggaccagttagaaaacataactgaaaaaaattctaccaagaataaaatttatgaagtagctaggaataaacttaagaaaactaaaataaggaaagtacaaaattttgctgagagaagtgaattacagttaaataaacactatgctcctgcaataaacattgtaaagatgtttctctcactaatccctctaaaatgtaatccaattcaaagagcacatgaaagataagaatgtagagaacttgaagaaaatatatttgaatgtataatttcctcataaagaaggtatttctaacctagaaactagcagaaatcatgatttaattgagccttgattacatggcaacaccactaagcaaaattaaaatgataaatggatagaaaaacacccattatacaaaaggcaatactatccttcaaatggaaagggcttttgggtacccataagagaaagattaatacaacaaatcaaaaaatcggcaaaatacattgtactgagcattctaatcactgcatccttgtgtcagggctagagaagtcaattcatccacagcccctggcaacaggccccaagagcctcagctctctatgctgacctcagctgactggaacaggagtgaccagctgataaaactgatccaacagactgctcaccctagaaatctgggccgcggatacccatgcacttaaactatgactgggtacgtgaactgaaaggtcacataaagtaggggctgaactaagtggcatggcacaccaaagccaggtagaatgaagagttatatagaggaacaaagacgccatgaaaaaaagggagagtagagatggcagagagaagcagacccttcagttcttgtgtctgggaggtctcactgttccttgcatcctgttcttggatataaacccaacgcctgtgacatccatccaatacaattaattcaagtaggtttacagtccactgcaaccagagtctagaccaaaacagatgtgagcaagcaattcgtaaaaaaagggtaagcagataagaattagacatgtggaaataaagctcatccatgtcaaagacatacaaattaaggtattcagatagctttttcagccattaaattggttaagataaaaaagcacttagacaaaggacagtcaagtatgcgaagaaatacaggcactcatacattaaaggcagaagtacaatctgatatatattggactaggtctaacaactcttaaaatatgcatatcctaagaaccagcaattatatgtctaagcatttattttaagaaaagaatcataaacatacccaaaaattacttaagggtatttactgcagtgataattataataagaccacaaaagaaacaaatttacaacatatcactgtttttcacgcattactcatcacctttttgacttttacagatccttatacctcatgtattgatttactattattaagtcaggtcatgatttttatttaacttagtcttccaactagtatttattgagtgcctactacatactacattccaggaacttttctagattcaggagtgaccaaaacaagacaaaaatccctgccctcgtggaacttacattttagaggacagagaagtgataagtaaaatacgtagtacgttggtaatacagccaaggggccgtggggaagcaggcaaggagaatatgaaaccgtgagaggaaaagagttataattttagaaaaggcaggcaggtaagtgcccaacagaagagaatcattaaaaatgtgaagtgggagagcagggctctggggatgaacacttcaaggagaaagaaaagcaaaggcaaaggccccgaggtggaagcatgcccggcgtgctcagaaatggccaaagaggccaatgcaactgaagcagagtgagcaacaagagtgggaggagatgaggccacagagcggtgtatgcggtgtagatgggggggcggatcgtgtagggacttggaggtcatggtaaaggctctggctttgactctgagataagtcaacaaattgagaaaagactaaagcagggtgttagttgcaaagatatgggaataaaccgtgctcacctggatcacttgaatgagagtagcattcagagtggtaacacagttgagatatgaatgtattttgaaggtagagctgaccaaattgctgacatgctgaatactggagacctagcgaaatcacctgagtgagatgccaaaaaggtgctggagactcccgcatttaatgggctttcaaagtaaccgtaaccctgaactcacgtttgatgcagcagttagaatttcaaatacacataaaataaaaatataattattaaaaagcaaacatgctcaggtgttccctacagttatctcaaatatcatcaatggttcctgcaacatactttcggaatcagttattttaaataaatcagattacctttacaccatagaataccaaaaggacattaacttatgtggattttatttatctgtgcacatgcaaactcaaacacaaacacacagaggttggaaatgcatatattaatactaaaatggtaacaatactaattttttaatagtggactaatagatttatttgcttctttgtgcttttcaagttgttttcagtgaatatatacatttgtcccgccatatccatgagggattagttccagggtcctttctggataccacaatttatggacgctccagacctttatataaaatggtgtagtatttgcatatagcctacacacaccgtctggtacactttaaatcatctctagattactgataatactgaatacaatgcaaatgctatgacaataattgtttttctgccttgtttaggaaataatgacaagaaaaaaaaaggtctgtgcatgtttaggacagaggtaaccatcctcccctgacccgcccaatatttttgatccacagttggtttaatgcgatgtggaactcacagataccagggctgactgtactttgcttctaaaaaaaattcaagtttcttacgtgtttttttttttttttaatacacatgcagaccttgctcaaatcaagttttgtttccggtttgatctgatggcaaggcttttaactaaatatccagaaggagagaaagggactgagctaggagcctacaaggtaggagtgaggagctatggtcagaaactagaaactgaatcccagatagcagtgacagagacagcatatatattcccaaaaagtggatggcttatcacatgcaaaaactcaagatccagacagtataagatagacagcgaatgtgagacgctcttgaaccagccatgacccagctctgggtcactctgtagaccaggggccagctctccactgagacttcactgctttgtggtaagcaagtcttcctgacacaagccaatactatgacaccatgtatttataaactactcaaatgcttccaagtaaacgtcacttaaaacaggtaaaataaacattcctatgcatacgccaagctcaagaggagtaggagcaagttcaataaaaatcagagggggctctaaaagaaactaatcatgcttctgctctctgttctaatagtgtattcctcataggtaactgggattaagtggaggttttaggtcaaaccatttagttcttgatgttttaatactcactggcaaaagatgataaatgtagatagtaactgaaatgagactaaactctaaaagtactctaggccaggcatggtggctccgtctgtaatctcagcactttgggaggctgaaacaggagaatcacttgagcccaggagttccaaaccagcctgggcaagatgacaagaccccgtccctatatatttaattaaaatttaaacatatttaaaaaaataaaagcactagtcatctctgagatgttcaagtaattctccacttgaattaagaacaaggatggctgttcactaatctcaatcagacccatgatttgtttgatcttgaagatgccagttgtctatcaggcagatggctagtaggtaaggggagagtcactctgggatgaaatgatagaggactgttgtaaatacctgtcgtgtacagacacagctccctaatttctctactaaagaacataattatgaaaggttttaagttatctcattgatcaaatgaatcatatggcttaactcattaataatttgtgaaatcatataatgccatctgacacagctcatactgtattcaccttacaaccctgagtgggacttttaatttctaaaacaatattctgccaatgacagtagcgcttcagttctgatttcatgtagagcgatggctttatgtgatcaagaaacattaagtacgaaaaattacctaaaggtcagcaatgcctcaccatgcttggaaagtgaacaaaacgggtttccatgaaaggaaatcgtctgaccctcctttgtgtcttctgctttacaaaagcatttctgcgcttcataaatgtaaatattattcagtaaatgtatcctgtcctctttaaaaataaataaatgaagttggggcaactgagtatgtgcaaaccaaagttctgtttttaaaaataatgttccggctgagcgtggtggctcatgcctgtaatcccagcactttgggaggccgaggcgggcggatcatgaggtcaggagctcaagaccatcctggttcacatggtgaaaccccatctctactaaaaatacaaaaaattagccgggcgtggtggcgggcacctgtagtcccagctacttcgggaggctgaggcaggagaatggcgtgaacccgggaggcagagcttgcagtgagccgcgacagcgccactgcactccagcctgggtgacagagcgagactccgtctcaaataataataataataataataataataataataataataataataatgttcaagaaaaaagtaagacttcagtggctcacaagctagtaaactgcatttcaaaaggttttgccactaggtcttatttgtttctcaatcatcttaattggtctctgaatatcctatagatgaaaagcctgaggaaaaggcttatcatacaaatgggatgacagacaactcaaaaccaactttaaaacaagcagaagggagaggcctttaaaaagggaactaaagctccaacactacttcctgcactgagctctctcccaaacagccaggctgcttgcagctcatcttacccagaagagccgcaattgcttcccaggatcctaacttgagcacagacataccatttacaagtgtaaatgtggtgagttcatcagtttctggcattaccaatacagagcatggacagaagagacatttcaagtccaaattttctccatcgaacttttagacacaaactcagctgaatgtttctatgtttttataggaaaatattttcttaagcatgaaacaggataaacaccaaaaacagtggggccaagtttgccttgtaaaagatctattgtccaaaggtgaatttccctggcatctcttgcgacatgagaacacctcccatttgcttttcctcccacaactcctcagctctttaaaggtggagtctgtttgctgcagcaaagccaaggggaatgatggttccgggcagtcacagaggcggcctactttaaggagaaacacttctgcaaatgtaagcaggaaccaggtttactcacccagagaaaaacacgtttcctcagaaggttttgcagctccagtagttatagaacacaccactcaccaccagcatcaccactgtaagtcaactccacgtggaactcaagtaagatcagagttctcctccaagtatcttactcatcacgcaaagcaacacttgggcttggctataactctcccatgacacagggatgacacaaattagctccacactgtgtcttccctgcctcccacacagtcgatggcagtggactgacaaatgtggtagttacttagcaatactttgtggttatctcacccacatcattcacagagacagacagtgccacccttccataaaaacttctcccctcccacaaactgttgaattctacataataacttacattattacatggaggaacaaaatactggcttgtgcttagtagaaagtagtcattccatggacctttaagaatcctaatgctgatcctgttgttctctaggtcttgagcaaaatcactccacagtaaatcaaaggaatgtgaatgccaagtgaataaagccagaagagtttaatgagaactaccacccacctgcaaatgtcccccccacatcattctcagcagctaagcctcaaaccctcaatcactctgagtaataggtggggaagttgtgtggggtgcattaaaccaaaatgtctcaaacacttgtgatgaacatgttggcctcccaaagatgacctgaagggggttggtagggttggtacagacattctgctgtccttaaatgaaccctagttggtctactcaagctgagaaaaacatttcagtgggatctatcatgagctttcatttgtccccactgtcattcaaagcattcagacaaaaacgatagttagtgtgtactaagcacttccgatattccaggttggtctaagacgtttacaggcattaacacatttaatcttcacaacaatcctgcgaagtaggtattattagtatgtccacctggcagatgaggaaaacaaagcacaggtgctaggtttcccataacacggcaggccagtggcagagctggaatgtgtatccaggcagtctgactttagagaccacaccctgaactacagcttatcctgcctctctgggagaggtctgtcaggccagtgtgggacagcagattcacagacagcagtcagattggagaggcacatgatgataatattctggaatacagaatatataaagggaattctagttccaatttcactattaacggtgtgacattgggcaagttgtcttacttcctcgagatcagtacattcatctgggtgtgtgtgtgtctcgagatagatgaatgcaccttgcccctctaaaattctactacagtctactacacttggtaaggttattagaatatcatgctctattttaaaagtactaaaacaagaacctaagtagaggatagaaagcagaagaaagtcccatgatttcagttgggtaaaaatcaagtttacaacccaaaccacctactaagcctgctgccagcattgacaactcaggcctaaggcagctaggtagtaaccacactaattggatggcttagcagactgctgtgtttgttatggctggctagtgtgtatgccaatattcatgcatgctcaggcactgcgtggaaaaaaagtctgttgtgtattctcagcgagggcagcccactaaaacacagcaccttgggagtgctggggaggcccagagagtggagctcagcagctcccattcaggctctcaacaaagcagctctactttcaaacagctgataaaacttaaagttcttagtaaatctttatttttaagagtgtctgctatttaaacacacacacacacacacacacacacacacactgaatttaaacactcactagcatggagagagcagacggggctctctaggtctcatgtggaagagcaggcattgtttgaagtgggtaagaggcaggacactggtgaatgtgtgggcttctctggtctgtgcccagctagtatcaaccagtcatgcctaggcgactcaagtataatgaagatagccaaaattctttgagttttcaagagacctccatctggcgctaacatgaatgaaccatcttcaggaagtctctgaaagacaggcatagaaagattcttctacaccattccacctgggggagaagccctaaacacatgaggatgacaaaatgaatctaaacacattagctagtaaagagaccctaatcccttcattaaagactttaaaaaaaactagacttttgatataaaacctactctatttctaaacaatacttcagaccagtggagaggtagggaaggaagagctgccagaaaccctgcccacgtgtcacaggagcagaaaggcagtggatggctctcctctgctgtttccaaggccaaaaacccagtaagacctcaccatcttcccatgttaaccaggatttccaaagtcttggaataccaagaagcaaaaagtacctactgctgggtccataatgagcctggcatctgctgacagaggattacaccaactagcatttggcccacagccagagcagcttagaccaaagccacagctactctatgcgacatcactatgtgaattcccataaacccaaggcagctgaagactgcacagttccaaagtctacatggcattttataacccttttgcgctgtagagactacttagaagtaggacataaaaatgctctcataagggatttacatgggaaaaacaattttggttctctttgagagcaatctggataatttaagataaatagctctcacaaaattgtatggctttggccgggcgcggtggctcacgcctgtaatcccagcactcggggagtccgaggcgggcggatcacaaggtcaggagatcgagaccatcctggctaacacggtgaaaccccgtgtctactaaaaatacaaaaaattagccgggcgtggtgggaggcacctgtagtcccagctactcgggaggctgaggcaggagaatggcgtgaacccgggatgcggagtttgcagtgagccgagatagcgccaccgcactccagcctgggcgacaaagcgagactccgtctaaaaaaaaaaaaattgtatggctttactagtatacagactattaatattcagtgaagaagagctcttcagcaaaggttttagacaaacatctatcagggatgaatgcactgattaaatgaagcctcatgcaatgttaaggtacagaagaagccttcctcagaagttccctcttgccagaacacatggaaccaggcatggactttccttgagcaaaaacccatacattttcatatcattcttttataaagataaattcattttccatgttattttttccacagtcaatatgccactcaaaaaggctgcctttgctatagctgttaataaaaacataaaaccatcagtagtattagaggaacccagtagcaagagttattgctctctttgggaggccgagacgggcggatcacgaggtcaggcgatcgagaccatcctggctaccacggtgaaaccccatctctactaaaaatacaaaaaaattagccaggtgcggtggcaggcgcctgtagtcccagctattcgggaggctgaggcaggagaatggcgtgaacccgggaggcggagcttgcagtgagccgagatcgcacgagactccgtctcaaaaaaaaaaaaaaagagttattgctctaggtagacaagttgcagcatgaggaattagaatcaccatacctaaacatctgagcaaaattcaaagaatattttaatttctccattttcttccctttcccttcatataacgaagtaatataagaggtattaggaaaacccctcctccatggaaagatacttcagagcactctgtattctgggtttataatgcgttctcctcttctaataacagctttgagatacaatttcagtcctcacctaacacccctgacccaagggcatcaaaaacggtacaaagaatagagaagtagagaagtaatgagtgtgccatactgttatttgttgctaatctgggctttgtgattaagggaactaatatcaaaagcatggtaaaatagaggtatattccagtactgatgatggtggtgatggtgatgaatgacagttgacaatatttattgtgcacttactggttccaggtaccatgtcaagcacttcacaagcattatctcaattgatcctgacaatatctccaggaagtaggtcttctataaccactttataagatagactatttttttttttttttttttacccaaggcaatactgtcaggaaatgggcaagctgggctatgaagacaaatatcctgatttaaaaaaacaaggttaaccctacacaaggttctgtccattgggttttgagttctggtcccacaagacagatgtccagcagctggctctatggggttccaaattttaacataattatgggaagactcccatcaataccctttaactcataaattacctataattatctaagagctgtatctccccaggattaaaaactccaagagttctgataattagtcttcaaatacgaaggtaccatggaaagaaagaaaataaagttccccttctcccttgggtcccctgagaattctaaagatggtgaaattttttacaaattgatcttttccctgttgtatttcattaatatataaataatttaagatagacacttataccttccatcagaaactttaaaactctaataatgagtcctaggagatctaacacctttcctctttttagttcaaggtcttacatggaaacaacttaaagtagactttatcttgactaaacatgatccccctcttgtctactatatttatagctcttattgttctctacccttgagcccaaaccacattaagattgaatcacttctactgaaaacacactgatgctaaaaaagaaaaaaaaatcagactagaacatactggatttgttttcatttccaaccacaacccctactccacattaaataggatggattgctttctcagggaaaaataagattattagaaaagttagttagaagcacaaaaaccaatgtgtaagagagactgttcacttagcagggctcctctgctatggaagattttaaccaagagaagaatcgtacagccaaattccagaataagctactctgcatagcatttactttgggtataaagaaaatgacatcactacagcgctgggatccgaaacaagtgtttcatacaaagctggttacaatgatcagttcattccaaattggtgggaaaggctttgcactaaaatctgggaatgtacagccatggatggctcaaagcacgtcatgggagttcaaactggcctagattttctaaaatcttgttatgtaaaggggataaaattttaacttgaggataagtatattctaaaggaaaaacatgaggtaaaaatatggtatcttgtctattagaatattgctttgaaagtaaaaagaatatttcattactaccattctgatttgagattctgttactccaagaagctggcagcataaattataggtaatttatgagttaaagggtattgatcatagatatgactttgaagaggatggcgagaggaacggctgtcatctcagtagtgagctgaagaaaccctgcgtctcctggagtggatggggtcccctaggcctttggcggctgcactgtcccactcacatggtcctgtctgcattctcagacttactgacataagcagggtggcaactccctcatcagtccttcactcgtcacttccaggtgcatagcacggcattcggaagacaggtgcgtccacactgagagtgctctggggcggcccccaccaacactgtgggcagtgtcagccacacccatgagggccgctggacctctttcactccctcttctccctccctgctgctgacagcaggagtttcacaggcctactgcagcatcaattagaaatagcagaagagggtgggtgtggtggctcgcacctgtaatcccaacactttgagagggcaaagcaggaggatcatttgaggccggtcgttggagaccagccagaacaacatagcaagaccccacctctacaaaaaaaattaaaataaatggcggaagaagggaactcaaactggtcacttagtctcaggattttatgggaaagaatactgaagttactgtttggaagaaaataaacacatctaaatgaaatcctttatatttcttgaccaatagcatgaataattaaatgcatttgtaataatctccactcaatactgttcgcctaaatcaatggtatgagcctagcgaaagcattccactctctgggagtgactagactggtattctttgtagagatgggatgtatattaaatgcttatcaatttgactataaagttaccctgtggaagcaaaagaaagagagatagaagaaagatttgcagattccctcatgatcaaaaaacattcttaataagccatttaacgcatgtgtttgaccgtatcagtagcaatacaaatgttttgattgtgatatcattaccaagaaggcaaaggtaaatatttctctagagaaacagtgatattccctgctaaacctcactccaaggctcaagggcacaagtaggcccttcaacctgaatgccaacatttaacagaggctgtggggctacgaatgtccttgaggcttttgaagaaaaatcagatgaacagaaacgtagggggcggaaactaacgatagaacagtttctaccacgccctgcagggaaacatgttccttgtgaaggtacaggggttcgaaggttctactgctactcctggggaaactcacaccaggaagccatgaatgtctctgggaggttgtattcctggcagagagggtcacggactgctgacaaatgatcaacaaatgccaacaaatcagtacactgaccaaaagtaacaatcaactttcaaacatcttgtggtaacctggacttagtgctgtgcagaaattaaaagacggcctctgcctggatagaagttgcaggatgcacgggaggcgccggcaaaaccgactggtctcaactccctttgccctcacttgccacatctctctaggggtcttgctcatgaagagggaaattacagattatggcaggttggtgctggaaaaaaccctaaattgtttggcttggcccaacaacctcattttaaagatgaggtcagctcagaaacgggtaggtgacacagccaaagacagagctcatgtgaagtaccaggaaaaccccaggccccaccctgccaatcccatgctcccttaactctaaagggagaaaaattcgcctcaatttgtgcctacaatacccatgtcctggataagcaagagtcaagaaattcccgatttggcctcgacactgcctttcacctcttacatgctggtttcacttccgctgctgaggcgcacacttctgctttcatgcgagaaaccaggcccctctgaaaagggatggagaagaggcaccatcaaccagtcacttgagccaaggaaaagagactgcagtatgatctcctactgtcctggtgcttcccttcctggaaaaggtgcaattggggtttcaaagtaaatatctcccatcagtcaactcagagtgaagataaccagtggatgttacttccatgaaagaacaatgcaaaacgtcaagctgtgtaggcagcccaggaagactgcaaaccagccaaaagcactctctccctccctccccttgctctgccttaatcactgggcaagctatgcacactgttgctacttttttggtatattctacctgctccaatcccagtatcctcgttgttttcaatttgttttgaataaacgatcctaactggtcacaaataactaatctaaggagccagaattagtatgatttcgtaccgtcaagtaatgagttttcagaggtggaatacaccatgtgaattatttaaccaaatctaatttttcagataagtaaaagaaagcttcagagagagatgaagaacttagatataaacagagctggggccagagccaaagtctcctgactcccagcacaatgcttttctggtgaccctctgtggcacccgcaaacacaaggctaccctgggatcagagtcacgctggccttggatgtgcaatggccatagcagcataacaacttaaagtcctcctccatgaatggctagtgagaatcagcaagataggatgtgggctgcagaaacaatcggggagacatgagcctggttaaatattcagggaagaaaaagacccatgacaactcaaagaatgttgaagataaagcagactgcaaaggcagggaagagaaagaaaagaggggaaggaacacgtgtcatcaagaaagcaggtgaaaagaacagcatcagaacacaaaaaggctagctactgatcacaagatacacaagctttcgagagttaaaaaaaaaaatccctaaatcctgttacttcctttacagtgaagtaactttctctaaaagaaggcattcactgtttaaccatgttggtgtacagttacatcagacagtcttcagatgtgttttcctaaaactgaacgcaacacaacataaatatgacttctaccccagccaacaaaacatggattttgatactgaatacatactgcgtagggcaaccccacccttggcctgcaacctagcatctgcagatggatctcttagcctcttgccagagctggtcccctggttgcatggccctgagacctcccaagaagaactgggtgccacaggaagagatactgctgactcaggaaatggccacctcccatggagaggcagccaagccaggcatgcaactgagaagcagcttgtagcagtggtgattaagttttaaacgcttaataagactgcggctcaaatctaagtgctgtatgttctctctcatgtaggggtgcttctagaaatattcttgtatgtatgtgtagtggtgggtgcctatttttgttgttactaaaaatgtttttctcctttaaagaaagaaattactatcaaaacactggcttgttgctcacagaggagtcccagaatgaccagtaaactcaccctaggttggggcggaatgcagagacggtggggattatggtctaggttgtttattgtcatacaaaaatgtggcaactgccattctttggctacatttcaagcggatacttcttggttccctcatgtttaagcttttaagaaatgctcagctatgcaatttccacaaagtcaatcaatgatgaattcaaagctgtaatgcaagatgagacagatttgcttccaaaggtcaagatgtcagaaaatccaaggccaaaatcaccttagatcacccttaggtttatcttctacacctgttggccatatcgctgcctccagtcccgaagcagcatttatacacctggcaactaaataggtattcatctacttgttagaaaacttatgcaaggtaaagggatttagtaaaaagtgccaagtcctaaatcaacagaatttccacttacattgcaaatgaaagggtctaaaacagagaattccaatcacagacaattactcattcattgatcttcccacaccatctatcatttctatatgatgaaacttcggctcacttcttggtgcctgtctaaccctctagattattacagtactatttttggccatgcactatgcatcagacacctcaactgccttctcttcagtcgctcatatcagccgagatgtaaactacggctgaatggtccgctatttttatgctaacagcacttcaatatttttcatctgcctcttcttacatgttggccgaggtctatactaggtatcatttacatttctagaaacctgaaatatcggcattatcctcctactcacaactatggcaacagcattcataggctacatgctcccatgaggccagatatcattcggaggcgctacagtaattacaaatctactatcagccatgccatctattggaagtgaccttctgcaatgaatctctgaggtggattctttcctcttactgactgaccttgtcttttgaaactatgacttccctcatgtctaaggtaaacttttctccttatatctaaggtaaactgtttcaaccagaagcacatcttccatgggtctccaacccttggtccaatcgatgagttccccaagggacttgctagatgcacaagttctagcagccagtgactgtttcccaccactagagctattaatgagccttctggttaatcagctgcagagacagatttaactcttcttgtttatcttttcagcagcaaaatactgaagaaatacaaatgttatcctattactgtcatctaggaattcagtcttgccatgggaaagctagactaaaatgtccacacaggatagatgtacttctctgttcaacaacatacagataataaagagcttgagaaaaccaggatggatgaaaagcattgaaaaccagaaccacagcaatgcaaacatctcccacatagcctggcaaaggcccctcccctgtcccaaagggattgttgcctcacgctgaaagatattcattctccatgtcttctcatggtggcatctctatttcagccaccagctgtcatgacatcctttctccctggctcctttcaggtactcacagctcctataacaatggatctgagacccagaagccctgatcaaagatgatcagctgtggatgattacaaaacaaagcgatgtcaagatcagcagattataggcaagacaatttgatactcatccttaacaccctgtcacccttaagagattttcattcatttagttctcagaagtcaacatggcatctcagctagaagttcagcctcattactcacttgtcctatgttttctaagacaattgtcgtaagttatttaaaaggaggcaaaaattgcccagtaagacggtgaatacagcaaggtaaaggagaagtagaaaaggaaagatagtcactatctctcctccccatgcacaaaaaggtcttgtagctcaaccccctctgcagatgggcaaactgaggggtcatgagaggacgcgactcttcccaagtctcaccatcaatagcagagttggaccaacagaggttcccctgctaaaaagcagggcctcaataaaggaccagctgaatcaacaaaagggagtggcttccttaagaacatgctgggcacagaaactctattgccccccctcccttctgaatacaggttcttatgcataccaggagcattcaagaacagaggggacaaaagatctccacaaaagcgagacaaagtgcaaggacaccagaacaccagacagctacaactgttccttggcctgcgaagcatcaacagttcagtctatctcaacaggtaagaggaataagccactgtcctttgaacatccaataagataaacaaaccaaaaaatccacagagcactctgcagtccatctagcactttcccatagttattttgtttcatcctcacaatagtcccatcttgcaagtaaagaaactgaggaccaaggaagtcttacccaaagtcatagctggtaaacaacaaggccggaagttgagcctacatcttccaactccatattcagcaccttctactctacctccacccaaagatattcatgacaaaaagccaaatataacaatagaccaaagggccaactgaaccacagcctccggccagctaaacaatgactaaaatcccagctggaacccaaagcaggctctgtctcctcaggacttcaggacaggattccagagtggattcagaccagccctctgctacgaggcaagctcttcgctctcctacaggaactctgggttaatcacatgtcccacagcagcatggctggagctagacctgtcaagcacattcggctcttggtgacacaacccagctgtgcaggcggttcccatcaagggagctccagacattccagacactgtgccacggaattgcagggagggaccgagctgcacagggagctggcaagcccgacagaactttccctaccacatctgtacttctgcaacaacaaggcagtttcaaatcagctcccaaagagctacacagattctgccttgtgaggatagactagaaactgacagtggagattccttctggagagtgggaccaatggaacttttaccgttggcattgtattcctttcataatatctttgaaaactagatcaaaattcaatctaaaacccataaggatgacagtctacactggaaagtggtgaaggcaaaaagaaactgacatcaggtgacgtaaactaatcacacaacagttttaaacaagagctttagaaacactgaattaaatgtaagacctttataaagtataacaagattcttatttacaaattttacaaaaatttcccttgactgttaacagaagaaattgagccatttttgaggcaggaaaaaaaaaagtctttagtacttaattcttttaggcattttcacatactttatctcatttaatctcaataaccatggaataaaaatattatctacaagtgatagaccaggaaactcagaccaggcactcagagaagctaagcagctttcacacagctgcacagctaccaactcctcgagtgtaaagacagaaagggacaatctaggaatacagacaagtcctaaaaaagctgccaccactgctgggcaaaggcaacctgcacctatgaaagaacccagacacaatggccagtttctgacagtcctttcttgagtgggtcacatgctgcctatggggtacatgtgtacacaatgctgctccccatatttatgaaactgacatgccctccacactacatgagcacacagatgttttcacaaagtgctgatggacctgcggtaatctacccattttcctctcccagcccccgttgccactgaaggctgcatttgagagatgcccaactgactgagacgagaacagaggtgctaccctggaacctggccacaaggaagccctgatgtgtttacagtgtgagcttgcccacaacttcaaattcatcaccatcatgctctaacatcgaagtcctcacgtgcctcacataaggaagcacaatttaaacgtcataatagccaatgatcattaatgtttactgagctcttttagagcagaaggaactatggtaattgcttcccatgcactacacactagttaatcctcacagccaccacccctcatgttagatactattatcattcctatttcatacacgaagaagctgagcttcagaagtggttaagtaacttgctagagaccaaactgtaaggagtaaaactgaagcctatgggcctatgactcctaagtcagactcagagccactctgcttatgtctctcataaaatatatttcatggcctttttccctcaaatattctctttgtcatttcttattaaagttatgaaacaaaatgtccaaacagaagaggcaaaattgttatactgatgggctagccagacaaatggcattataaaaatactggaaataggaacttacaatccatagtcaaggcaagcaatgccaatgttaccaatgcatacccacaaatacacctgttataatcattgactaccctggaagatcaagccctggagttcttgctgggttctggatggtcaggaattattcttcaatcccaggcatcttgaaaatggacataatatcaacggactaggctcaattccccttctttagcatcgttgacctcacttatcccctgcctgttgaacatcacaacagaaactttcccagaaagaaaccgtgaggctgaaattccctcagctccagggggaaaaaaaaaactccctatgcccttttcattagataactggttaatctttgaagtttcagtaaaacgttgaattctaaggtgaatcacctttccatactaacagcacagccaactttcccttcagagcagtgatataccaaaataagaatgatagccttgtgcagtagtcattacggaccccactacatgactaagctcaaattagtgaccttccacagcctggatgaagtttcacaaagggtagctggagttcacatgcagtctaggaacaccaagctatgtctaagcgcctcaaagagcagcacaactccactagggaaaaatctcattttgcccaaacattgtagaccctgtaataaatatactcttcatttgtcatccttatttagaaattaacatatgatcattttcctaagtctttcctaggatctccttacaatgcttttcatttgaaataatctattttcaaatccaaggaagtttctacaattacaattatacataatccagcactgcctaggaccagacaaagacaatacaccaatttccagttaccttcgtcagcaaacagtctgcccataattttgtcaggaattgaagagcattctcccattccatctgctcagcaaactttcatcttccgcaagggctcttttaatgtacttctaaagctgcttctgttgcaagtacaaactgctacacactgactccgcagtgacattctcccagaatgccactggatccctcaggggctcagggatacgaacttgaaagaagttgaaggaggacgtccccctcttcccagcctcctctctcaacacagcttccctccaagagacctgcttcaaaagtccagacccaatgaagtcactcatgacctcacaaacctctagtttaactctttaagagccagatggcaagctgacagcagtcagaaaaggcaactgtctaagcttatttggagtggttgccgtttaagggaaaggagacatttgtccagcatcgttcaaaacaaagtaactttgccactgatttggtttaatagcactaaagttttttgaacaactattttatagactgcaatttcctacagcacacacagcctggtcctaaagaaatgactgaaatagacaacaaaatagatttaagtcattaatattatacacaatttagctctgttaaattcacacttgactgaaatagacaacaaaatagatttaagtcattaatattatacacaatttagctctattaaattcacacttaatctcatgtaatttgtgattttctattttcatttctagttttgttttttctgctcgtggatgtgaaaatatttattgtcctgttggttgtccaaagcctgcttcagacacgtaagtggccaggcaacacacacagctgtcagacacaggcaacaactgccacagaggcatccgagaaaccagggacagcaggagttgagatccactggaagccgtggccgccagacctaaccaatggatgccagagtgtgtgtcagccctaacagggataggagaccagcctcacttcagtttcttttccatgcttttcctggggatcctgctatttttgttgggatacggggattatgaggacctggagatttaaaagactaaaaattactttctaaacagaagtggataaaaattatacactcgaagaacatgtaatatgccctttcaagaatgttctggtttaccagaaaatgattatacttaccatgcagtaattttattcctaaatatatacccagactagagaagttcttccatgtgttcccaaaaagccacatgaaggttctgtgcacatcgccatgctgtttgacataatatgacagtcaaaatgcccataaatagaaaaatgaaaaaaataggttatagtatgttcacataatgaatactatacagcaattaaactgatcaaactagggctgagtcaataagaatgaatttcaaatactgaggaaaaaagggtaaagacagaaagggacaatctagaaatacaggtatgtcctcaaaaagcagccaccactgccaggcaaaggcaacctgcatgtatgaaagaactcagacacaatggccagtttcacaaaaggaaacaagatagcttgtatatgaagctgaaaagtgtgtgaaacactgtctaatgattacagatgcacatctctaaaggaatgataaacatcagcagctcatggttacttcactacgtagggaaggaaagagaggaatgagatctgggggcataaagaggagaggagtttgcaattcatctgaaatacttttatttcctaagtgggatgatgagatcacaggtgtttattattgtctacactttttggtatgcctcaaatgttacagaagctttagaaagccaactgcataatgactacaacctctttgagtgcagcaacacctgttcagtctggacaattaacagaacagggggcaaagaggttaacaattcccttcactctcaagtccccaaatccaagcagctgctgctccttctgccatagttcagctccttctctctggcatgtcaccctgctccacgccacccacaaccctttacacatagccaactcagccttcacagcccacctcaaaatgcagcacccccacaaggacctccgtgacatcccacgatgcaagtaacccccaactcagaaccatgaagcctggctctctgggctctgcactagagttatttctgaagttatctgatctgcctgtttgggagacaccttagtatctactatagagcagctgctcattaagttcttcattcaacaaaaactgagtgcccagtatgtgctggccactatgccaggggttctctgagtcccaaaacgtagaacttgagaagaccacggcctaacagaagagacaggcctgtagcgaagtataacactattaatactacgtgctgaatcctcaaatagttgctaagtgaatgccaactacgaataatgaaattttaggattgcttcgcaatagtaactattcaatacatcttattttctctatactaaagactttataatattactcttgacaagaaaatgtcaccttgtttgcgttgaggtggggcttctaaatagagtaattataaagacaataaaagaaactatcattaaacctcctcagagtcaaggaattgaaggctcttagaattattattacagaaaaacaacatctcaagtcaattcgattttaccacagtccattcatactgggtgactttgaagaggttttaaagacatttcaagcatttcaagcactgttattactgataatagccaacatttattgagtactcattaagtgccagtaaatgattactgattatgtgccagtaaatgacttagacagagaattgactaaaatttgaaccaaagcactccgacttaagaacccacactcttcgccaccaaccatacgtttcctaagcaggaaaatcaatcaatccctgctgatatagtttggagggactccctatcaccaccacacctaagacaacagaagaaatcatttccaggttcacagccaggagcactcactttcccaaacctctgttaggagaatcctcccctccaaaagcggagttacctttaacaggcccacatccccctgagaacggggactggctcaactttgtattctgcctctaagcaacttgcagtaaacgcctctcaaaagcagcttccagtaaacgcttcccaaacttcaacgtgatcatggatcacctgggaatgtgttaaaatgcaaattttgctcgagcaggtccagggtggtatctgagagacacatttctaaccaggtccaggtgatgtctgttagtctgaggcccacacctgggagtagcaaggtgttgagaacctaggctgcgcatcagaatcaccggggaagcttttaaagctatccatgtccaggtgccactctaacaaatagaatctctgacggtgaaggctggagatgagaagcttacagagctccctgtatgattctaatgagcaatcaagtttgagaactactgtgctacagctttactactcaagctttgctccatggaccaccgttgtagaccagtgctttgcaaacttccacgtgaatgtaaaccacttggacctcttggtaaaatgcagattctaatgtagtaggtcagggtggggctgaggattctgcaattctaataagctcccaagtgaatgctgttgggtggcaagatggtgagtaaaaacatcagaaaatctcaggagttcagtgtgtgtgatttttaaggctttccttttgtaattttagattcagagaccagtagaatacctgcaaatagagcgtcaggcacaggcataagaaacagcatatgaggtatggggattacaaaatggaagcatttatctaacattagacaggacagagattaatattaatcctcattagcattcatgagaaacttatttaccttcccttgcaccatgaccactgtctgtctcaagtactaaaaatgaaggctctgctaacagcttgagccaattcaatagacagacataccttggatatattgctggttcaattccagaatgctgcaataaagcaaatatcacaatagagcaagtgatacaaatttctggattttctggtgcctataagagttaggtttacgctgtagtttctcagtgtgcaacggtattttgtctaaaaacaacagtgtacatactttcctttaaaaacaaactttattgctaaaaaatgctaatgatcatctgagtactcagcaagtcctaatctttttgctgatggaaggacttgcctcaatgttgatggctgctgactgatcagggtggtggttgcagaaggttgcggtggctgtggcaacttctgaaaataagacaaaaatgaagtttgctgcatcaatggactcttcttttcacaaaatatttctctgtagcctgtgaggctgcttgatcatcttttacccaccacaaaacttttttttttcaaagttaaagtcaatcctctcaaaccttgccactgctttattaagtttatgaaatattccaaatcctttgtagtcatctcaatgaggttcacagcattttcatcagcagtagacttcatttcaagaaaccgctttctttattcacccataagaagcaactcctcatttattaaagttttatcatgacactgtagcaattcagtcacatcttaaggctccacttctcgttcgcctgctatttccaccacatctgcagttatttaatctactggaagtttcaaaccactcagccactcatgaaggttggaattaacatcttccaaattcctgttcatgttgatatcttgacctcctcctcccacaaatcataaatgttcttaatggcatctagaatggtgaatcctttccagaaggttttcaactgactttgcccagatccatcagaggaatcactatctatagtgactacagctttacacaatatattccttccaaaaaagctcaaagtcaaaattactcctcgatccatggtttgcagaatggatattgtgttggcgggcattagaactacatcagtcttcttgtacatctccatcagagctcccgggtgaccaggcgtcttgtcaatgagtagcagtagtattttcaaagaaatcctttttttttttttttttgcctctaagcagtaggtcttaatagtgggcttaaaatagtcagtaaatcatgctgtcagcagatgtgctgttatctagcctttgtagttccattcctagagcacaggcagagtagatttaaggataattctgaagggccgtaggattttgagaagggaaaatgagcactaacttcaatttagtgtcactagctgcattagctcctaccaagggtcagcttgtcctttcaagctttaagaaaaggcgatgcctcgtactctctagctaagaaagtcctagacagcatctttttccaatagatggctatttggtttacagtgaaaatgtgttgtttagtgtagctagctttatcaattatcccagctagatcttctggataactcactgcagcttctacatcagcacttgctgcttcgtctagtacttttatgttacggagatagcttcttttcttaaacctcataaaccaccctcggctagcttccagctttttggctgcagctccctcacctgtctcagctttcagagaattgaagagagttagagccttgctctggcttcggcttaaggaaacgttgtggctgatttgatcttctatccagaccattaaaactttctctatatcagaaataaggtgttttccttattattcatgtgttctatgaagtagcacttttaatttccttcaagaacttttcattgcattcacaacttggctgtttggtgcaagaggtctagccttcagcgtattctggctttcaacatgcctttctcaccaagtttaatcctttctagaattttatttaaagtgagagacatgagattcttcctttcatttgaacatttagaggcattgcagggttattaactggcataatctcaatattgtgtgtctcaggcaatagggaggcccgagaagagggagagagagggggaacagctggtttcatggagcaatcggaacacacaaaacttattgataaggtttgccacgttatatgggcatggtttatggggccccaaaacaatgacaatagtaacatcaaagatctgggaccacaggtcaccataacagatataacagtaatgaaaaagtctgaaatattgagataatgactaaaatgtgacacagagacaaaaagtgagcacctgttattggaaacatggcaccaacagacttgtttgaggcagggttaccacaaatctgtaatttgaataaaaaaaaaaaacagagtatcttcaaagagcaataaagctaagtgcaataaaatgaggtttgcctgtagctctgtatttcagtttacagagggcttatgaagtgaaaaacaagattaaagtactgtaaacaagacccttttgagttcaggcaaatttgtattcctgtgtaaaacaccttcagagaacaatttactcaagaaagttggtgtcttttttcctccccaaaacaaggctcaatggataacatccaatgttgcaaatatggtgctaagagacctctgctaagatgaatatcacttcctttaaaagttaaatattgtactgatatatgaataaaaatattgctgtatcatctcgatcaattaaagtattaaccaccattccatttttatttagatctatgattctccttgtaatcacttatacctccaatgtctgttatcatttgatgccattctttgatcaaagctcatccaagtaacaggcgccgcaccatgctcttcacaccagtagccaccaatatccagggaattactttggtttgtttgttttaaggtttaaaccacagaattagaatgtctccaggaatagctatttgaaatccaggaccatttcctgaagtcatcactaatttataaaagaggcaccaaacagacagggagggcacaagaccaccagggcaagggctgtctgaagggcactgaaagaacaaccaatgaccagtgcacttagcttccatcctgggctccctgacaatcgacccactgctggagaagggacaacacacagaagagcttccaggaaactgaccttacagggcacattttctacagagatggcattagaaggacacataagcaaaacccaagtgctcctgtgtgagcccctcctcacagtcccatcctcagcccactcctcacccttgagagccctctcataaccacagctgcaagtcttacatctaaaagggtgactccaaagtctctccagtgaccttcagtcccatattcccaccagcacttcacaagtaaccctctctctcctccaatttgacctctttatatctgatcacactaggtgtcctcctaccaacctgctgcttcccccaactccagtgcagggtttcttgctccagccagtcacccatgcttgaactctcacaatcattttgactcagccccatgtgtcctagagtcaaacattcatcaaatccttgcatctttctttttaccaggctatttcttatctattttcttattattccttagactcttagactactacaacacccatgataggtttaaaataaatatccacaaattagaacttagcaaagtcttaccacaaaactgcacattggttgataaggctatttccatcttaccaataagcaatcagaagttccacgaatgaaaagacctccccgagaacaagctgccagaaaagaggatggcttcacctcttctcttcagtctcaaccctccaggtttattccacctaccacagtgcactgtgcttcatagacagaaagtgatttctaaggaagccccgtagtaagggtccgatgcaggacttctgtccatggccgagtggcagaataacttttctttgggttactactgtcattggtattcatttgtatttaatgagctcctactgggtaccggacattgttaggccacttgactttcttttcttgatttttgttccatctgattaatctcgtttcctcctccttcctcctttacgagataggtattattcatttcattttacgcttgcagagggtcccagattttatgtatttattcaaaaatacgcacctagaaagtgaaacaattcgaaaccaggaataaatggctctgagacctagaagagcccctaacccacatcactgagcaggaactcctttgtggtttttaaaaaaaaaaaatcaaatcaccattacactactttggaaagaagccagaaagagaaaaatgagaacctcttttttgactgaacaaatttaaaatgtaaaagaaaaggattaaagagattactggagcaacagcaacaggctcatgaagccacaaggcagcagaccttcccagcaccaatggcagaaaagaagcccggagctccgtgggcagccagatctctccaatttcacaacatgaaaatgttgttctctgtcaccagcttcactaatgtcacattattttaaattattcttttaatatttatatattatattaaagtgacttcaagtttaaactgggatgttgaaacagtttttcaaatcgcacttcaacaaatttctacttcttatttcacatgaattcttcctaagcggacaaacaatacagatagagaaaaactgaggaagaaagagaataatttccaaacactgcattccatttgagaaggaggagaaagaaataagagcaaggcaaaaaaaaaaaaaaaaatccccacaaatatcaaattcagagtgggctgaagacagactgaagcgcttccctcaggcagatcagctgcacgcagatgtaattcacctgttctgccatacccgttagtatcccgagcaagatctgaaaggaaaacttggaagcttagatataaaatagatcatcacgctacaaaggttatttcaaaaagcagcttcatatattccaaagaaccaaaaaagaagttcctgccatgtcacggtatttgctatttctttttctcctgtccaaacccaagttcaatggaaatggacaatatccagctaatggtcacagtgacaacacttgtgccttaagaacttactgattgaagttgtggtcatctgctgataagccggcgagcgagaagcactcagacacaaaggaacccattgaaacgtgtataattgtaagtctctaattatcctttctaattttggagccatgtgacaggacttcacacagcaccgctgacccccggtcagcctgagggccatgtagctgggctacatggggaggggatgctcctctttgcttcttcattgatatattgtgttccatgcagaggctgagctgtttccggctgacatgtggctcactcatcaacaggcaggcagagcaagcacctgggagaatgcattaggctggtgcaaaagtaattgcagtattgccattgaaagtaatgacaaaaaacttaattatgtttgtgacaatctaatagtccatccagatttattccaggattttaagaggcttttcaccttacacagagtgagccgcttgatgtcacaaaggtatttaatacttttaaagacaaatagacacgcactcaaaaaaaaaactgtctttcccaactgcatactagaatattatagatttggaatattttcttctttgacttgagtagagagagtaacagggaagaacagtgtccctctggccgccaaaggatggctgagcccaagactggaaggcattcctgagagaaggaactaagtgctacaacaccacaatcagccttcccaacctcttgcacctttctttaaaagagcaattcagccgagaacagtgtcatcctgtgctcaaaaaaaaaatcactgtccaataccgccactgaaataatctttaatgacaaagtaaagacagatcttgaaacagaaaaggatttaagtaaatctaggcaatagcaaagcaaatacatttttgttttgttgaagatatctggtcttgttctagatctaccatgaaatcattaccacttggtccagttcagcatagctcagtaagagcacgggctctggaggctgactgcctgtgttcgagggctgagtatgccacttaccatctgtgtgacctttagcaagttactcaacctctctgtacctcagtttccttattcggaaaattagaacactaatagttcctttcttccccctatagctcattatgagaacgaagcatcatgtgtttactaaataaatcaaacctatgggccacatatgacacacaattatgttcagagactagctaaagtaataatattttttacaagctagcgactaacactttatacattaaaatcaatatttaatttccttggttcatgtctaccaaatatcaaggaggcgcgatcaggggagaattcattagtcttattccttttcttttaagccttcctcagagctcactttatgcaatgtactcagacccccaccactagcaaggaagcaggagaggcgagtgaacacagatggaatggaggcatggccactgcttttatttatgacttttcttttgtaaatatattaatacaatgggaaattttttttcctttaattctaacacttgggccctcagtgcttggctgaaggacaggcttaatacctcaatgtccacttccttgcctcggcagagggatgttttaacgcagatgaaattttaaaaggccagctcactgattgctttaaaaatgtgtggaaacgtgtgtattattgacctggtaaattttccttcaaattgaatgcatacaccaccaccgacaacaacaacaagcagctctacatttagaacttagtttcttgaaaacagaccatctcagacttccggctttatcaacacatggcatgagagaaatccgatcaaaagaagaataacaaaataaaagacccaacacctagcacagtgaatgaatccggcctaggagccagacaacttgaattctactacggtatctgtcacaagacagccacgtggctttgggtaagatatcccaccaaactggaatacagattctatgttatatatatatatatatatatatatatatatatatatatatatatatatatatatatatatatttttttttttttttttttttttaaaggctatctgaggccccttcaagtagtaaaatgttctcattctctaacccacaatagtaacacaattcttctttggttacaacttctccaaatcagcaaggaaggtagaagggagtaaagaaaaatatgggtttttcagtttccttaaaatttcttaggatcattaaacctgccctaccttttaaccttgaatagagacatacatcacaaaataaagcttcctccacctgtaaccacttattatcatatgccaacctcaaataacacaaaatgggggagtcctgccaagcttgtctgtccaagccactggcagtgctcagcacatggtaggatgaccaccaatcaggaattgtacagtaggagtgcccagactcggggagaggcaagctggcgcgtctccaaggtgcttgtcactcaccactagaacgtggtcctttaccactagacaagatctcctggtttgacaatgcaggtgacacagctgaaactttatctcaacacggcctgaagaataccactgtctaaatatgagatgctaaaatactatgacctactctaatattctctcccaactctgtccatcctcgtgactggcacccatgctggcccaaatgatgacaacctcctgttctaagtgcacaagccgcacatttaataaacctttcacccagttccttcactggtgttcatctctcggcttcacttacaaccactccctgtggcttttgcagtgaagcctcttagcccaaaactcttccactccccaaaccatgtttggtctgtaatataaacaacttccactcaccctagaaaactgagtgggaatttcagtgcaattatctgcatacctttcctacagcgttttatcacaatttgcagtcctcagagacgaaggtgaaaggggaggactaaggtggcaccctccactgaggagcaccgcctcacggggacactgctttcaggaatgcctcctcgccagtactcttccactgagagacactctgatctcagagatacaagaagtctagatgtggactaaccaggcaaccagttcatatgcacacacttacccaggctctgctttgtaccatgtcctgtgcgaggtgctttagtctctattaaccctttaaatctcacagcctcacaacacactggatcattaaccccatttcgcaaataaataaatccagtttcagagaacgtaagtggcttgcccaagtacttcagaccaaagtcttgtggttttgacaccttgttctttttattctcactgtgacccagtaagacaaccaatatccacaatccatattcacaagaaaatgcatagctacaatgtcacaaggagccaatcctgaatttgctcatctaatgaactataaaccttcaaactggttatagaaaatgctcagcacagggcagactgctcaaaaagagaggtccattgaaaacctgtaatattaatactggctttttttttttttaacaaaaaacactggtattatttaatacagctttaaacagctttaaaatagttgatcaccatttaacacctcccaccagctccacacaaacatacatacatacacacacacacacacacacacatataccaaaacaaaattcataaaattgtcacaggtagataacctgaggatgacgagcatgaagaaatgaaacgctggataatccataaatagtcgcggaatccccaaataacaggcatggtggatacaatgtacataatttgtcattttatctcccagatagattaaaaatcctaaagtagagagagaaaataaatacggagcctagaccaagatatcagctctctcaagcatctgtctaatcggatccttccttcaacacgtcaggaacaggaagacagaacaggaactctcagagcaaagggctggaagagactttgctgactgtatagtccaccactttaatttccaatgaaggaatctctgagctaatcaaacaatcttcttgaagtcttcaaccaccctcagtgccagactaaagctacgatctctcagtgttcgtttcacagcaccacgtctctgccatcatcggagctgataacctcactcatcatccccaaatatttgtttggtatccaatttatatatagtcatccaggaaatcccacagactaaaatgatcacagtgtgccaatgtgacaaaccactaaggtgtgtctttcctgccctaaaactcaaattactttttactcacatcatttgcttatgtccacagaaattggccaaatgatttaaatatatattccacactcagatttcccagaaaagaaatcctacaaaaaccaccagcatgaaatgaatgagaatgggacgagtaccttccccagaaagcaatctccggggtgcctttcgtgtagatggagtcgctggcatcattcagcccattggtgacgccactagaatagcccatcacgatgccaccatctgcagacacactcaggatatcctgatgtcctccccctgatgtcctctccaagaactgaccaccttctttaatgcgctgttgtatcattggagtgaggggcatttcaaagctaaaatagctatcaggctctgagtataatgtctccagggactctgcactgtagtataaagaagtgttgtccaaaatggtttcaaactgggagctgtacacgtcggtggagtcctccgtatatccaggcccaaggatgtcttcatcttcccccttaacgtgctcctcttgttcgctgatcctggaaagtaaataagagtgaagaattccaatattaggttaatgtctttatttctcccacttcaaccatataaaaaggacaacattctgaagatctaactcttctattcattgacttatatcttaacatatttgggaaggaagctatgaaatataatcaggttgaaaaattcttggcatgcatgtggctaggacactataaatactttaataaagtttcaaactagtttcctaatgtgtgaatacatctggtccaatgaagatatgaataaaatattcaattctcattttagccaaatataccgtacacattcagattatttgcaactaccagcattcctaattataacagaagcagataaatatatcatggaaacttgatacggcaaaatttcagtaaaaatacaccaaactttcatcagttgattaatactttctgatttaaataaggccaaatgctctcaagcagatgactgcatcagaagccaagagctgccccctgctgacaacagagcagcactgcagagagatttcacgtccaaaattagatagccaattaacggcctaacaaaaaggcaacagaagcaaggctaaccaaagctttgagagattagaaacagctcaaaagtcaacatacagggtagggcattcactttggcacacaaacgtgaacaattaatatgcagcatgttctacaaatattaaaaacgaacattaggataactaagtaaaattaaaaacttgggagatagatcactactaagagcaagaggtcaagagttagaaaaaccagaagctgaattttggctgtctcaattactagctatatcacttgaagcaactttacttaacctctctgagcctcagattcctacaaataggaataacatagaattaggaattatctattaagcatctcataagtcatccacattcccaggtattactggaatccacattcagcattgcaattggtttgttgtttttaaatactgaaggtcacccatgggaccaaatgcttgttcttaatggctttccactgcacttggcataaactggaccgttcctaagatgatgctcctccctacctctccacactcactgcaccccactctcccctgctttttttttttttttttgagatgcagtctaactctatcacctaggctggggtgcattggtgcaatctcggctcactgcagcctccgcctcccaggttcaagtgactctcctgcctcagactctcaagcagctgggattacaggcatgtaacacaacgcctggctaattttgtatttttattggagatggagttagccaggctggtctcaaactcctgacctcgggtgatctgcctgcctcggcctcccaaagtgctgggattacaggtgtgagccaccatgccaagcctcccctgctcttcaggcattagccacacagggagagtttcaaatcttcaagcctggcacaggccttggcttcacacatctgcaggaagcacacactagtcagggagctcagcagcctcctgtgcacatgctgttccctctagctggaacattcttcctaccccttctctggctggcaaactctttccttcctcacgtctcagtgtaatttccatttccacagaaaagctttgtccaagccatcaactaaactggcctcttccctccatccaaattattcattcttgtaggtctctgttctttccttcacagaacctagcacactttgtgatcctatacctattagcatgtttatgtgatcaatgtttatcttcagtggtaaattccatgaggacagtatccgtgagccacatctattttgaccattcctttacgcccagcatcttgcagtgtcaggacataggagacaattgaaaatatttgtgggaagaaaagaggaatgaattattaatctgaacaacagtaaaagtgcatattccagtgggaatataaacactgggccacatgccacatatcaaggccgctttggagggaagtctggagagctgatgggttggggaggggagtgggaaggatcctgccagtgatcccaaaggagcaccactctcagtgggttttttaactgcagaggaaaaggcatttccttacaccgaacaaaaaaacaaaaaacaaccctcggccttgacacagatgctctcccgtataaactataaaatgtggtgtcatgagggctgacagaagaaaagatggtaccaattagaagtacagtacacaacaaatgactacgatcaaagggagtgcagaaagatgggtcacgtctgccatttatccagggtctaagctggtgtagatgtcagaaatgcagggaaagaccaggaaataccacatgatgtcaagtttcaatcataaaggccataaatctcataagtaggagttaaacaatgagaacatatgggcacagggaggggaatatcacccaccgggccctgtcggggtgttgggggctaagggagggatggcattaggagaaatacctaatgtagatgacgggttgatgggtgcagcaaaccaccatggcacatgtatacttatgtaacaaacctgcacgttctgcacatgtaccccagaacctaaagtataatttacaaaaaaaaaaaaggccataaatcaaaatatatgctacttgtgagaagaagaaattcccatgtgaataccagggaacaactgaattataaaatctacttctgaccccctgagatgtcatttcaaaacataggaagggcccggcacagtggctcacacctgtaatcccaccacttagggaggccaaggtgggaggatcacttgatgcgaggagtttgaaacagcctgggcaacaaagtgggaccccatctctacaaagagtacaaaagttggccaggtgtggtggtgcacacctgtagtcccagctactcagagggctgaggtgggaggatctcttgagcctggaaggtcaaggccgcagtgagccgtgatcacaccaccatactccggcccgggggacagaacaagaccctgtctctgtataaataaataaacaaacaaacataggaaattgagtgggccaagaacctctgtgttcatacatgtatgtcggctggactgaaggcattggtgttatacccagaagaaatgccaaggttggaagtaccagctatatagggtgtgtcaaaagagtccaaaccttttcatattactaaagatgactgtggggtatgttagttaccttgacgttgggaaacttgaaatctgtcaaatgttaagaaaatgtcagaaaagaattcacagtttagtgttcacagtctcttcagaactctgtttccctggtccatgcctaacggatgactttataacaagatcactttaatatctgagaagcttaggaggaatcttagcttagaaggacctagctcacagtaactcatcttatattccatgataacaagaacccaaggtattgtgattgagttctcatatcaagtacaggataacagttttctatgatatgtaccaggcatctgagacagcagggctactatgggagctcacctttccctgtctctctctggtttaggtgtcttctcaagatgctgtttgttttcctgtaggaagacttcatcctctccactctcatcaagacgcacaggggaaaatgtccccgagctagtgccaggcctctctgaaggagctttccaggattcatcccaaacattctcagttaaactacttgaattacacaaaccagctgatgagatgagatggcgtggcactttggaagactctttgctgtcaggagaggctgttctttgcagtgatgtctcaaaatctataggatgctgggtctctctcttgtctcctcctgtccacagtatttccactccttgaaattccacatgtttgacccggcctgggcgtcccatggagctgcttcgatcacatccccctgggtgctctctcccaagagcagacctctgctctttcaagaaaccaacactgcctgcagagtggcaggtcactgctgagctcccgagggaggccaaaggacaagatggctcctgcacacagacagcccctttcctcccattattcattatctgggaaatctctgcctgagtgtctccagttaacagcgcggtgagatctttctggatgctcaaataaaaactttcctccgttgttacttcagctgaaagaggtatttctggtaaatttttttggccagcagggagcgttttgttgactctctgtgttttacgactggcagtgtccagctctttttccacctgctgaactgaaaaactagaaacagcatcttggtccagtacctttgtagcctgtaatgttccggaaatgattctggcttctgtggctttcagagctgaaatcaaagagtcaatgggctgtaaactttgttccttgagatgactttgagagggggcctctctgacatcttttggtccttctgtaacactgtcgagcccagagtggcagccagtaagaggctggacaccctgctgctcttgtgggtggcatggcagagcctcaccatcaaattccagagaagcccttaggccttctccaccttcctccatggtcccatattctggaaattcatttgtgacatttggtgggagtaaagtgcttcctccatgatcacctgtgaagagaacacaatggacatatgacttgttgtagaaagacagggcccagtaggtaataatgcatattcacacagattaggcactcaataatacttattaacttgattattgcattatatcagtcctcccaccaccctgtaacacacactcctcatgacactacagtgatcccttctactcagcctacgcgagtataaccacaaaactttcggcctagaaggcaatctaatgacacctgccatatttaactttgcttctgatgtcccatacatgaggattcagaacctcagttgcttcatatgcaaaaaggggttacaataaggatatgtaccaacttccaaataccactcatgaaacagcaactaaaatgtgtatattgggcttaacactaaagagccctatgatctagccaacagtatctgtgcagtgcaagctccgagacagagcctctgcaaaatgcttatgatctatttaaactcagtcaatatgttttttctgccagaagtctccccttcattgttgggtttctgtggagggaaaaaatgctttcaaaacatccctgaaaaataagaatgaagccaacatggaatgagaaacttagtgtgttgagaaagacttccaggaacccaactacggaaaattcatttttctcattttattcatttattttcccaattgacaaaagtttgtttatatatctagatatatgtttacatatataaagtttatatatatatagtatacaacataatgtttaatatatgcgtacctttgtagactagctaaatcaagctaattaacaacataccagtactgtacctcaaatttttggtgtgtagtgaaaacatttaaaatctacttactcttctagcaattttcaagtatacaatacattgttattaactatagtcaccatgttctacaacagacctcctgaatttattcctcctacctatctgcaattttgtatcctttgaccagcacctccccaatcccaccacccaccagtccctggtaaccatcattctagtttctgcttccaagagctcaacattttagattctacatattagtaagatcactacctgcataaaattgtaatggcatcttacgaagaaccccaatacacgaagtaaacagtattagtatatattcactatattgaaccaaatttataatattttcttgttaaaatgatagccagtgagaactgaaaatggggacattctgacaaaccaaaactttcaattgggggtttacagatagcagctgtagtcctatcagccctagtatccagtcttcttctgaacttagttttggttactttgtatcatgaaaaccctcatctatgctggaaatacagtgtactcacttttactttatgaaagaggacattagttgttaccatttttattttattttattttattttatttatttattgagatggagtctcactctgtttccaggctggagtgtagtggtacgatctcggttcactgcaacctctacctcccgggttcaagtgattcttctgccccagtctccagagtagctgggactacaggtgcgtgccaccatgcccagctaatttttgttttttgttttaagtagagacggggtttcatcatgttggccaggatggtctcgatgtcttgacctcgtgatccacctgcctcggcctcccaaaatgctgggattacagtcatgagccatcgcacctggccattgttaccatttttaaactactgcagagctacaaccttcctatttagtgaaatattttataaatgtctgtgtatatatatacactgaaatggctgaaaagacttgattctgcctgtaatcccagctacttgggaggctgaggcacgagaatcatttgaacctgggaggcagaggttgcagtgagccgagattgcaccattgtagtccagcctgggtgacagagcaagactccatctcaaaaaaaaaaaaaaaaaaaaaaatttgatttccaaggtaacttggaaacatcagttatcctaataactgataattattaattactgatacaattactaataataggtgtattgctattgaacacacggtatcccccagtgtgttaaatagcaatacctctgagagtacatgctgtttcatattccatgttgtaaaataatttgaaatatatacacttttttctcttttttaaagacaggatcttactctatcatccagactggagtgtgggagtgcgaacatagctcaccgcagcctcgaactcctcggctcaagtgatcctctcactccagcctctcgggtagctgggaccacaacaggcatgcaccatcatgtccagctaacgtttttactttttgtagagatggggtctcactgtgttgcccaggctggtttcaaactcctggcctcaaatgatcctctcgccttgaccttgggattacacacatgagccaccatgcctggcctgaaatatattcttaaaattaaatctgaatcaagtgttgatggaatctaacaagcacttctctgggatagtatttataacaccttctacaagacagaactaataaaatgtagcttgcttacatctgaagaggaagtgacttttcaaacaatgaattgaaaaagatgatagctaaaaacaataaagagccttcttcctagggtggaatattgatattttatgtctttcagtaaagaaggcagtaggtcttttcatggttccaccttttaagattcaggcatttttagtatattcacaaaactgtacaactatcaccactatctaattctagaactttttttttttttgagatggagtcttgctccgtcacccaggctggagtgcagtggcgcgatctcggctcactgcaagctccgcctcctggatacacgccattctcctgcctcagcctcccgaggagctgggatacaggtgcccatcaccatgcctggctaattttttgtatttttttagtagagacggggtttcacagtgttagccaggatggtctcgatctcctgaccttgtgatccgcccgcctaggcctcccaaagtgctgggattacaggcgtgagccatggcgcctggccattccagaacatttttatcactcccaaaaagaaaccctgtatccataagcagccaatccccatttcagcttttctcagcccctggtaactaccaatatactttctatctctatgaaatggtctatcctggacacttcatataaatgcaatcatacaatatatggcatttggggtctgacttctttcacctggcacaaggttgtcaggtgtactcatgtcatatcatctatcaaaacttcattccttttattttattattttttacatgtaaagagagacagggtctctctatggttcccaggctggtctcaaactcctgatctcaagcaaacctcccagttcagcctcccaagtagctggactacaggtatgcgccactgagcctggctgagaacttcattctttattattgccaaataatgtttcatcatacgggagcagtcttttctttggccattcatcagttgatgagatattggagttgtttcaacttgttggctgctatgaataaaaaatgtgtatataagtttcagggtctaaatacattttttcttttcttcctttttttgagacagggtctcactctgtcacccaggctggagtgcagtgggacgatcatggctcactgcagccctgacctcctgggctcaagccattctcccacctcagcctcctgagtagctgggactataggcacaggcatgcaccaccatgcccagctaatttttctttttttttcttttggcagagatggggttccaccatgttgcccaggctagtcttgaactcctgggctcaaaggatacgcctgcctcggcctcctaaagcgctggcattacagacatgaaccaccgcatctggcctaaatatatttgttattctcttctatatatacctaggagtgaaatttctggatcatatagtaaacctatgtctaatattttaagaaactgctgaacagttttccaaagcaaatgcactatttacattcctacaagcaatgtctaagattctattattgtctgtttattgttacagacatcctagaagtggtatctcactgtgattctcatttgcatttccctaatgactaattatgttgagcaccttgtcatgtgttttttggccatttgtgcatcttttttagagacatgcccatttgatggctgaattatttgtctttttattactgagttctaagagttctttatatattctggacataagttctttattagatgtacactttgcaaatgttttctaccattctgtgagtggtcatttttcacttaattgacagtgtcttctgaagcacaaacgtttttacttttgctgaaatccaaattatccgtttttcctttggtctcttgtgctttttgtatcatatgtagcaaatcattgtctaaaccaacgtcacaaagattacttttacgttgtcttctaagagttttgcagtatttgctattacatttagctctctcatccactttcaattcattttcgtacatgatgtgaagtagaaatccaacttcattattttgtatgtggatatccagttgtcccagagctatctgttgaaaagactattctttacccatcaaaaagccttggtgcccatgtcaaaaatcaaacatatacatatattaatatatatgcaaaggtttatttctggactctcaagtccattgagctagatgcctatcttttttttttttttttctttttgacaggatctcactctgtcgccctggctggagtacggtggtgcaatcacagttcactgcagtgttgacctcctggactcaagcgatcctcccacctcagacttccgagtagctggggctatacgcatgcaccaccatgcctggacaatttttcattttttttaagagacagggtctcactacattgcccaggctggtcttgaactcctaggctcaagtgatccctcccgcctcagccttccagtgtcaggattacaggcatgtagcaccacacctggctagatgcctatctttatgccagaataacactgtcttcactattgtagctttgcagtaagtgaaatctggaagtgtgagtctcctccaaccttgttcttcctttttcaggttgttttggtcactcttggccccttgaatttcccattacttttagaatcaactcgtcagaaagctgtgattttgataggggctgcaatgaatctatacagtactggcttcttaacagtattactattacatctttcgttccatgaccatgggctgtcttttcacttacttaatcttctttaatttcttttagccatttttttttataattttaaatgtacagattttcaatttattcccctaagattctatttcttttgatattgcttttcaaatttctttagatcattcagtagccatgcatagaaattcaatttgttgctgtatgtgaatcttatatcctacaaccttgcttaacttggagcatataataacatatttgtagattcctcaggattctacataccagatcatgtcatctgtggataaaagctttacttcttcctttacaatcccaatccatctttctaatcaagtctctgtcaaccccctttcacatgttataccattgcctctacactgaagtaggaggcagcccatgaataccctgaaaagatttgttctaatcctaatacacactggaaataagcttaagcatacatacattctgaatgcatagacatacacacgctcctttgcctttgttcaacttcctttctctacctgacatactttttcttctcatttcaacataaatcagattattttcacatttcaacacctaaaccaaatcccctgtccttaattaagccttcccttgctcaccaactcttgaaaaaagtcctctcctctgtataaataaatgtcaaaaagacttttgcggtatggtatatatagtgtaaatatacaaaacaaataagcataatgttactcacgccttaaagcttccaaaggcaataatgtttaacccatcatgaagtgttttaagaaaattgaccatagtgactgctgaagctgtatttataaactgcaccaaaacatataacagtgaaatccattcaacaaagggaagaaaagttaaacttagacacttgggagcccgctttgctttaacagtttcaactgccctctggaaaaaacaaacaaacaaacacacacacacaaacacacacacacacacacacacacacacacacacacgcacacacaactgaacactggccccaagagaagtgaccaaaagatatcaaggggcctcagagaattctgataattccttcaccccatttttaatagttttcattgaaatgtccctcagaaaggggcagcaaattcaacaattgtgggcaagtgcttgtgatgtctgatataacaacttggcaaccggtcaaagaaaacgaggtcagataagagggagacagggcaaggcaaagccctgcgtgacagattgcttgctttactattaaatactggagtagtttctcgtggtctgtgtttactgttctaagaactggaacagacggggggagacaaatgttctgagaggcgaaaggacctgaccaaggtcaataaaatgatgttcaataaagtattgttttagaactctaagtcaggactaaatttctagtcttctgtctctcaggagtaaaagcctgggagaaactcagggacactgaaccgtgagagatcatcattcatcattgctttttttttcttttctgagatagggtctcactctgacacccagctggggtgcagtggcaccatcatagctcactgcagctcagcctcctccggtgcttaagtgatcctccagcctcagcctctggagtagctggaaccacaggcatgtgccatctcacccggctaatttttttatttttatttttttgtagagacggggtttccctatgttgcccagactggtctcgaactcctgggctcaagtgatcctcccacccttggcctcccaaagtgctgggattacggcgtgaactaacgcatttagccaagaccatcattgctaagagcagtaatgttaacaaatataatgaagaataaaaccagaagtgttctagttgtagcttctgggtagaaacagccttaattatcatgtccctaaggattcagcataacagcaagaatttcctttcaaataaggcaccctctgccacaccccatgagcagtttatttttgctgtttgcattggttatcacaacttgactgtgttgttaatcctgaccttttatttagaatttctgatttattccttctgtttaaaaattgggactatatgctaagataattatttttttaaaaaaagaccaaattattgttttaagattttttaagctgctcccttgtaaaatagggccttagatacttcctattaaatgcccattgtttccaaaattcattcacgcattcagcaaatattgattacctgctatgtactaaacacaggggattcaaaactgagtatttccagaacatgaaaagtctgtttggcatgttagaaagctcgccttggtggaatgtgaaggatgtgtagcagagagggcacaagcatagactcaggaataaccacgcaggcttctgacaatagtacaggtgagagacggtgagtgctagagccagaacaaaggcagaatagacaggaacaaagatgcaaggggtgctgcatctcccacgacactctacttggaccggcatccatgcccatcatctcctcatctcctctgccccaggcccctctagtttcaacatggcttcttccaactgctgtgagctcttacaccaaacttgaaacttgttaacactttccctttcagtctacatctattactaatgtaagaatccactgaaaacatttcccctccagcgagccttcctgaattagtcctacctgaatttggtcttgtatgtgtgacaaagggactcagggacttgttaaatataaaaaaagaactttagcacttacctaaatataaaccacacactagtagaatgtgaattaataaagagttcatactttactgcgtgtatttttccccttaaagaaatgaaaatgtagtgtagagtgtggaggagggaagagagaagagttttcacattcatgtgaaatacaggtactttttggaggtatctatttacagtccattagaagtcatacttttctatcagagactttatctgcggctttgtgtatctggttagattcctaacaaatcgtgtttcctgttgtttagcaaagatgcttttcctgcaatgacatataaacccactgattttttaaagaccttttttcttttgatttagtatattgagaaagaaatgagatacatttgaatgttaagatgaattttaggagtgctttgggttatatattaagtagtcatctgtttctggaacacagggacagagctgtaataaaatgaaatgaaatagaaagaaatttcttcaaattgtgagaaaataagcctgttccataagatcggctgcagaaaaaccagggtctttctaagaattatcctgtttgaggagcagtaaatcaaactggttttcttccactctggctagcaaactcctgaaaagacaatagttcaagaaaaacaaaatataagaactatttgccacatctaccgtagactcggtcactgtaagctgaaatttgaaccagataaaaccgttttcatgcgggattctcagcaacaggacatacgtttccccagactatatggcagtcacatctatgcctaggttcctcaggagagccacagttacggattctacacacatatattttctagaacctgggatcagtcatgccattttttagtaaaaggtttttgttttgtcttgtattgttttgttgccacaaaaatataaactctaaaaggcaagaactttatttgctttctttacaattatatctccagagcctataacaattttacctagcaaaatgggtatttttgttgaagcaatcaattatgaatgtcccagaaccaataggataccaattaatagaaggtgaaagccagatgaggtggctcacgcctgtaatcccaaccctttgggagcttgaggcaggaggttcacttgagctcaggagttcaagaccatcctgggcaaacagggagacccctcctctacaaaaaatttaaaaacttagccaggtgtggtggtgtgtgcctgtgctcccagctacttgggaggctgaggtgagaggactgcttgagcctgggaggttgaggctgcagtgaactgtgattgtgccactgccctctagccgggacaacacagcaagattctgtctcaacaaacaaacaaacaaacaaacaaaaaaccttaagacagaagcaaaaaagcagcctccttaaacataagcaaaacactatatgttagtgtcacccaagtcctacccgttgcttctaagtccaggcttgaaaaggattcaggaaacagtagggcgcttcctgatattagagccagttcattctctcatttactcagccaacatttcttgtggaccatgaatgcatcaagcagcagagaaaagggcaacaaacaagagcaacttggcctctgtcatcaaggagcttacaatccagcagctccatctatatatactgtctgctcgcaaacaaagttcaggcagtggtaaatttcagtggagataatctcagcctattctagaattcagcatgatcctacatgagctgataccattaagtataaatttctcaatggatttctctctaacactgtgttgtccaatttggtagccatatccacagaagcctatttacatttacatttaagttacttaaaatttaataaaattgaaattgtagttccttagtgctccataccatatatagctaatacctaccatactccactatacagatatatggatatatatatacatatatatagcttatgtagatatatatacacacacacacacacacgcacgcacacacacacagatatccatatatctgtatagtggagtatgtatgtctgtatagatacctgtatatttctgtatctgtctatacacagagaacatttccgtcatcacagaaagctctatttgaaagtgctgccctagagcctttctactcagtgtggtcttgagaaagcagcatagatatcaccaaggaggcttgttagaaattcagactctcaggcaccacctcagacattcccaatcagaatcctgttggtttctaacgagaatcccagaggatttgtatacacgttacaggatgagaaacacacctccagaaaactacaacaatatctacaagtcattctgattacatttaatgcctacttttttattttaaaagagatcataactgcctgcctcctaactcagaggtccaactgttcaatcaaatagacatcaactaaagtaagttccaagaaaacaatctcattactgcaaagagaaacacttgatcattctggtctgggtttaccctcaaattaccaagtaaccccggtccctttccaagagaggaagagaattgcctctgctgtaatatgaccccttcttgattttacagctcatagtaaatttctctcacaatgaatggccaatgactctctacttacacaaaaagatcctaaaataactgcaaatgtaaacttgaccattagtcaaaacctgtatattattatttgtacacagccttaaaaaaattactttggagcttaaagaaatgggctcagggaagggtaaggactttccaatttttaaaaaccagaatattttcccaaggtttttaatgttcatatctttggatgcgttgcttttaaaatagaaatgtacggggaaattcagtctgataagatactatggagaatgcactaagggtcttataatctatttcctatgactatagttcatcggattttcaatcctttataaattatggctaacccagccactaataatctgttttccctcctttctacatgtgatattcataaatgcaataacatctttggtgttctctgttccctaatgaataccagttagtaaacaccttaaaacatattaatattatgttagtacaagaaaactataaattagtaagctattttaacacttgaaaatttatagaagcaagcttaaaatcacattcccctcacttgtcagaaaggaattcagttccaaagacgagggcaggaaaaagagtgaccactctgatcccttagtgtgaaatttcataaatctgtaagattggaagataaatgcttaatttacaaaacaaatataaagagcaagccttgcagagttaaaaaaaaaatctcaaatgcatttcatttataagtaactataatccttaactgtaataattatcaacatttttacgtttaataatcaataaacttcaccagcaacacagtgatacatgactcaaatttgcaatgcaatagtaaaatttgtattaaaataaaacaagaggataatctaacccattttgcccagcaatagaaaataaatttggtatgataaaaataacggaaaaatgaatatgagtaatgagaattactaaatgagtaatctaaatacattatattttaagacactctcttcaccctaagaaaagtcacattttgaagaaaactacggtatgtaatccaggatgctggctattgcctggacactgataatgctaaaggcacagatatttaagttgtttatgtgttaggaaaaaaataaaaaaaaacaggaaaagacctgccaaccactacacaagcttctaacgtgtgcacacgaacagaaaatattccattaattggacactctttccccaagtgattaatagttacagctgtgcttacggcaaactaaatttcacatactaatgattcagaacccaatttttcttattcagctctaatccctagagaaatgatactagtttaccattcagtcaatttcagaggcagctctgtgagctaaggagtggcaccgcatacagcataccaaagggaagcttgagtgagacagggaacagcccattaattttaaaccgtagtctctgcaactgtgcagagcactgttacctgttacagagaagaaacactaagctgtaagagctgaatttgagctcatctttaaaattgccgtttttcaaagctggtttcctttttcaaccagtggggttctccactcttgtctgcctctctttgtcataacttctggttttttatatccacatcttgtgcttctcctttcagccttttaccttctgatcagggatgcccctctgatttcatccattctgtccactttctacgatcctttctgttggggaatccatacttttaaaaatccaattgtaaaatttctctctttactgactctttagttttaattttatttttaaaagacaaaaaaaagtttaaactaaacttttaaataaccccacagtctcgctcacagcaagctttcttctgctaaaattaacacatatatggtaagattaatataaactgtttcgtatatatgtaggaaatattgggacatttaagaatttgatgtttcaaaaaaccatacaattcttttaaaaaataatcatgaatgccaagcagctggagttcttcacagtgatgatcaactacagctgtggacttctttaaacttctgtctatgaagacagatgttaggtgcagtggtaaacacgccacctcactcagcctccagtgtgtagcagactcaggactcagctgatccacatttgcagccagtagttttcatgctcaataagagacccacagtttcactaaggattcaggctacaatctgacataaacaattgtcccaagtatatctagaaatgcaaattttgcagagagttgaaagtcagtttccatggtgagagagaaataaatcttgaattactataaaagcgacacttttaacaaacaggaaaaacacatccttgtgtgtaaactgagatacctgttacaaacttccagtaaagattctatctcagcctcaactagcgtgtttccagaacatttttggtgctacctttgagctaaccttgttcccttcaaggctattcagatactaagctgtacttcaggcacacagatggaaagcagtttgagctctttaagagaaactcctcccctattcccatccagcactacaacattatgtctttctaaaactggaggggtagcctgttttctctctttctgtctatataatatatcacaaacagggagcagacatagggtgacagaattgtgtgttcccaggaaagcttgtggggaaaaaaaaaagaaaagaagtaagattacaggtaagaataatattttgctttctatataaaaataaaaattttgaaaaactcaatgtcacatgctgaaatcaacattccaggtaaagccaggtgaggtgctgggcataggcattcagagggcagccggcatctctctgatgactgggaattaaagaatggttggcgcgggcatccccgaataaatgcaaaatgctctcctctatgtctggattcagcagaacctggtctagccccaggggtctcctactgggacgctcgaaagacaagactagtaagcaaaagcagtcaataatacagacggatactttcacagcagcatttaaaagaaatagatatataaaaatatatttgcctgcatagacctacaaatagaggttactcacagagattactgtagctccagcagttacccattgatcatagaaaatgcccagttcatcagtttaacgcttgagaaaagttagcttaaaaagaagcaagctaattcaaaatatgctgttctagtcaactggaagcaaattagtttcagatttcctggcagccccttttgccctgcactgcacacggtgatggaaatggaagcactttgagcacttggaacccgagccgagaggagctgctgcctcagtccctctcacaaaggcggaagcagcctgttctcccgtttgctctccctgtctgcctctgccgctctctaccttggtagcttaccgaaaacagccaccgtagggcgtttttatatttgtgaaaactacttccaaggagataattgagatgacgggagttagctttaatgtaaccatgtcccccagtgcagcagcaggaagcccagcaaaggcttggagaggattgtaccatcctgggtgacatcagaggtggggctgtcatcttagtattatgcagcattttctctgatgcaagaatgacacatgggaaagagatgggtaggttctctttaaaagggtttaattcttgtattattttaacggacaagggaaatgcaaacacattgtttaaaagctgccacagaatgacacaaatcctgctttgccagtccttatctcactgcttagtgatgctaccatttaaagtcattttagtgacgattgtatcttgttcctgtgattaaattaatatttaatgggtgattgctgttacttggaaatgtgacatgagaagactcaaaaccagtaacatccatttttaaatatgaagccataaacttttatatcacttacagtaccttgtatgtatacaatgtctttcaacacagtctcagtataaaagcaccaaatgtaaaaactaataggtttatacatgagaaaagtgaagtgaggtggaaagtagcagaagatgagtaagatattgtaatattattgatacttaatagtgataatggctattaatacaaatattaaaaataacatgaagattccaatcttctgtaaccctaatatttccaaccagtatgaggatgcatgggctgacaatacaaaccacttcacagttgcttttattcattccatatacatttactgagtgccaaacagggtgctgaaaaatgtgttcagtttaatttggagaacgtttctgataagtaataatataagcaggatagaaagtatttacttatgtgccaggcactatactaagcagttttattgtattaattcatctatttctaccagcagccctgtgggatggctactatgattaacccattttatagatgaaactactaaaactcaagagaggtgtgtgacttgtccaagatcacacggctaacgctggcacaaccacgattcaaacacaggcaatgtgcctctaaagtccaccctccctacccctaagctaaagtgcctccagggggattccttgccaagtaaaagaagtctaaagaaagaatataattttcaggattcagaaccatcgcaagccaaaaatatccacctctcaagaagcctggcccaaatataagaggatatagatgagagtgtgcacctagagacagcaccagggtagtggaaatacacccagaaacagaagctcagtgccgactaccggcatgaccttgggccaatgccttaaaactttccagctttagcttccttatctctgagctagagatgtttaaattacagatcagtataaccacgtggttaaagcaaacaatctcggctattaatctggattccgtcactttccaattatgttaccttgagcaagttatttaacctctgtgagcctcaatttccatctgaaaaaaaaaaacgggaataataatggggttttctgaggactaaatgaactgtacatagaaatacataaagcactcagagtagcaaccagtatagaataaaagctcaaggttttattactgatactataatcactatgacttttagtagaattacattttttataaaactacccacttcttcccttttcaaaatcctctcaaagaagagctattttttgagttggtttcaacagcagaaaggacaacctttgctggcttcatacaagcactaaccagtccgtgaatcaccaattccctatgagatgtaagctggatttgttgggcaagccttctaagaccgctccttccaaggggaggaaagagtggtaagcgcccttttgttctccctcttccttatgcctggaattcagaagatggagctggaagtgaagcagccctgaggaattgtgagcatcccataagctagcggggcaaagctgaaagcaccccttacccaccacagacctcccacccccacccaccatcttcacatgggggagaaatttacacgggtcaggttactgaattcaagttttccaaatgtctatagcatatcgcattaggctttagttaacacttactttgactaaccccctaaaacaccatttcaaaacgtaaagctcagaaataaattacttacatgttctctagtcttttacagcaccatctcttaaaaacatgcacaaaaacagcacctgcttagcagtgccatcttcaactcctcaattgttttgttttgtttgtattgattatattctcttattatctgtgttcttgatactcccgtatttggggccttgactgtggagagactgttcctccctgggctggctaattcctagagacagaaaacacccctgtgcgagcgtgcctgtgatatacaaaccaaccaatccagagccacagcaggtaatattcccccatcctaaatcacccaggcccaggtcctggacaactgggggccatccctatagcccaaagcctgccaaaattattcaaactagccaatcttaaacttacccagcttggctaccctgtcttgcccgttcccttctgaaaaaacaaacaaacaaacaaacaataaaggctctgggccatgctcccccatctcccatctccggctcccatcccaacctggtgtttccctgtgatcccgtgcaatgtactgagcctcctgtgtctaaggatctgtaagcataaacctctttcataacagtcatttccatgtctggatgtctccccatacctgaatttttaaaaaccccatgtacaaattttagaacaaaattttgggaggaacaaatgattactcactaattatcaggaacaaaatttcaaatgcacaatgtatttccagactcgaaagtcactagtgctttccaaagtttagtttggaaatgacaaactataggtaataaatttttatttgatataatgtgttatttctaaaaaatttcaaataaagtaatataaacaggcaagcaagctattattgcccaacctgatataagatttttagaaatacaactttttcacaaatcaagactgactgcatgatatcgagttttattatcataacatcctctgttttattgttacctttttttaaagcacgggatccacgtaggagacaataagattactggaggaactggtaacaataattccttatgtaaagtaacttttccttcattgaacaagttccagtaaacaagaaatcagttttcctagctcaatttaatactttttcagtctggttcttagatcttgaaaaaaaaattcaatgccaatttaaggcttataaaaattgagtttttgtattttagtctgttgtctccattaccaggtacatctaaatgttcaagcttaatctagagagaaaatcagaattccaagaagatattatgtgaaataaatccaagtgagccgagaggagagaggtgaaaagccaaaacctgtcaataatgatagtcacgccagagctctgtactctaatacgctgttttgaaaagaaaacaaaacctcaaaagtgaaatttaacttataaagggtatacatacgaccctcccggtaagctcgttgggaaacatacagtataaaaggtttgtatgctggaaacattacatgtaataaagaggtaattacaagtcacctgcaaacctctataattgtcctagagctacttcacagatgaacaaagtagctaagctcattgtcttgagttactgagtgtgatccctctcagcacagaagtgatgtgtgttccctgtgctgcaaactgcactgggggtaagggtgggggagggggaacaaagagaaaaggggtcgagtggcagaaagtcacaatgaacattttgagattcctgtcttccagggaccaagcaagatgcttttcacctctcaggcctcccctgtcactttctaagaaactctctaccagtttctgtgtcctaacccagcctgtgatagaaaggaaagatcaaaaaagagcaggaagcagatctcacagcaggtctctgtcagtccctgttaacccagagcttactatggataatgcttgctacatcacacacacccaattaattgtttcatttaatccttaaaaacctccctaccaggtagatatcaggtatacctaaatataaggcaactctaagtaactgttaggtactctataaattccaatggggcaaaaagttattggccatattgaatatttaaatttttaggatggatgaaataatcaaatggctccttataatattttattatgttaatttgcatatataaaatcacataatacattaaaacaataaataaatgcgttttcgttcgcttccacttcaggaaatgattttgttcaagattttcatgtgtaatttgtcataaggatctttgctacgactacagtctccttatcttgcatcttcagttctaagttatttgagatacagcaattttttaaatgtgtgatggaagttctatcctaacctacagtatccattcactagcagtgatctgaacatcacttactgcatgtatgacctagaaaagtcatctttaagaagctggtttatccaacatccaacacctgcacctccgagagcacttccccagaaagaattactaaatgtgtgttcaacttgttttctccctctttttaccctgttttagtgatctccataagcattccaaactgacattatctatagttatttcaagctcatatgttttctccaaagaattctttgttaatcaaaataatcaaaagaggatccctaatacagaacactttaagaacttaatgtaagaccactccctctcttctggtatctttttgagaaaaacatcctcaccctaactttgggatatattgagtattcattcctttttacaaaagaagaatatagagaaagtttaggcaacctgaagcatatagaggaagttaacccaacacacagttaaaagaataagaagcaaccctcagaccaaagtttacaaaaggggcatttagttggcagcccacatgtgaacataaagaagagccgaagagaacaaagtcactcttttacattatttgcactttttttctagcacagttggagaattttaatctttctttccctattgtttgctgtcacttacttacaatcacacacacacacacacaaactttattttctattaatataaaccatataaacttttttttttttttgagacagagtctcgctctgttgcccaggctggagtgcagtggtgctatcttggctcaatgcaagctctgcctcctgggttcatgccattctcctgcctcagcctcccgagtagctgggactacaggcgcccgccaccacacccagctaattttttgtatttttagtaaagacggagtttcaccatgttagccaggatggtctcgatctcctgacctcatgatctgcctgcctcagcctcccaaagtgctgggattacaggcgtgagccaccgcacctggccataaacatttttaatgaacacacgatgtatcatcagtaatacaatttagtcattgttgagtagtctgggtatttccagttatttccaatattatcctaattttcttttttttttttttttgagacagggcctcactctgtcatccaggctggagtgccgtggcgtcatcttggctcactgcaatctctgcctctcaggttcaagcgattctcacacctcagcctcccaagtagctgggattacaggcatataccaccacgtatggctaacttttgtatttttagtagagacgagttttcaccatgttggccaggctggtctcaaacttccggcctcaaataatccatccacttcagcctcccacagtgctgggattacagatgtgagcaaccgtgcccagcccctaagtaaattcttatactgacaactggataatatgattcagaatgtaatcaaaatattagtgcaactgatgcaaatgaaataaatgtccaagaagtcagtgatatgtatctgttttgtgcactattgtatccccatgtcactgagaaccccagaaagtaccagcatcaaattgcaaggtcaagatggcataaaacacggttgcatgtactgggcaagaagcactttgatggtgagctgagaaactgctttcgccatgtactgagcctgggatggaatcagaatcacagggtgcggggtcagcatgggagcaggaagcaaacagagggatgggcttaaggggctgacctgagggggtttatataatatacctccaaagaaaaagcaagagcaagttctgggagtaactgaatctccctaaaagtagaaaagtcactaagcatccaaatggcatctaagtgggcaacaggaaccagccagaagggctcgataaactgtacttatcgagttgatttccagctagcctttggttaaattaggtttgtaactctaagccgtttctttttatttattttttctttctttcagtataagattttcttcaaacagtctagtttcgtctcaagtatcaagtaaagtgaaatgtatcattccacctctctgtagggatgaatgagggtatcggtgggctagagggcagggaagcaggatcggaactccaggcccaggcccaggagcagagcacatccatgtgctagagggcagggaagcaggatcagaactccaggcccaggcccaggagcagagcacagtctggccaactaaaggaaaggcagggtaaaggatttcttttagaatccctctctctcactggctcacaggcaacatgctctcccagctgcggttctgccacggctgccattctgctccatttccttggcctgttgtacttctcccactcccctttagtgataggtgaaggcccagggattagtttttcacccgctgttcttcttatttcacattctctgcctttcaaaatgcaagagcttggaagcaatatctatcatccaatcaacacaccggtgcggtggcaaatgtaccctaagtcagtcaatatatataaattgcttaaaacagtgcccagcacataggaaatattcagtaagaattagctgttattactaccagtgctgggaaccagcctttgctacattaccatgtgatttgggccagtaattctgcctttcttttccagccttttgtactcactacaaagtacatttgtactcccaggcttttgtacaattaattttgaacctaattcaaacaatcactgtaggcaaacaagatgcttacttcacgggtttttgtaagattaaaatgacagaagtcacatgaagcggcacatgaaaacctcaaaatgactaaatataaggctctacatcaataattccatagctctatgatgataatttcaggtgtccagacctgacatctcccctaggcttcaggctacctcacagttccgttgtgtgagaaggaatcaccaaatagaaactattacacaggaaaagcaaaagatgtcagtaatttagtccattcagaagcaactatgtcaatcagccagaacagacatctgaggcaggagtctaaacttgaactgggtaacagaacaaggagagatgaaagcaagataactgtagatgagattgtattcttttaaccccaagaataaagaaaggcaaatacaaaagaaatcttaccaagcagaattaaccatctcaaagctacattcgcatctgtcttgacaatcggaactcccaccctatgataataacgtaatgagaaaaaaatacaaagtaaaccataaccaggagaagctcacacatggtctagttagctcactttgcgggaaggtctgaggagacatccggaagggacaagtatctcatgttttgaatgaaagggaaggatctgagttttgtatgaagtgttaaagctctcaagagagattttgggtactctgtcctgtgcatctctcacagacagtggtcaagtcattgccagtgacaggccatgctgttacatatctacattatctcagaaggccaccccaccctttgaaagacaccaacggaaaacaggaatcctgcactgaggacagagtctcactttcctgagatcctgtatgtgctcttggcaatcaaggaagcctgctctctgaactgtgtgccccctgcacctatcatcccctggaaagttgggcatatccagagaagcagaatacagcaaagagtcaacaattcccaactgtctggcagatgccccatgtcacacatttaacatgtcaaaaccaaagtgattgccttccctgaaaaactagctcatggtggagaattcctatttcagatgcatcattaacatctcctgtcactttactgccaaacttcagagtcatcatatctccccctatctacagtcaccaagactatcatgactttctgaaagtctcatgcatttacgcatttatattcctatcagcatctcttgtctacagtgcatacaattcgttttggaattaaatgccaaccctaacaagtctccctcctcaacactggttcatatcttccaatccactctaagcaagtttgctagattaattttcctatagcacttttccttttttaatttctgacaaaagcacaaaagaaacctgtgtgttgggggtttttattattactctcagtttacagatagtaactgcacatatttataagatacagtgtatttccacacacatatatgatgtgatatgatcaaagaacagtaattagcatatctaacaccttaaacatttatcatttctttgtgttgaaaacattaaaagtccactctttcggctatttgaaaatatacaataaatgtttgtaaattatactcacccagtcctgctatagaatactagaacttattcatcctagctagctgtacctttgtatcctgtatccgttaactaacctttggctatacctactccccttcccctccacacttccctgcctctagtaaccactattctactctacttctatgagatcaacttttttagcttccacatatgggtgagaacatgcggtatttatctttttatgcctggcttattttacttaacataatgtccccaagctaactcatccatgttgccatgaataacagaatttcattctttgttactgcaaaagagtattctattgtgtgtatataccacattttctttatgctttcatctgctgatggacacataggtagattccccttcttggttattgtgaatagtattgcaataaacatgggagtgcagatagatcttcaacatactgatttccttttttctggatatataccaagtggtaggattgctgcataatatgagagctctatttttagtttttgagcaacttccatactgtttttccttagtggctatacttttattttatttttgagacagggtctcgctctgtcgttcaggctgcagtgcactggtgcaatcttggcttgctgcagccttgaccccctgggatcaagtgattctcccacctcagcctcccaagtagcagggactacaggcacacaccaccacctcagctaatttttgtattttttgtagagatgaggtttcaccagattgcccaggctggtcttgaactcctgagctcaagccatctgcccacctcggcctcccaaagtgttggaattacaggcgtgcaccaccatgcctggcctccttaatgggtttactaatttacattcccacctacaatgtgtaagagtttcccttttctcttaatcccactagcatttttttatgttttgtctttttttgttttgttttgttttgagacagagttttgctcttgttgcccaggctggagtgcaatggcatgatctcggctcaccacaacctccgcctcccaggttcaagcaattctcctacctcagcctcccgagtagctgggattacaggcatgcaccaccatgctcggctaattttgtatttttagtagagacagggtttctccatgttgaggctggtctcgaactcctgacctcaggtgatccgcccacctgagcctcccaaagtgctgggattacaggcgtgagccaccgtgcccggcctatgttttgtctttttgataacagccattctagctaggttgatataatatctcattatggttttgatttgcatttccctgatgttcagtattttttcatatacctgttggccatctatatgtcttcttttgagacgtgatgtgtctgcttattgaagagactgtccttttcccagtgaatgttcttggtgcctttgttgaaaatgagtcggctataaagatgagatttatttttctgggttctatattctgttccattggtctgtgtatctgtttttatgacagtactatgctatttggttactatggttttgcagtatattttggagtccggtagtgtgatgtctcaagctttgttcttcttgctttggctatccagggtattgtgtggttctaggcaaattttaggactgttttttctatttctgtgatgaatgacactggtactttgatagggaatgcactgaatgagtatactgctttttgtagtatggccatttttaccatattaattctcccaattcatgaaaatgcaatgtgtttttatttttgcatatgcctgctgcaatttcttacatcagtgttttatagttttccttgcagagacatttcatttccttggttaaatttttccctaggtattttactttttgtagctactgtacctgcaattgctttcttactttctttttctgctatttgaatgttggtatatagaaacaccactgatttttctaagttgattttgtatcctgcaactttactgaattagacggtcagttcagaggtttttattttttgaagctttcatagttttatttatataagatcatttatctggctaaaacttctagtactcctgaaaaaaaatggagaaagtggtcattcttgtcttgttccagagctagaggaaaagtttgcagctttccccagttcagtataatgttggctatggttttctcatatacggctttgactgtgtcgaggtatgttccttcttacctaacttgctgagagtttgattaaagtgcagtttaaatccaatgttgctttgtttgttttctgtatagatgatctatctgatgcttagaggggtgtttaagtgcccaactattactgtcctgtttaagtgcaatttaaatctaataatatttgctttgattacctgggtgctccagtattaggtacatatacgtttataagtgttatatctgcttgctgaattgatcctgttatcactgtataatgaccttctttgtctctttttacatgagtttacttaaagtctgttttatctgatataggaatgactacatttgcttgcttttgggttctgtttgcatggaatgtctttttccatactttcacattcagtctacagttgacctttgaataagatgggatttaggggcactgagcaccaccaccatgcagttgaaaatccacataacttttgactctccaaaaacttagctactaacatattagcctactattgactagaagtcttactgataatataaatagggaatggacacatattttgcatgttgtatgtattatatactttatttttataataaactagagaaaagaaaatgttactaagaaaatgatgaagaagagaaaatatatttactattcattaagtggaaatgaatcatcataaaggtcttcatcctcaatttctcattgaataagctgaagaggaggagaaaggagttgtcctcatctcaaggatgggagaggcagaaaaggtagaggaagaagaacaggaagcaagagaggcaggcacattcagtgtaaatgtacagacataatcatagtttctgtctttttaactttttcatttctccaaaaatgtttcttctatacagtaccaatccttcttccactgtttgctttagtttcagtgcccatatgatagaagggtcaacatcataaaagaagtcaaaaacagtctggaatcatgggaaccattctgccagattatctcatgtcaatttgttttctagaactgcttcttccacgtctttttcctcatcatctggcactaattttgaagcactcatctccagcaattcatcttctgttaacttctctggtgtgatacctatttgctcttgaatttctctgatatctacatcttgaaatccttcctcaccacccctcataccttttttcccatatctacaatatcttgtcatgattttcttgattggctcaaatgtaaatcctgtgaagtcctgcacaacatctggataaagttttctccagcaagaacttattgtttcagatttcaaggctttcacagcttttcctttaacaatggaatcttcaacgatgcaatcttccagactttcatgatgttctgtcagggttctcttccatagcactaacaattctttccataaaacactgtgtgtagtgagccttaatggtccttatgaccccctgatgtagaagctgaattagagatactgtgtttgggggcaagcagatgacttcgatgtcttcactgttgaactcatagagttctgggtggctaagggtattgtcctatatcaaaagaactttaaaaggcagtcccttactggcaaggtacttcctgaacttagggacaaagcactgatggaaccaatccagcagaagagttcttgttgttcaggtcttcttgttatataacccaaagattggtatctgtgtttatcttttctattcaaggctcaggggttagaaatttatagacaagggcattcctcatcataaatccaactgtatttgcataaaacaatacagttggcctatcccttcctgccttaaatcctcgtactcacttcccttccttactaataaatgtcctttgtggaactgttttccagaaagggggcactttttttctacaagaaaaaaaagaaagaaacctgccaggcagatatccattcttctcaatgattttcttaatggtgtctgggaacttgtctactgcttcttggctgtctgctgcttctcctgttatcttgacattttttaaggcaaatctctttctaaaattatcgaaccatcttttgctggcattacattctccaagtttagatctaacaccttccttttgctttaagttgtcatacactaacctcattttttcttaaatcattgtagagtctataggcatgattttcttataggtatcctgcatccacataacagctacattttcaatataaaaaagttcaaggttttgtgcctactgagggagctgcagtgacaacaaatttccttttcttttcttacaacggtacttacactgctggattcttttatcttgaaatggcaggtgaccacagctgcagacctcaatccatttggtacatatcaagcaattcacccttcttataacatcatgaattttccctgcttcttgggagcacttccagcatcactagtggtactttgtatgggttccacggtgttattaaggtttatagtagtgaactaaacatgatgaaaaatacacaaaaaccatgagagacaactctttttttttttttttttttttttgggagacagggtcttgctctgtcactcaagctggaatgcagtgacacaatcatagctcaaactcctgggctcaagacatcctgacacctcagcctcccaagtagctgagactacaggtgtgcaccaacatggagatcactttttaatacaacacataatttactggacagatgaatggttcacatggagctgttagcatcacacagtgttttaagcagatacaacactcaagctcattgcaatagcaacaacaggtggcttcaacattattatatagtacagtatgtactacagttaattgtatgcagttatgatttaatactgcatctttatgtttctttacatttctcgggactgcaaatggcaccatgtacagtctggtgtatataagttttgataaactttaactttttaaagtagatgtgtttctatttcatggtaataaatgattaaactagtatctacatatattttatgaattcatgtcacaactcttgttcatttttccagtatttctagtctacatggtttgtctgcaagttttctcaaattgttgcaaatctcccaaaaaattaaacaacatatttattgtttaaaatatttgaatataagtggacctgtgcaggtcaaaacctgtgttgttaatagtcaacaggtaaagtgagtttcttgtaggcagcatagagctgggtcatgttttttcatccatttagccagtctatatcttttaagtggagaatttaatccattgacattcaagggtattattgataggcgagaacacactcttgttattttgttaatttgtttttgaagttgtttgtatatcctttgttcctttcttcctcctttcgttcctttcttcctctttttctatcattgcagtttggtggttttctgtagcctaagtcttgattctttcctctttctcctttgtgtatctgctccaccagtgagttttataattttgcctgttttcatgatagtgattttcatcttttcacttccagatgcaggactcccttgagcactttttgtaaggttggcctagtggtaatgaattctctcagtttttgtttgtctgggaaatactttatttctccctcatctctaaaggatagctttgctgggcatagtattcctggctggcagtatttctctttcagctctttgactatgtatcagcccattctctcctagcctgtaaggtttctgcagagaaatgtgctattagtctaatggagagtcccttagatgtgatttgactctcctctttttctgtttttagaatttcctctttgtccttgacttgtgtcaatttgacataaatgtgcctcaggcaaaaaagaaaaaagaaaaaaaaagacctttttgggtggaatttatttggagacttttgagattcctggctctagatgtccatatctctccccaaacttgggaagttttcagttattatttcattaaatatgctttctatgcttttttctttctgttttccttctgcaaatcccataacacaaatatttatttacttaatggtgtcccacaagtcttataggctttcttcacttcagagattcttacgcttgatcaagtcttctattgaaggtctctgctgtatttttttatttcactgattgaattcttcaaatacaggatttttatttaattcttttttataatttctctctctttgctgaatttctcattcacatggtgaattgttttcctgacttcattaaattgtctctcttttctgtttttcactgagttaccataaaattattactttgaattcatattccaccaagtcattgaattctttttcactgaggtctgttattacagagttattatgtttctttagtggtgtcatatttccttgccttttcatgtcttgtctccctgtgttgatgtctgtgtggcagatatctgtgtgttgatgtctggtggaacggtagcctcttccaaacttactagactggcttttgtacagaaagactttgaccttcagtagggttttactgtgctggttggaaagaatgtggtaactgtttccagacaggtgcagtagtagagtctctgtgcagactcttcatctgcattcaatgtcagcaataactgtgggtgcctcagtggcgtatgttgtagatgttcgtggcagtggtgacagtggcataggctgctaatgtcttcagtcctcctattctcattttccacacaatggggagacttagatgaggggatttctctaggtgtcaggtctgacatggcctacaagtggctgtaacagcactgagttgcttggagtggctgtggggccagggtcctaggctcagaatcttgtgaacctcctgtggcacctgcatcttggagtgcgaacttgctgtctgtgaaaggattggatgtaagttgcccccggaaccaggatctgtgactcagagctactccctagcagctcaggctcagggggccaggttgtagctgtgattttacttttagggtatacagtgaagcactcacccaactccaggaaagtgatactctgaaggtttaggctcaaggtgcaaggtatgactgcgatttgggaacttgacccgaacggcaactcgggtcccagggaatgagtcaccttgtggtagtgactctagaccctgggttggcagtgatcgtcagcatctgagcctctgtgaggccaggtgcagtggcagcaagtacctgggaatggcaaagaatagctgttttttgcagcatggtggggtgaagagtgtggggtcaggaaatagcacattgatgattccattcctcaagaacagatgtgtcccaacagctcagactctagggcctagaccagctccacggaagcaggatacaagagctgtttggtctataggccagtgtgtctcagctaagccactgttctacttccctgttatatggggtgctatgtcagttcagcccagggatgtgtagctacttagctcagccagggcactgataccccagggaccaatgtgctccttcagctcaggcctgggggccttgactgttctggatggcccaggcacagtttccctaggatgcaggctgctgcttcagcttaggtactaggatataggacctttctggggggccaaggcaccgttttggggacatgtggcaccctccaacttaggctgagggaaggtgtgacttctccgagtagccaaagtactgtttccccaggagaaagggcaccacttcagctcagcccaagaaggcggggagaggggtaggtgatgtggctctacttctgcctggggaagtgtatgattctgttttgcagtgctataaaggaacacccgaaactgagtaatttataaagaaaagaggtttagttggctcacagttctgcaggctgtacaggaagcatagtgccagcatttgcttctggtcaggacctcaggaagcttttactcatggtacatggcaaagggatagcaggcatgtcacaaggtgagagagggaacaagagagagagaaggaggtgctaggctcttttaaacaactaggtcttatataaactaacagagtgagaactactcattacctcagggaggcaccaagccactcatgagggatcaaccttatagaccccaggattgtacagccactgccagtgtgcactctgaacttcagaaaagctgcaggcattgcactccaacccaggctgtgcccaagaaagccatgaagatggggctgcccaaggcttcagcggatcaccctttgtaccagtgtacccaggatacaagacatggcgtcaaggactatgttggaacttcaaggtttaatgtcttccctgctgggtttcagacttgtgtggggcctactacccctttcttttggctgatctctcccttttgaaatggtaatgtgtacccaatacctgtactaccattgtatcttggaagtaaataacaaaacaaaataaaaattttaagtacatcttctgtaattatgttacagctgtaattgtttactcaaggtcagcaaatttttttctgtaaaggaccagacagtaaataccttaacctttctgggccataaggtctctacataaacacgcaactttgccattgcaaccaaaacaaccacagacaatagtaaattaacataagactgttttccaataaaatgtgatctagaaagacaagagaggaataggatttagcccaagggccatagtttgccaatctttcctttaacttgttattcaagaacttttgcaatctggctactaactccccaccttatttccctactgctatcttgctggcactgtgtattaggtttttcttttaaaatatagcaaatacataccatattaaattataagaaaggtactagctttgcaaattaaaaaactgaggcgagagtgttttaagtagcttatagccaggactagaagctggatgaagaatccaagctgttaaccattacaaaaagctgcctctccattggtcaactcagcatcccccctaagttacatgatcacctctgcacttttgcttattaaattatttccccctctctaattttgtcctactcatctttcataacctgagctctcaatgaagctctccatgcctcaccaactctcagtgacttctcctctccttttcttcttttgtttgagacggagtcttgctctgttgcccaggctggagtgcagtggcgcgatctcagctcactgtaacctccacctcccaggttcaagcaattctcctgtctcagccacctgagtagctgggactacaggtgcacaccaccattcccggataatttttgtatttttaatagacggggtttcaccatattggtcaggctggtctcgaactcctgacctcaggtgatccacccacctcggcctcccaaagtgctgggattataggcgtgagccaccacacccggcctcttcttttattctgaaaacatatattgcctatacttttctatgcgtccttatattttcataatttcatactgtcttccctacttactttttatcttacattttctagatcctaaatacctatcatagtattctgaagtcaaaaggtattcattattttttactggatgatattaacatacaaataattcacgaatataggcctaaaataatttttaccactccctatacttactaagattaaagcaagtggtctctttacagtaaatatatcatttttcaagatgaaaaaagaaacaaagtataaattggttctttgatctttctagaatgagatacgctttgcaaaaacaattataacaatatatattcagtaactgaactacttagaagagattattttatagtaaacatcatattagtgtgattgaactaggataacagttgtatctgaaagaccggcaaaaatataatacactgatttttctgttctttaagtctcagaaaagtggttttctttgagaaagacatccttgagaaagctacagaccctctcctgacaaaaaatatcagataaacatttatacgaatttttcatcaaatatctgggtgctccagatcccctaaagttaagaaaccctgcctgaaagggtctcatattagctactcacagctgtaactcacctaataaattttccttttaacacaagacattcaaagaaatttcaatgcactaataagatgtggccgtgtttttaaaattcatacccaaattagaaggtgtcgaagatcataaacattggaaatggggaaattcatagttaggagcaaacgggtgaggggagagcaggaatattaccaaagacttaaagatttcaatttcatgttactacttgctaggaaggctctgatggcctggtgatcctgccatgtatatgaggggcacaaacacaggttttgtagggacaatatatatgatcttattgctaaacttcataccttcaaatcagaagtggtagtatcatatcctaaaacaataaattgaactaagaaaaattagcataagaaagtaattgtagtgtctatttaaaactcagatttagaaataaaaacaagtaagttccaaataaaaacaaatacagtcatgcaccatataagaacatttcagtcaatgactaactgcatatacaaaagattatatacctaattatatacatacacgtaagattacaatggaggcaaaacactcccattgcctagtgacatcgtgaaaatcctgaccctgggtaggtccaggctaatgtgtgtttctgtgtcttcattttcaacagaaagcttaaaaagaaaatataaaaactaaaacattattaaaagcttatagaataagaaaataaggaaaatattttagcatagttgtacaatgtatatgtattttaagtatcattacaaaatagtccaaaggttttaaaaagttaaaagtttacaaagtaaaatagttacagtaatctaaggttgttactgaaagataaatattttttataaatttagcgtagcctaagtgttgattgttcataaagtctacaacagtggacagtgatgtcctaggccttcatattcactcaccgattcactcagagcaacttccagtcccgtaagctccaagcatggtaaatgccctatatgatggtacaattttttgtcttttcattgtttcattttatttattttattttgtagagatgggggtctcgctgtgttgcccaggctggtctttgaaatcctggcctccagtgatcctcccaccttagcctcccaaagttctcagattacaggcatgaaccactgcacctggccttttatcttttctattgcatttttattgtaccttttaaatgtttagatatgttttgacatacaaatacttaccattgtgttacaactgtctactgcattaaggcagcaacatgttgcacaggattagagcctaggagcaataagctataccatatagcctaggtgtgtctcatataccatataatctaggtttctgcaagtacactctggtgttcaaacaagggcgaaatcgcctgatgacctatttctcagaacatatacccatcattaagcagcacatgactgtaccaacagagtaacaaccccgtgaatacaacaacagacaaataacaaacagtaacattaatgatacatagttgccgcatttcaatttcctttcatttaaacttttttcaataagttgaatttattaaatgtattgctaagctggatttaatttttataatcttttgcactcggcacacaagaatgacagcaatatatcacaaaattctaaattttaagtatgcaacgtgaaatggttaaaatcaaactatctgtagaatatacatatattgatggatgtagataaactgatgaatgcagaattgataacaggtaaattaatatagaatttcaaaaatagccaaatgccaataagataaccagatgtagtttcatctctgttggcaaaagaaatatctataaatttgtgcctttcagaatgaatgattggttcaacaatagaggcaaattctaaggtggagtggaggccccccagaaagagggcagtcacccaaattaagcaattaagtaagacttttggaaatatacactttaaatcaccattttttggattaatatttaaggtcttccatgatcatatcttaatttacttctccatcttagtcaataatctactatcctccacaacatcctgtactcagtctcaggtctttttagaaccaaattctccccatgctttccatgtattcaaataatacttacctttcaaggcaaagaacaaatgagcatacctggaaaaagcctctgattacccctttcaccctgcactgcttctcccctcctgtccatatgataaccacatatccctgacttcccgttctgatcctgatcatctcaaacagtctgtctccttatgaaagcacgtctgtctctgtgcaggatcttcagcatgaaacaagtcatctgttcatgagattcgtaccaatcatttggcacttaattacgtatcatcttctatttaatggttcctcgtatgaatgttgtcttgcttgtaagttcattatctccttataagcaatgactagcaatattgggtacacagcaaatactccataattatgtgcagaaattagttaaacgtcattatttcctgccctcccctttttaaaactatctaaatatgagaatcaaaactatacaaatctcagttcccgacaaattctaggaaacctgcagccacacacaaaacaagagtctctagtcattttcactttaaatagaaaactaaaacagggtctcagtctactttaattctactcattttaaccaactcaaagtttactatgacaaagttcactatgacaattgttccaagggtaactaaaggaattacatttcagatatttagcaatcatcatcaaaagggcaaatactctaagttgctttttcctagtgtagttgggtattgcattgagccatccctattaatttgcttgggtttccctaaaaccaacaaacatatttctgtaaaatagcttgcaaagctcctgatgtacagaaatgaacgttatctctcccttaaggtttgaccgtggccccattaacaccactgtcttaccaaatgaacaaactgtgactggatgcttcaatatatgaacggtataggcactcacacacaaaatattgttgcataaaggcacagataacttagctatggataaaagggtatttggtcttgcttctcggctattttgtatttttcttcttcttattattattatttttaattttattttttaagaggaagccttgccctgtcacccaggctggagtgcagtggcatgatctcggctcactgcaacctccacctcctgggctcaagcaattctcctgcctcagcttcccaagtgagcagctcggactacaggctcacgttaccatgcccggctaatttttgtatttttagtagagatggagtttcaccatgttggccagcctagtctcaaactcctgacctcaagtgatctgcccaccttggcctcccaaagtgctgggattacaggtgtgagccaccatgccagtcctgtagttgtttttaaacttctttaattctacaatgttttaagtaaacagaaattgtaatttatgtttctttgtttttatatgtttttacttctatcgtattcctgacattgtaatttccctccgctgggaggcaggggctttaactttggttgctggaagttacagcgaaaggaaaaagtggcaggctggtgcccaattataacagagaaggaatttagatgtttcagcagcctgagacacagaggactgccccacgaagagttcgctcccctccctgaatgccctgtcattggcacccaaatgctcccaatggaaaggaacttgtattgaaaagtctccatcccattactgggtatatacccaaatgagtataaatcatgctgctataaagacacatgcacacgtatgtttattgcggcactattcacaatagcaaagacttggaaccaactcaaatgtccaacaatgatagactggattaagaaaatgtggcacatatacaccatggaatactatgcagccataaaaaatgatgagttcatatcctttgtagggacatggatgaaattggaaaccatcattctcagtaaactatcgcaagaacaaaaaaccaaacaccgcatattctcactcataggtgggaattgaacaatgagatcacatggacacaggaaggggaatatcacactctggggactgtggtggggtcgggggaggggggagggatagcattgggagatatacctaatgctagatgacacattagtgggtgcagcgcaccagcatggcacatgtatacatatgtaactaacctgcacaatgtgcacatgtaccctaaaacttagagtataataaaaaaaaaaaaaaaaaaaaaagaaaagtctgatgccccaggccatatcctctttctcttccaaaggaaaaatacaaaaagctgttgtggtatgccaagatccataaagaaatggtcagctagatgggaaaaatcatatagtttagtggtttaagttttgttttgttttattttaacaaagaaattgtgccttcaaatggtatctgacacagaagtcgaaaaaataaaacaaacagaagttcaaggccaggccaggctgggtaacatagcaagactctgtctctacataaaattcaaaaaaataaaaaaaaaaaaaataagttagccaggcatggtggtgtactcctgtagtcccagctactcaggaggctggggtggaaggactgcattagcccaggagttcctggctgcagtaaactatgatcatgccactgcactccatcctgggcaatagaatgaggccatgtcaatcaatcagtcaaccaataaaacagataaaagagggagtgttttcggtagagtgggggtgggagcacagtttcatagcattatcccctctttcctcaaaccacagggagacacagacacagactttggtttaaagactgaaataacaaaaataaagccagagaagttaaataatgtattcaatactaacaattaagaacaaagccagaagtatagcctactttcaaggaaagttagcacactgtcacttgggagccagtggcacttcactccaatttcctgtaaggctgcaggatatggtggagagacagccttgatgtcatgcttgactgggcatggcagacccgtgacttccttgctgtgtaacctgagcttagttaagttactgggcctcagtgagtctcaggaacctcatctataaaatgggggtgaggggagaaactgtatcagaagatctgtctgaggttccaagaataatacaaaaagttcctagcagagtgtctgttgcataataatgatgtaagagcgttcacttctgcaatttggtgtgataaaacagaaaatgaaatctttatgtttgctttccaaacagcattttcattttttataattcataactcagggatatatatatagacatagatatataaatgtacacatacacctacagatacacacacacactctaccccccaccacacacatcactagtcatcatgaacacaatgaagcagagaactcaggtttgaacaccccaaattaagaaaaatatcttacacattttgtcagcctacaccgtaacttaatacacaccaaaacaaatgcaacaactcaaaaactatccgtccacaaacagccaagttaagtgggacctttcacattagtctttcaattattatgactccaacaagaatgatttcttcagaaggttttgaaaaatttatacatgaggaaaaaaatcaacccactagaccaggtttcatatattcttgttaacacatcttgtcttctggggcctaccaaaatgtccatctgagaagtttttgccatgaaaatcccagatccttatttcataatgtcataatgagattaagatataacagggaatatttgtacaccactgggattttgacaaacctccagattaaattaagcagaaagaacaaaagagtattaactccgaaacaaatctgaaggaaatctgctagcaggaatatccttcaggaacagcgcttcacaatgttaaccgctactgaaaagtgttgcaggttcagtccaccagggggcagtgttgtctaactattaacagaactgagttcttaaaaggaataaaacttttgtacttaaatttctttctaagctttcagaaggaaaaaaatatatatattctttgaaggaaaacctaaaaatctttaatttagatatctttaattaggtgaaaatctaaaagatggtccacttctcaaaatcattttgtgcctgttaatgtttatcatctctgtggctaggattctcctaaaagaaatgaagacactcactcaccacacctagttccacaacctgaccagggctgcttcagtcccgaccagaaccctcctcctctttggcaacctgatgttgaagttcagagaaagcagtgaacagtgacaggtgggaccctattgcttcatcacaaatttcaagctagttcatgatggccactgtattaaatatctacccactattcccaaaaaacattttcatgcaacaggaaatacaccctaaattttagcttgagagaaacagttaccatgctgtcacaatgacaaaagccccaagtgggctgctgagtggcaaggcacccaggggatgtagagtacactcctagagctacttaagaaacggccaccatctaccctgagtaatttcaataattgtgtgatcattaaaaaaaaaatctggtttaatctaaacaactttataaacacacacacacacacaaacacacacacacacacacacacacacacacacacacactctccttctcctatttcaatgcattcaattacctcctaattgctagatgcttcagtctttattggactggactcatccatggcatgtctctgcaactactgccaccttttgaaaatcctctctctcgttttccaaatatttttctgttaaagtttcccttctctatctcgggttgattcttctaaatttattttaaatactactttgtcaacctgttcattttttttttctttagagtgcaaacttcagatttcctgtcattttccacatgattcctgggcaatcatacccacttccaaaatgtcttctaagccccaatggccaaaggcttcagacctgcacccacagacccagaaaccagtctggcccttgcagatagagactccaggcctcccaggagccaggccagcctcaggggcctcatgctctacagaaccaaggatccaggcctgcttcagcagaccctggggccacacaagctgccacgaacccaggacccaggcccatccctagggacccagtctccaggcaggaccagtgccagcggactaaggatctaggcctgcccccagtgaacccagggtctaagcaccaggctggccttcatggactcaggatccaggactgcccgtacaggcccaggtaccaggatggtccccacaaactaaagatcctacctctaccactacagactcaggctttaagcacaccccaatgccaggccagccactgcgaactcaggctcctaccccaaccctattgatccaggtaccaagcccatctcagcaccaggctggcccctgcagatccatgctctgggcctgtcctcacaaactcaggctctaggcccaactcaacagacacaagctccgggcccatcagagtaaacccaggctccagacttgaacctgaaaatccaggctctaagcaaaccccaggggagccaggaaccagcctgcccaaaggctccaatagcaagcctacacacattcccttccagatgggggattataagatcatctccatagactcataaacagcatttgagaaaattcaacaccctttcatgataaagaaaaaaaaaaaaaacacctttcaacaaatcaggtaaagaaggaatgtacctcaacataataaagaccctatgtgacaagcccacagctaacatcacactcttgagaaacaaggcaaggatgcccactctcaccacttctgtcagcacagtactagaactcctagccacagtaattaagcaagaaaaagaaataaaaggcagccaaattgaaaaggaataagtaaaatggtctctttttgcaactgacatgattttatatacagaaatcctaaagagtccaccaaaaaaaatgttaaaactaataaattcagtaaggttgcaggatacaaaatcagcatacaaaaaccagtagcaattctatacactaataacaaactatccaaaaaaagatatcaaaaaataatctcatttgtaacacctacaaaaagtaaaatacttcagaataaatctgaccaagagagtgaatgacctatacaatgaaaactataaaacactaatgaaaaaagttgaagtgacaaaaataaatggaaagatatcccatgttcaaggattgaaagaattgttaaaatgtccctattacctaaagcaatctacagatccaatgtaacacttataaatattctaatggcatttttcagggagatggaagaacaattctaaaattcatacagaaccaaaacagaccccaaataaccaaaccaatctggtgcaaaacaaagctggaggcatcacgttacttgactgcaaaatgtactacgaaactatggtaaccaaaacagcatggtactagcataaaaacagacctaaaccaatggaacagaataggaagcccataaataaagccttacttttatagtcaattgatctttgacaaaggtatcaaggacacacaatggggaaagaacatcaatgaacagtgctgggaaaacggaatatccacatgcagaagaatgaaattaaacccttatttcacaacatatacaaaaatcacctcaaatggattaaagacttaaatgtatgacccaaaactacaaaactactagaataaaacataggaaaaaaggcttcttgacactcgtctaggccatgattttttggtatataacaccaaaaacacaggcaatgaaaggcaaaacagacaaattggattgcatcaaactaaaaagctaacacacaacaaaggaaacaattgtcagggtgaaaagacaccaacagaagtgagtaaatacgtggcaaatcatgtatcttataagcagttaatatccaaaatatccaagatataaatacatatatacattttatttgtcaaacaactcaatagcaagaaaacaaataacccaatttaaaaacctcctatgggcaaaggactgaaacagacatgtctcaaaagaagacatacaaatggccaacagatatattttaaaatgctgaatgtcactaatcatcatccagaaaaagcaaatgaaaaccacgataaggtatcacctcgaatctgttagaatggctaatatcaaaaagataaagtaccagatgctggagccatgtgggaagaaggggaactgtgtacactgttggtggaaaagtatggaagttcctttaaaaaaataaaaatagggcaggcatggtggatcacgcctctaatcccagcactttgggaggccaaggcaggaggaatcacctgaggttgggagttagagaccagcctgaccaacatggagaaaccctgtctctactaaaagtacaaaattagccaggcatgggtggcacatgcctgtaatcccagctactcgggaggctaaggcaggagaatcgcttgaacccaggaggcggaggttgcagtgagcggagatcgtgccattgcactccagcctgggcaaaaagagcgaaactccgactcaaaaaaaataaaaataaaagtaaaaatagaactaccatatgatccagcaatcccatttctgtgtatttagccaaaggaaatgaagttagcatgtcaaagagatatctgcattcccatattctttgcagctttattcacaagagccaagatatgaaattgacctcagtgtctatggattgctgaatggatttaaaaaaagtgatatatatatatatatatatatatatatatatatatatatatatatatatatacacacacacacacacacacacacacacaaacagaatactatacagccttaaaaataaagaagaaaatcccatcatttgtgacaaaacggataaacctagaggacattatgctaagtgaaataagtcaggcacagaatgacaaatactgcacgatcttatttacgtgcacaatcttaaaatgttgagcacacagtagcaaagagtacgatggtggttaccaggggctacagcagggaggaggatgaggaggtgttggtcaaatggaacaaaatttcagttagatggaatgaatacattctagagatctgtcagacagcatggtgcctataatcaataatgtatcacacacttgaaaattgctaaaggagtagatcttaaatgttcccaccacaaaaaaataagtatgtaaggtaaagaatatgttaattaatttaatttaatcatatcacaacgaatatatgtatgaagatataatactgtatgccataaatctatataatttttgtcaattatatcttaataaagctgaaggaaatgaaaaaaaaggaaataagggagagaagtctttaacatttctttttaaataatataaaatctcttccctctagcccagacctgatacccaccagcccactgaatatctgcatctgaatgtgccatgggcatctcctacgcaacatgtcccaaagtgtcagcattcttccaccttacccccaaatcctccctcccatccacccagctgcccaaagcagaaactaccctcaatgccttcaccttcttttcttcccgtatcatatcagtaaccaatatcagcaatccctgcagtatgtctcgtcttctgtatctccactgcctcagttcaggtcttcattatgtgtccctcgcattcctgcactactttcaggcagagatggagatggtttaccccactatccatttctcctcttcccttactgatagaacccctccatttttagctaggcacacggccgctgaataaatactgtattttcagcctttctcttacagctaaaagtgatcatggcacgacacaggggcaatgagctctaactagaagtcttccgtggcaatttctccaaaataaaagcaagtcctcactcaacattgcagattagttcttggaaaccaagactttaagcaaaacgacctacagcaagtcctcaaataacactgttttgttatattgataacataattagttttgttacacatcctatatgtttcgcttgaagtcgcagtttccaagaacctatcaaggatgttaaagacttaccatatccttttattacagctagtgcatgcccctttgctcttgcgatttcccacccccaaccctgccccttgcattcctgctctcaggaacgtggagctcaagcaaacacatcagaagatgagaaaatctccaaggatggcagaccaactagcccaaagtagccaggacctgcaacaccgtggaaccaacatacaagctgtgaatcatctatctggattcctttcatggaagagaacttttattttgtctaagccaccggtgtgtgggtgtgggcaggtgggcgtgtgtgtttatgtatttatgtatcctaacaaggttcactgcctccaatctcacctctccaaaaccacaatctatctctagatttcctacttccagaatgatttccagactgatttcctaaaccctaaatgtggagaatcaatccattatttttttaaaaaattaataaaatacacacttacagcatgctttagcatggcacgtaagaccattcataacctagtccctgcccacctgaagtcttctagttcattgctccctcttgacaccagctgctctgaccaagccatggtctgcacaacaccacagctttatatgtgcttctgccactgtcaaaacatctttcttcccagcacccgttctaaattatcttcaaaaactctgctcagatctcagatgtcacctcttccaagaagccttctctccatcctgactgaggtacaaattcacagcctcccaaagcctctgttcttacctctactgtagcaggtatcatcctgtgtcagaatcatgttattacttgcctgtttctccaaccagacttcacagtcaggctgtaggcttcatatttctacctctagcccagcaactacaggtattcactgaatgcgtgttgaaaaagtaaatacttccaggaatgtactgaaggaagtttttagcatctggtacttgacatactaataaacaaaaaactaggcctcttgattctttgcccaggcctgttcccagtacatcagcatttctccaactgtgttccaataacatccattcagaaaatgtgaataatgtgtgggtttccagctatgcaacacagcttccagttccaccaacctgtcaaacttccaccaccctcaaagcctctcaccccacctttttggtcttctacgtggagggagggcactgtacctgtaccgtgcccctttccctggttcccaccattcagtcgtcattcataagtgccagttcagacccggggaagactatctggtcttgcaatatttttaataatcctctaaagcttggctaaagaccgccctgaaactcaccaggctctacaatttccttaattctcctttctacagattaaggttttgcctcttggattcttttttttaagcactagtccctatcttcatgattttcaaagaatatctagagtggatatataatttacctgcaaatatgctcagtttcttaggatattatgcctcagagtttaaattcatacaaaaggagccaggtgatctcttccggggcttcagcttcttctagcagtgtttgttctaccctttcaaacaagctgactgtactccttgatagagaaacgccagccaggaaggagtttcgtatctctgctttatctcagaaatctcttagcattacctcacacacccttagaaaggagccccacctttcctttttctctttctttttcacacaccacacagttattgcccctgacccgtgagaacaggattgctcaagcagccatccaaggactacctgaatcgggatcatccgagagctcattcaatactagatttctgagtcaaacagaatcagaattactggagtgaggttcaagaatctgaatttttaacaagcatggaaagcatccaaggtggaaacagatcgttggcttgcaaggtggggcggggcaggactggggcggccaggatccccagaaactgtcacctgcagcccaagaccactgctttccttcacttccctgcgcaatacaaagagtgtaattttctatgtgcgccatttgtagggacatggatgaaattggaaatcatcattctcagtaaactatcgcaataataaaaaaccaaacaccgcatattctcactcatagatgggaattgaacaatgagatcacatggacacaggaaggggaacatcacactctggggactgtggtggggtggggggaggggggagggatagcattgggagatatacctaatgctagatgacgagttagtgggtgcagcgcaccagcacggcacatgtatacatgtgtaactaacctgcacaatgtgcacatgtaccctaaaacttaaagtataataaaaaaataaataaattaaaaaaaaaaaaaacaatcacaaaaaaaaaaaagtttcatggagtttctagaatttcctagagaactactaaattagtatttctagggcaggttcacaatgatcatttccaaaacttctacaggacaatctaatgtgccctgatgcttaggaaccatcgctttaaaacagcaattctcaactctttaagggcaaaaataccttttcgtaacattttgcaatgccttctttattatcctacagtgaaatccatcaacaatataactgcctaaatataaaattcaaaataatccatataatgccctaaatatcacaaaggggaaataaaattaaaatgattttcattacataaatgctcaggttagtcagacacttgcttgtacctaaaggagaatcatgctgaaagcaaggttcgagtgtggacagatacagcggtattgaaatggtgatgcgggagcatgagcgctgctttcttggatgtgatactttgaaatagtaaacaacttttagtaaatttgcaaacaaaacaaagtataatcttctctcgatttacatggtagttacagtcctagaaaactcactgatacttaaaaccatttaagtaaaaaaccttttattgacatatcctaaggccggatcattagaaacatatttttctcctacatgaatgtccaacaggacattcgaggccatacagaatgtagaatagttcttcctggtgtggtactatcccagggactaaaacttgtctagcatgcctcatcaccacctattaaaggctagtagccacctagccctccatccccaatcactgtgataactaaaaatatacccaaccattcaacctccccaaacaatatgaatagaggtacctgtgtcaggctatagtattattttcccttgtgacactatcatacatgatagtgactccagaatctctgcgtgattctacctatacttataatattttcaaaagcaaatatttacataaattctaccataacagaaattgctggtgaaattctacatgaatggaatgacagtttcacagatatgagaaaccttcttcagaaatccttgaaaaaacaaatgtaaactactttttttaacaatcaaattgcattttcctgttgacatatttcaatttcagaattatcttctcactattagtattcaattggcagtggttcctaagcagttcagctctgcatgtcagtaaaatatatcaaactacagtttaaatgtattaaatgattccaaaatgcatccttttagtgttaaaatggtttataaacatctcaagtaaattatcttttaaaacacaatggttctcgagcctgtatgtgcatgacaacaaacactaggggagatgcttaaaatgtagagatgcttgggtcatcccttgcccacagattctaactgcataggcatgggttaagtagagcctaggaagctttattatttcttaaaaggtctacaggagatcctcatgctggcagaggcagatctagttttgtgggtcctgaaacctacacacaactgggcaggtggtcacggggagtctctttaagaaaaagaacaaaaaaatggcaggtttctgggagccttgggaatgcttcctgcattggcttcatagaaaatccatctctggatgctacttggggttgcaaagtgtgacataatgaaactcacaactggaacacatgggcaaaagtataaagtcatacactatgtatgcagaggccataagcccagtgttcacgggcttcaggagataatataaatgagtaaggcaggcaaggtatgagaacacaggagggagtggtgaccaagtacctgtgctctgaaggcaccagcactatttcatgtcaatgccaaggcacactcagtgttggcattcctcaaattcagcaacagaagcttcaagtctggatttttacatgaaatctcccagtttttaaaagttagctcaatattttaataaaacattggttagaccaaataaatcataagttaaaaatgccagtatgtcacttctgctttatagaagggaaaagatatttcctacctaaaaataaaactgaagagtagatagtttattcaaggatccatgaagggagactgctaaaaacatactttgtgagtcagttcatacacctgacaatgaaaaaacggtttgttcagggattctgcaacatctcaaggacctaaagtttactctaacacgtcctaacggaacccaaagagttctgtaagtcaataaaaggcaagctctccaatataaaactcgtgaacaggaaaatctttcaaaatgaatcataaatggctaataagcacatgaaaaaagtttgacctcaattacatctggtgcagcaagtctgtggagattaaagttctcagttctaattatgacattctgagaacacaggaataaactaaacggaagtgcttttcctattctctcactcaacctacacagaagacttctgtgaccaaatgttttccccacaaaccgagcaagcaatcaattctgcaggatacaccacctgggtgtcctgtaattcaattcaactgcaatactatctaactcgagacagtattagatcccacgggttggggactcagtctccaagactgccccttcccttcagatgcccatctaaagccgtaggttgtttcacctgcgcttctgactggctataaatcaggattctcacagccccctccttgggttcgattaatctgctaaatcagctcacagaacacagggaaccacttatgtttaccaacttctgataaaggctgttacaaaggatacagataaagggatgcatggggcaaggcatgtgggagggggcagagagttccatgccctctctggacacaccgccgtcctggaacctccatgtgttcgtctttcagggagctctgcaaaccctgtccttttgggtttttatggaggcctcattagtaagcatgattcactcaatcattggctattggtgatttccttaaacttcacccctctcccctccccagaggttaggggatgggactgaaagtctcaaccctctaatccaggggtgtccaatctcttggcttccctgggccacactggaagaactgtcttgggccacagataaaatacactaacactaccaacagctgatgagctttgaaaaaaaaacctcataatgttttaagaaagtttaaaaatttgtgttgtgccacattcaaagctgtcctgggctgcatgtggcccatgggctgtgggttgcataagcttgctctaagcttggacaaggtagccccattctaaagccacataagggttgccaggcatcagttaattcattagcatacaaaaagacataccactttgaaaatcctagaaattttaagaggaaactcagagggaagaccaaatatagtcatgtgccacataatgacatctggctcaccaatgaccacatataggacgctgatccataagattataatgccatattttcactgtaccttttctatgtttagacatacaaagaccactgtgttacaattgcccacagtattcaatacagtaatatgctgtgtaggttcgtggcctagaaaaaacaggctaagccatagagcctaggtgtgcagtaggtatactatctaggtttgcgtaagtacattttatgatgtttgcacaaagatgaaatcgctttatgacacatttctcagaatgtgtccctttctttagatgacacatggctgtatatacttcacagtgttagatgtgatgtccactgctgttccaaagctgatttgatcctactctcaaaaaagtcaaatcctgctcctcagcttttcaacagctactttaaatatatatatatacatatatgtgtgtgttttatatatatatacatatattaaacaccaatctaaaaaaatagatcttgtagacaaaaacactgaacagacagtagaaatatgcttttcagtatgctctcctggttgatttctgcaacacttcttagttatcttagtatataaaacaccaagtaattccaaagaagtagttaaggctaccagcatacagcccattctacagatacgtgggccagtgtggaataaggtggaacctctaacttactataccaaaaaccctagccaaagagaaagttatagtcacttcctggcccactttgtcaagccaaaacagaccattggaaactactgcgtatcaagcagaggctgtggtacagctaaaataatggagaacatatggtcagtttaataacggccaaggaatagtgagcaagtctaacacatacttgttattatactgtaaaatcatttttctgctttccataatgggtgggaaggaggctggagagtggaaagaaaggagcaaaataaataaaaatggccaaacatagaagattttctaaaggactagccacaaaattataaaccaacttctatccgtggtgaaaacaagaaaataaatcaacagaaaacctgagaattagcagatttgtcatttcttcctttgtttatttgtggtattctatcccagcccacatttttcctaaagcaataactcgtaggtttcctgggtcctgcagccagatgcaaagatctgaataggcatgagtaggggctgagctgccatgctacttttttcttgtcttgctctccaggaattccgtgtgtatggtgaggcgtctacctaaagcagacgctcaacattcacccaacacattctatctgttattcagaattattcagcttcttctttgcactaaaaagaaaaaataactaactcaaaatgggccacagacataaaggtaagagttacaactataaaacatggaaggaaatacaggactaagttttcttcacttaggcaatggtttctaagacatgacatgggaagtacaagcaacaaaataagagatatagataactggacttcaccaaaattaaaaccttttgtactataaatgatgactatgaagaaagtgaaaacataacgaatacaatagaagacagtatccagagtcatacaattaagaaggggcttgtatacagattatagaaagagtgctttcaactcaatcataaacagacaaataagccaattaaaaaacacagctgggccctgtggccaggagtttgagacctgccggggcagcacagccaaaccccatctctacaaaacatttaaaaatacaaaagtcagccgggcatggtggcgtacacctgtggtttcagctactcaagaggctgaggtgggaggctcacttgagcccaggagttcaaggctgcagtgagctatgctatgattgtgctaccacacttccaggcaactatctctaaaagtatatatatatatatatacacacacacacatatacatataataaaaattctctaattttttggaaaaatgttaaaaaatgggcaaagaatctgaatagacatttctctaaagatatacaggttgagcatccctaaccaaaaatctaaaattcaaaatgctccaaaatctgaaacgttggagtgccaacgtaacacaagcggatgatgacattaattaacactgcaaaaaagtgcccatagacaacatgatgaaaatgtgtgatgggtttattcaaggactacagcagggtacattcataatagaacaagaaatcatgccagtttataaaattcgagagagaagtcgaagtcaaaaactactgttaacgaggaagatgactggaggacgcatttaaaaagccatccagcagaaagcctcctcatccttagaggactcacttccaggtccctcaactgctactggtgtttctgctcaactcaaaaaacaaaaccacgtacagtgaattcttatctttttaaaaaaattttctttcttttctataacctcattttagaaatgatagagtttttaatcaaaacacagcatggcagaggaagacggaaagcctaccgttgtttgttcctgccactgtccaggaactaacataggtattctggtgatgctactgtactgcttagctatcctgaacacatttattttttcaccatattaatggtatgttgttttttttttttactgttaaatatgtatgtgtgaatcagtgttagaaaatgatcgcttcttagaagaatatacattcagaggcaggaatgagggtgatgccacacaaccacagactgtccacatgggtggctgagatagtgacctctgcattctgatgattcagcatacatgaactttctttcatgcacaaaattatttataatttataattatataattataatcataattataaaacaaatgaatttcatgtttagacttgggtgtcatcctcaagatatctcattatgtatatgaaaatattccaaaattcaacaaaacccaaaaaatccaaaatctgaactccttctggtcctaagcatgatgggatatttaagctgtacaataaaccataagcacaggaaaagatgctcaatgtcattagtcattacaaaaatgcaacacaaaaccacaatgagatactacttcatatctcctaggataattataatttaaaaagaaagacagagaataacaagtgttggcaagagtgtggagaaactggaaccctgtaagtaagaaaaaacacacagataagcaatttttcctctgatctcacaccacaaggtgtggagattttctccacacatgaagcaagcaatcagtcctacagaggataccagctagttgtcctctaatgcaattcatttccaacactatctacccggatatggcatcagatcctacaggttgagggcttggtccctctaccccacccctaaccccatgccctaaccccacctcacccctgccactttagatgccagtttcaagccccaggttgttttatttgtgcttctgaaagggtctagatcaaggatcccacaaccctttccctgggctcagttaattagctagagtgcctcacagaactcagggaaacatttacttacatttactggcttattataaagggtattacaaaggacgctgaagagatgcatatggtatgtatgggaaaaggggcacggaacttccaagccctccccaggcacgccaccttccagaacctccatgtgttcagctacccaaaacctctcaaacgctgtcctttcgggtttttttgttttgttttttctgagacagagtgtcactctgttgcccaggctggggtgcaagggcgcaaccttggctcattgcaacctctgcctccagggttcaagcaattctcctgcctcagcctcccgagtagctgggattacaggttcacgccaccatgcctggctaatttttgcattcttaggagagacagggtttcatcacgttggtcaagttggtctcgagctcctgacctcgtgatccaccctcctcagcctcccaaagtactgggaagacagggatgaaccaccacgcccacccctttggtgtttttatggaggcttcatcacacaggaaggaatgactaaatcattggccaacttaaccttcagcccttcgctcctcccaggaggctgctcactgctgctgtgtagccactgacccgggggctctgggctgctgccatgctacttagtttccctgaacacacgtaggagaaagtccgaaccctccaatcccgctgtgtccttctggtgcccagccccgtcctgaagctacctaggggctgacagccatcagtcaacatatgagcacacaagaagacatcattgcggacattctaaggattttaggaggtgtatgccaggaaatggggacaaaaaccaaatacatatttcacaatatcacaccctcatacactactggtgggaatataaaattgtacaactgttgtggaaaacaatttagaagttcctcaaaaggtttaatgtagaattgccattcaactcggcaattctacttctagctgtatacccaaaagaaatgaaaacctacatccactcaaaaacttgtacaacagttctcctaacagcattactcacacaagccaaaaaggaaaagcaacccaaatgtatggtttggctgtgtctccacccaaatctcacctggaattgtaataatccccacgtgtcaagggcggcgccaggtggagataatggaatcatgcgggcagtttcccccatactgttctcatgatagcaaataagtctcatgagatctgatggttttataaatgggaatttctctgcacaagctccctcttgccagctgccatgtaagacatccctttgctcttccttcgtcttccaccatgattgtgaggcctctccagccatgtggaactgtgagtccattaaacctctttcctttataaattacccagtctcaggtgtgtctttattagcagcgtgagaacagactaatgtattaaatttccctcaaatggtgaacagataaaatgtgtaccatccatataatcgactattattccacacaaaaaagtagtggtaaattttacagcaaaactagtcataacaatgattccatttatatgaagtgtccagaataagaaaatctctagagataaaaagcaaattagtggttgcctagaatgacagtcagtgggtgttctctctctctttcttccttccttcctttttttctttttatctttctctttttctttccttccttccttgtttctttctttctttccttccttccttgtttctttctttgtttccttccttccttctttctctttctctctctctctcccttcctctcctctcttctgccttttatcctttcctctcctttcctcttcctcttgctcaagacaaggtctcactatgttgcccagactggacttgaactcctgggctcaaacagtcctcccacctccagcctcccaagcagctggaactacaggaaggagccaccaacaagtcttttgtttttaagatgatgaaaatgttctaaagtggcctgtggtgatggatgatgcacaattctatgaacgtactaaaaatccactgaattttacacattaaatggatgaattgtatggtttacaaattgtatctcaataaagttattttttaaagtattcagccttctgggtcactatggcagacaaggatacagatttgtttaatcttctctaagtcatatgaaaatggcaacaaccaatttcaaaagaaaataaattcacaacagtgctaaaaaaaaaaagagtataaccatagacaaaataaccatagacagaagtcacaaccccaaacaagcccagagggccacagttatcctaacagtagagccacagagaagctagaaacccagagttggcaggtctccagatctggaatgggaagcagaacatatgtcaccatgattaactgaaaaatcatctgcagaacagcttcccatcctagccccctcccaccctgttccccaacccagaggcttgcctgcagcaaggcagttagcatgggtctaatcccacctgcacttgtgccagtccatacaccccacctcgtagaaacccattccagccctcttctatatgaagggaagaggcctgctaaggacacacactccacacagccagagcaactccacctgtctatatctgggaacccaaactttcattcatgcatatgaatgaaaaaaacaaactccaacagacatttgaggactaacggtggctttcaaaagaagttctaagatttaatgaaacaactgaccctcgatgaagcaaaaatccaggaaacagaagataatctcagggggaaaaaaaatctaattgtttatttagagagattcaaaataatgcatccataaaaaagcagactgcaatgaaaattgagtgaccagagaatgggaaagaactcttgaaactataaataaaactataaaaatgttgttagaaagagtggaagatcgtactttaaaataggaaagaaaaattaaaagacatagaagattgatctaatccaggagaaccaacacctatctaataggaactgcagaagtaaaaaccatttttaaaaagtagagaggacaaatattttcagagctaaggaaagacatgactgaaagggctccacaggcaccatacagcaagaacacaagactcacacttccagaaacgtgagtgggtaggggtcaagagagccctgaaagctgtccatagagatagagccaattacccacaggtgagatctcaaaggtcttttcatttaagagactccagtgcatactgcatactaaatcaaagccaattaaggcaaaagaagggattaaatattttgaaacgcacactgcaaagtctaccacttgtgttattcattcctcattcagttacctaattcctaatctgcttaatttcccaaacagtgaaaccggaggacaggccatgaactttcacgtacaagtctttacattggcatacgcttgggtatcctgggtaagtatcaagaaatggaatggcctagtggtacagaacgtatatctttaacttcttaactaactttttcaatttttttttttttttttttgagatggagtctcgctctgttgccaggctagagtacagtggtgcgatctcagctcactgcaacccccacctcccggcttcaaccgattctcctgcctcagcttcctgagtagctgcgatgacaggcatgtgcaaccacacctagctattttttttatttttagtagagacggggtttcaccatgttggccaggatggtctccatctcttgatctcgtgatctgcccgacttggcctcccaaagtgctgggattacaggcatgagccactgcgcctggccttcaactgtttttaaataattggaccttttacattcctgccaccagtgtgtacgagctcagtagctccactttcttaccaatcacaatatggccagtctttttaattttagcctttctagtagattttattagtatctcattgtggttttcatttccatttccctaataactaataatgttgagcatcttttcatgtgcttacctgccatccatatatcttctttggtgaagtatctgttacaatcttttgcccatttttttttcccttaggggattttccttcttgtcattgagatgtaagagctctctatgtattctacatacaagtcttttgttggatgtccaacacacaatgtcaatagtcaaactgttgcgaaaccctgatctagttaattttgctgaaaagaaccacattatactgcaaggagtcatgtatctacatatgattcactttacctttaaaaaaaaaacaggtaatttttaaaaaactgacatgagacacttcttaaaatcatatgctacagcatccattcacatctaagtccagcaagcaccttagttattcatacttatgaccataaatcatcataaagagaaaatttgcttagacaatacaagttagaatgagctccaactaaaagaaaattaacattttaacaaaattttggtatgtctttcagaggcttccaagcaactaagctctcactacacaatcactctagaaccttaaaattataacacatttcctatggcttccccactagtgccacccgactcttttcttttaatgatgggctctgaacagttcaggtgacggcagcagggaggcaatgtgaaaacagttctcctccttcctccgttagtcatcaggtaccttctccaacagaagagtccccgaaggcctccctcagagcctgtttactctgatagtggttgcctttctaacacagcacatttatagcatatttcaagggagtggggtgatgtgacttttacgtctttccaatctgagagttggttttcctacaggaacagatgatgtcacatttcacacatgattcagagcagaggagcctggatcatggtctcaaacctaccaatgagtttgggcaaattaattcattctcttgagtcctcagtttccacatctataaaaggcaaaggtgacttctactatttcttccaacataaagattctgctactttaatacataagcggtttcctaacagctaaacactgattgggtaccacgtgccaaaccctgagctgtgtatttacaatctcattcgatttccagtacaactctatgaagaagttactaccattttccctattttacagatgaagaaactgaggaggctcagtgttgtccacaggcacctgtcgtaggctgggacccaggctctgctgcagctgccatcagcactttgcattcagtaaagtgggaggaacaagatacagctttatgccagcccacagacagctgtgagaagtaattacagtcagagagtttcaaaaacacacacaaactctaaaaagcaagtttaggacaatttatgaagttctacaattctccacgcaactgaataacccatgaagatacctatcttacctcattacatcaaataacttccaattactggcatgctgtgcctactaagaggactgcactaaagctgagacttctcatgggctatgagagagactggatttttaatcggattctaaatcatctcagctatgtgcctttagtcatgttctttaatacctctgaagctcattttcctcacctacttatttttaaaagtctgtaaactcttcaacttgccttaggaggccctacatgatatggcccttttctaaatggtaatctttctgaacttatctctcagtgatgatgtctgcagactaaccaggctagtcttccccagttcgtcaaacaatttctatttcctgctcataccatttctgcaatttgaaatgctctccccacaaaactctaatattcagaattctagtcatccttcaagaccaagttcaacttccacctcctccatgaagttatcaccagacaaactaaatgtgatcattcttccttgctagtcacttggagacatattgtttcttcttagctaaagaataagaaacttatgagtaagaaccatgtcttccacgtctttgcaccttcaatgtgcccaacgcaagtaacctgcacaaaggtgctcattaaatgtatttgttcaacaacgcatgcatcctgtcacacctacagcataacatcacaccaggagcaactactaccaaccatttttaccaaggcaaataagaaacaaaaggtttaaggtgtcattttggtttgcctcggctatgatatatctgagctgctgatacagggaaaactactcaaaacccacgagtaaggaagaaccaaactcactcaccaaataaggcagagaactatgtagacatttggtattatctctatatagttaaggaaaaatcagttttattatagccaaaaaaaaaaagcttaattagcaaaaaaatcacagtgtcacattcaaagttatgtctatgccaaggagttttattttttaaattttttgtttattttttgagacagagtctcactcagtcatccaggctgaagtgcagtggcatgatctcggctcactgcaacttctgcctcctgggctcaaacgattctcgtgcctcagcctcccgagtagctagaattacaggcacatgtcaccatggccagctaatttttatatttttagtagagacaggctttcaccatgttggccaggctggtctcaaactcctgacctctggtgatccatccgcctctgcctcccaaagtgttgggattagaggtgtgagcaactacgccaggccaatgccaaagagttttcaaaagtctggggataactataatcagtaccctgtcagggaaagagtaaacagatgattaggtacctcaaacttcaagcccagaatagttaggtacttatgatgcatgacaaacagcataaatggctacaatacatgttaagtataagagatatactacgaaacacattctcctctaaattaggacactgtgataaaagccaaatgatttttaaaaataatttagctgttttttttactgtatctaagagtccccaactattaagatatctaataaatattcactttttaagctaaaagaagttattatatggctgtgtatacactgccttcttggtatcctcaaatattctggagttattaaataatcccatctaacatgtgagtcaaaaatgtgtagttcatacctgggtttcttcagctgagcaacagctgtatgtattaagtcagattcttggtcttcccaaaacaaaaataagtatcagataataataaagctgaaaaattaaggattgcacttataatatcggcctcaaaggtcagggatatgatgatgatggtgatggttatcacaataattaacagcagccaacacttttatagcacttattacataccaagcatgactctaagatcctttttttttgagacggagtctcgctctatcgcccaggctggagtgcagtggcgtgatctcggctcactgcaagctctgcctctcgggttcatgccattctcctgcctcagcctcccgagtagctgtgactacaggcacctgccaccgcgcccggctaattttttttttagtagagatgggacatgactctaagatctttataaatgtcaacttatttcattctcaaaataattctaagacataagtcactataatcccattttacagatgagaaaactgagccgcaaataagttggatagctttgcaaggtcacacagtttataagttcaaggccaggttcaaactcaagaagtctagatccagaactcagagaatattaaccacatgcaatagccttttccaatctaattctcaagatatgctaatatcccctttatcatcggttttccataaaattacacgttttgaaattcaatacaaagctatttgcatttttatcttgtacctccttctaggaaaatgccttcaaaaaagtattgcattaacaggatgagctctgcggtcaggcaaacttgccttatactcctggctctgctgtgtgagtgattgtgactgggagaagattacttcagatccctcatctggaaaatggggataacggtaccaacttataaggtgattgtgatgattagcatagtgcctcaccacacagtaagtaatctagtaggttaattattactgtaattagcactagtaatagttctatttgttctaaatttacctgtttcaaagtgaaaaatgttgcttctagttccagaagactaaatttgataactagattaggccaatactaaaaagtattaaaaataaacaagagctacaataacctccaaagtaaagactgcagtggctgaaaatcattgtggaaatgtttcctaataatatattttgttagtgaaaaacaagcaccaagggctgggcacagtggctcacatctgtaaactcagtgttttgtggggccgaggcaggaggatggcttgaggccaggagtttgagaccagcctaggtagcatagccagaccctgtctcttaaaaaaaaaaaaaaaagaaaaaaagtatttttttaattagtcaggtgtggtggcatatgcctgtagtcccagctagttgggaggctgaggcagaaggatcatttgagcctggaggtcaaggctgcagtaagctaggatgatgccactgcatgccagcttggatgacagagcaagactttgtctcaaaaaaaaaaaaaccaccaaaaatacattagtcaatatatataacaatggtaactatggaaaactcttatgaaaactggttaattcttggaatttcaaatatcagaagctgagaattcttcaaaccaagaacatgacttgaaattaccaagaataggccacaagaattacatgaaatatttgcggattctacatcttgggaagattgttttgatgaataattagggaaagcaggtttcacagagggaagaagaaagtaatgcaggtggagaaaaatcactttgaaatcacagctcttcatatagtttacctgggagagggatatgaggaaatacttactagtatctggagctttcccttcagatctgccaaataaaaattcatatttggccttggcaacactctgggaatgtgcagatgcattgttcacccaaacaaatgtctctgcctgcaaaataagaacaaaacaaagacacatttaaaatacatcattaaaaaacacatcataaaacaaattatccaacatgagattggtaaaataattatgacatatgtactcaaagctatctaaccattcaaaatgaaacatgaaaagtgtaacatgaaaagaatcagaatacaaactatcactgcatgattatagctatataaaaaatgtatacatataaacatctatagggaagtcagaggaaaataaaaaggatggcttgattgggaggctgaattatggtcggtttttaaaaaattaacttaatgtaacttttctgcaattagaaaactatattttggctggacgcggtagctcacacctgtaatctcagcactttgggaggccaaagcaggtggatcacgatgtcaggagttcgagaccagcctgacctacatggtgaaaccccatctctactacaaatacaaaaattagccaggtgtggtggttcctgtaatctcagctactctggaggctgaggcaagagaatcacttgaaccagggaggcagaggctgcagtgagccaagatcgtgccactgcactccagcctgggtgacagagctagactccatctcaaaaaaaaaaaaaagaaaactgtattttgtttttaaacacatcattttccaactgattatcatcacccacagtccataacaagaatatttctttgtgtggcttctgttaaagtacaccaacaaaaaaaccagtctttccccaaaatagatcacatttttatataatcaggaacaccattcagccgaacagggcatggaacagaactgccaggcatcccatttatactgattgtcctacatttcaacatctgtcccagggtcctgtgtaactcctaaattcccttatttgaaacaagaactacaaaggtgatggtgaaagtggtacatcctaactctgaactcctaagacctccttcctcgctgttttaggcaactgtcaaaaatcaggagtgtctctgttctccggctgaggactaattaaaaacaagtagcaaggaaaaaaatttcaagacacaaagaaatttgacctagcacagtcagggacgccttcttttgcctctttactatgaacctaaacattaaccaggatacagatatcaccggtactggtttctacccactggttatgagacatcatcttttctcatgtctgaacagtgactgaccattcactttgggggagagaagcgtgaagggttttaacagcaacgaagtaactatttcaaagagggaaatgttagtatttctattctatgctttggagtagaaatgactgacaatactaggaagacccaatcacacctccatcaccccactggagacaggttcagggggcagaccccactttgttctttaataccaagagctagcgtgcacaacattcagacagcaatttcttaaaagagctccacaatcacttaatgttcataacgcgtcaaatgtatcggtctgaaaaaaggtgcatactcctcttggtgttacgtgtttgataatcacaggttgttaattatccttttccccaatagagaggaaatattaattttttgaagtgtttggggagcttcaggctagtaaaagaggaactcggccaaggggctgccacgtaaggtgccctaatttgggcaggtggttagggaaagctctctgagaaactaacgcctgcagagatgagaaatatgacaggctggggaaggtcagcgacatattggcgggaaggccatacgcatggccttaaggaatggaaggatggatgaggctactcagataactaagagaaagccaaagtggccacagaagagcaagtgagtgggcaagtttagagatttgcaggatgaagagtgtagctcaaggaaaggacggagcattttgatgggtttgatgggaagccactgaagcgttttatgggatacagtgattcatttgcattttaaaagattattcatttacacttttaaaagatcatatgggtgttatatggaaaatgaattggagtgagacaagaagcagcagagatatcagctagaaatccaaacgagaacagggaagtttggaggaataggcaaaagtggatgaattaaaatatattttgtaggaagaattacacagttttctgataaactggatttaaagaatgagggaaaggggccaggcacagtggctcatgcctttaatcttagcactctgggaggctggggtgggcgcaccacttgaggtcaggagttcgagaccagcctggccaacatggcaaaaccccgtctctactaaaaaatacaaaaattggccaggcgtggagccatgcacctgtgatcccagctactcaggaagctaaggcaggagaatcgcttgaacctgggacgtggaggttgcagtgaaccgcgatggcgctattgcactccagcctaggcgacaaaagcgaaaatccgtctcaaacaaaaaaaaaaaaaaaaaagagggaaaggggagattaaggttaattagaatagatactaaccacttactctgtgccaggcactgttctaatgtaatacatggaatatctcatttaatgctcagaacaatcctatgaggtgggggctactgtcatccccatcttataggtggaaaaaagaaggcaatgagaggctaaataacttttccaaagatatatagatcctagattcacacccgagcagtccaaatctagaactcgtggcattgcggatgactcccaggaatctggcttgaacaaccaggtgcatgtattgagaatggggagactagagaagaaacagtatcaagagcctacactggggcttccaagtgatgccccaaggactcactaaaacatcagaaagaacatttttaaaaaggaatccattacaggggtgctagaaaataagaaaagatgccatctatacagcaaaagtttcaagaaattccaagaagataaatttttgcttagaatctcaactttaaggccgagaactgttctctaaagcaaggttccccttgagcaaggattcttaacctcaggtccgtggggaagcaattgccaatcaagagaattctggaagttcatgaagctggggagggggtgatttacatatttatttgcatttacctttagatgaaatttagcatgttttcaaatacaaatgtaagcaacaaaccagagtattggtagcaataaccataacttgtcatcaatagaaattcatcattttcatatcatctaacagttactacagatatttggaaatatgtatactcgtccctagtttgaaatgataatagttactagactcaccattaaatcttgttatcaataaagaaacatagctttttttttttttttagagatgggatctagatatgttgctctgactggactcaaactcttgacctcaagcaatcctcttgcctaagcctcctgagaagttgggatacatatattatcataccacaaatgtaatattttggtagccaatcaaattggtttcttttgcaactctatctacattattgtatgcatttaaaatgcactattctgacaaaagatctagaattttatcagactatcaagaggagcctgctcaagactattgtttctcaaattgcaacttatgacccattagtggcttgtaaaatcactttagtggatcatgaccacatttttatatcaataagtttatacacacatatctatttaatagaatataagtaaaaataccagagcagaaaacacactgtaagataagcattgtttcatggaacgtctaagtcacacgtgcatgtgagtgtgtgtgctgagtcatgattaaaagtgtatttctcaaggttgctcatgacctaaactgttggaaacatactaccctagagtggttctcaaaatttatcatgaattagcattacctacagcaccaagtaaaacacgtactgctggggtccatcccagagtttctgatgccgtaggtctgtggggcctgcgaatctgcattttctaacaatttttcaggtgatgctgatgttgctggtacaggagccatcttctttgtgaaccactgctctcgaccaatggtcttcgtactctgttgtatatacgaatcacctggaatcttcttaaaacagaaactgagcaggttaaggtggggcctgggactccgcattcctaaaagttccctggtgaccatgatccacagaccagctttgaggagcaaggcttgaaggcgctaaagcttccgaatgaagccgtgttcaaagtacgctcagactatcacaaaagtgaaacattttttaaaagggactgctcgacctagaagtaaaattcactaaagggctctgcttaataaagtgctccattaacatactccaccttgctaaataatataaaattcattctgcttgcatttgtgtggaggctaaagtaactctatcttggaaactaacatgccatgttgacttctgattaaccccagttctgggaatgcctctgagatttccaatttatctactgtttcttgagtaatggcacatacttacagtaaatcctgcccttacatcaaattcctacctattccctccgaagcatgtgtgccccttccctagatataatccctgggtctggggtataatggcatggagatctatccgtcttgcagttgccaaaaaccacgcttctgtctgtcagttccccaataaaacaccctataacaacagtctggacctgtctgccttctcctttggtttctcagctccacctgcactggggggttattcttaccaaacaattagttattcttgaagctgtgagcccctattgatacatcctcttcccatagcaaggcttataaatttttactgatctctccaataattaatgcaggtctttgaaaactgtattgttaaaacaatcagattaatgacagacccacagaattcagactactatttcctttggcattactaactgaataaaatatattcttttgcttcatcacagttgtttttacgaacataaatctccttaagaagtatggaacatgaaacattagcagctggactgatggtcaggtgatcagacttaaatctcggctcgatagtaccacgcagtctcacacaaatgcttcaagtttgggcttcagcttccctattgataaaaagtgttactcaaatttatctctcagctctccttgaattctgaagcacaatgattcttcacacttctgaaccagcttcacagacacttcactacgggagcagtaacatcttttccttgtgataaaattacaatggcatgatccccaaaacacaccctgtatttaaagatgcaagcccaccattaaatggatgggacaaacaaaatctcaaccttacatttgatatgacttttcacatttacaaagaattacattcacgttatccaactcgcaacattaccgattataattaccaattttagacacaagataagcactactgatgtagaatgacttttttttttttttttttttttgagatgacagattctcactctgtcacccaggctggagtgcaatggtacaatcttggctcactgcaacctccgcctcccgggttcaagtgattctcctgcctcagcctccagagtagctgggattacaagcacgcatcaccatgcctggctaatttttgtatttttagtagagacagggtttcaccatgctggccaggctagtctcaaactcctgacctcaggtgatccgcccgcctcggcctcccaaagtgctgggattacaacaggtgtgagctgccacacccagcctagaatgattcttttaattaattgtttagctgtaaaaaaatcaaaaagacgaagcagaaagctacaggcaaattttagaagtaaaagtggttttcagttgatttgggaagggaatgatggggctagaggagtgaggagggagaaaaaggttaagagtagagtttgagaaaggtggcatgctccttcatttccttaattatttcaacttcagtatgattttcagagaatctgaaagcctccaagtcagccagtgagtattataaagaaaaaattaaacactaaattaaagactataaaataatatttcatgactcactcaaaactaacacttggttccaacagtcacactctgcacttgatcctgctcaatcctatctgctcccattgcccagcagaagccaggcccatggaagcagggagccacgcacaacttaagtgcagacagggacaagaagctcaaggctaatgctgcaaaaggcaacagttaggcgttatgggctgaattgtgtccccccaagatttatatgttgaagtcctaacccccagtacctcaaatgtaactgtatttggagataaggtctttaaagagataattaggttaaaatgaaatcagtagagtgtgtcctaacttaacatgactaatgtcttcatatgaaaagatgacgacaggcacacactgagaaaagaccatgtgaagacacagggagaaggtggccatctgcaagacaaagagagaggcctcagaagaaagcaacccttccaactttgatctcgaatttctactctctagaactgtaagaaaattaatttctgttgtttcagtgccctgtttatggtactttattacagcagcctagttaactattactttaggaaaggctacagattagagggcaaaaggaaaattctccaggatgacaggtaacaagcccctgctattcccttttaataagcaaaagggtctggatgagaaggtatatccttgcaccagcccacacaggaggaatgtgggtttgaagacatgcaaagttgtaaaaggaggtgaatctttcactctagccaaaaacagcgatgtataatactctaatccagtggttttcccagctgtgtacatgagaatcctaagattcaaagaagctgcctgggtatagagacagggtggctgcaaagatcaacaaaggaggcatggtgaaaaagactcttgttcactcaaccccacaccacttttgcaaccacagtagttccatttctgttttaaagattcaagttctataacaggtttatggggaagggagacgtccagtgtaaaaaggaaaaagaaaaagttttaaaaaatcactgttgtttatttctgggtaagatggcaaaataaatatacacatttgcatttgccctcatccaaagctactaaaagcacagtaaagagattcttcttataaaagcacaaacccacaggaaatagaataagaaaaatgacatttttgaagcaaatgatctagtgataactgacacaggagaccacaggaaaacctggagaaggaaaagaacaattcaatgcaccccacaagacatccaaaggacaagggaatgagggagcctggtaaactcttgaagtgaaggaaaagggagtggcttagataacagaggactattcacaaggaatggttatcaagcacttaagtcctcagatccctgcctccactacactgggagacagcccctcccctactcaggtaaaacaatagttttattaactagagagatttttcaaagagcactctggcctaggggacaccacacactactgaagttaaagataccatagcggaaactgggatttgtatgctggatgttaagatgcttagatttcttcactcaccaagctaatgaaattatggcaccctatacttcaccatgcaagcaggagaccggaagagttttcactgaggaatgcagctagaccaagaaggaaaacctacaaaattaagtcacgactctattagtaaataacttaaccagatcctcctacagtgaagcttagagcttccacgtggctattaccaccccactactatatcacattatactccttaactttcatgactatgatggttttgaaagtttcaggccagttattttacagaatgttcttcaacttgggcttatcttcatgtttcatgaggctgttcttctctttgcaccctatcagtggcacatgctttcactttgtccaattacagatcacattcactttgatctgccaggtttcaccactgagaaacctttttaagttgacttaaaaagtttaagccagccaggcatggtggctcacgcctgcaatcccagcactttgggaggccaaggcgggcagatgaccggaggtcaggagtttgagaccagcctggccaacatggtgaaacccccatctctaataaaaatacaaaaattagccaggtgttgtggtgcatgcctgtaatcccagctacttgggaggctgagcgaggagaatcacttgaacccaggaggtggaggctgcagtgagccaagattgagccactgcactccagcctgggcgacagagtgagactccatctcaaaataaataaataaataaataaataaataaataaataaataaataaataaagtttaagtcagcttaaactttttctcttagtaacgaattattacgctgtggaaaggcacttaggaactatgtaaatatcttgtttcacaccaaactttcaatttataattttatttatttttatcagaacaggctgaatttattgcttttttatttcagtgctcaaattgcccagttgggactgacagaagcctcttcaagttggcttctgtgtcttttgacctgtccccattattctctgagcatttatttactttctcacgccacagaatgttccatgcttctcttatattttccatctgccctagaatgagccattttattttaaaacaaaactggttcctttcgatgaaaaatattctttagatctaagacctcaacactagctgtgcttactgttattggagagtagctgcttataggtcagctagggaatttcagacagacacacacacacacacatacgtacacacacacattcacactcactgtggtagactaaataaaggtcctcccccacaaaatgtctacattctaatctctggaacctgtgaatgtcaccttacatggcatagcctttgaaaatgtgattaaattaaatttctgggcatgggagggctatcttggattagccaagtgaaccctaaatgacatcacatgtatccttataagagggaagaaaagaaagattatgaggcagaagagaagaaagtcatgagacagaagcatagaaaagtagagccagagataagatactacaacactggctttgaagatggaggaaggggctgtgagccaaggaatgcaagaaatgtagctctagagtctagaaatggcaaagaaacagattatcctctggcaccttgattttagcccctaagactcctttccgacttctagtctccaaaacttgaagagaataaatctctgttgctttaagccaccaagtttgtgatactttcttccagcagctataggaaaccaatacagataaacagaaatatacacaaatacacactttatatctacattatctctacatctaccttatctaataaaaaaccataagtcagctgggcgtggtggctcacacctgtaatcccagcactttgggaggcccaggtgggcggattacttgaggtcaggagtttgagaccagcctggtcaacatggtgaaaccccatctctacaaaaatacaaaaattagccaggtgcagtggtgcacacttgtaatcccagctctcaggaggctgagacaggagaatcgcttgaacccgggaagtggaggctgccgtgagccgagatcgcgccatgcactccagcctgggcgaaagagtgagactccatctccaaaaaaaattaataaataagttcacattcatatttttccataaatgtatttatgctgctttcaagtacaaatgagtcattaatgagataatcacaagactaacatgtaacttgttactccacctgtactgttcctttttagcacagatcatccaaatacactttgctctccctctataattaagactttccactataattaaaaattttttattgctgaaaaacaaagaaaactatccattccctcagtttatctggcaataaagaggaagattcaagtcctagcatgtgtagcatttttttcctttaaaaatatatttgaggccaggtgcggtggctcatgctgtaatctcaatggtttgggaggtcaaactgagaggattgcctgaggccaggagttggagactagcctgtgcaatacagccagacccctgtccaaaaaaataaaaaataaaaaaatcagccaggcagagtgtcatgcacccatagtccctactactcaggagcgtgagggaggagaatcacttgagtccagaaggttgaggctgtagtgagctatgattgtgccactgcactccagcctgggcatggaacaacaccttgtttcaacaaataataacattaaataataaaataaataaaattttccaggcacggtggctcacgcctgtaatcctagcattttgggaggccgaggtgggtggatcacctgaggtcaggagttcaagacaagcctgaccaatatggtgaaaccccatctctactaaaaaaaaaatacaaaagttagctaggtgctggggggagtgccggtaatcccagatacttgggaggttgggacaggagaattgcttgaacctgggagacgaaggttgcagtgagctgagattgtgccactgcactccagcctgcgcaacagagcaagactccatctcaaaaaataaaaataaataaaataaaataaataaaatatattataaaataaaattaaataataaaatataaatatatatttgacatacacctgcacataaacaaatggggaagatgctcgtgcttgggccaaaggggatggctcacgtatgccctacaaccagtccctcgtcccctcacagactaactggatagatattccaaaagtcagtaacaacatcaagtaaaaaagtaaaactgggacagaatgcctctcaagagtagagagcttcacggacaaaacagccaggaaacaaaccaggtagctgaaaggccccatctttaatttgtgaaggttagaaacagcatggaaaccaaagggcaaagcaggaaatggaccaccagcttagggagaagacgtcggcaaaaagcaagcctcggtcctcacccagtcatcatgcagccccgctgccagcttgtttttaattgtgtgagcacaagaccaataactgaattcatggccttgttaaaagcccctggaggtccattctcattttcccaccagctgctctcttcactctgtccatttccagtgtgaaagacgctcccctgggacaaggggaagccggggttctgctgctcctccaggcaaggggtcagggagcggcggccatatggggtggcggggggcccagagcagagccgcagtggcacgagctggcttccatcgacacacatgtgaaggcagaggaaaggacaagaaagcatgcctttaacaggttcaaatgaatcttcctttggtaaccttcatgttggacccattttcgttgtcttttaaccagatgggaagattctatcccccttctaggaaccgtgcctggcctgggcaaggttctgaattcataatacccgagggcttcttaccaatggtggtagctgctttattttttttgaagtgtgacatagaaagctgggagctagaaagctaggacggtacacattcatttgtaataaagcctcccataaaactaaagtaggatagagggatcaagtcttcttcacaactccttcactaacacagcagtaactaaagagctggagaccttcaatgaaagaatttgaagaaaattaacaaccgactattatgagttcacagcatatcctccgcctttgccaccatctcataatcagtaatgacagactgagaagacgggcggacttggacagcaaacaataaacctagtgattcaagacttcatctcgccttttcccctacctattcctgaccttttttgccttcctcaggttctggacctgtgtgcttctgataatgtttaaaattcacaaatgaagcagatagtataaatatttgcatttaaaaaataaaaacattgttaaacctttgaacacatcttactggctacagactctggattcttaacaggaggatggagctctccacgttgggagagcacttggggatttaagtcgggtcacatgaggaaaagctgaaaactacacagaactttaaaagtcagcccagcataatcaggatccctatgaggaaatcaaccagactgaataaataacattcataaatgctcctctacttctttctcaaaaaaatggaggtgggtcaggtactgagaacaatcaaaacaagtactatgcaaagcagagactacaggctcacacgaagtgttcaataaatatttttcctgaatccttataaactaggaaacctcaaaaaagccttgaaaccttggaaaaggttaggaagaagtcctacaaagaaattgcataagcatcagccttagtcacctaaatctgctttgcaaatatcatggtatctttggtcatttcagaagttccaataacttctgaaacaaagtgaaatccactctatatttttaaaaaacataatttgtcactttgacaaagagaaaaacaggtgctaaatgtgattttaaggtgggaatcatgagaagtaagtgtcttctcaccttagtttgctatatctctagttcccttaacttaaaagtgacctcttggtggcaactgtgtatttaagtgaaacatgtaatacctagaactgcaccttacaaataagacaggcaaaagattgctcttgattaagataagaatatagttatacacggtgaaaccccgtctctactaaaaatacaaaaaattagccgggcgtggtggcgggcccctgtagtcccagctactcgggaggctgaggcaggagaatggcgtgaacccaggagacagagcttgcagtgagccgagattgtgccactgcactccagcctgggctacagatcgagactctgtctcaaaaaaaaaaaaaaaaaaaaaaaatatatatatatatatatatatatatatatatatttatagttttcttctcttccaaggagttaaaccagtgatcaaacaaattaaatcaatgttattttctacttacacagtattaatcatttacccaacctacatgcatgcagaaaaaaaataatctcctaggcaaatataaacattctgaaactcatgaaatccatgttgtgatttacactaaaataacacacgaaatatttaaaataatataatcattgcattaatttctgtaagaaatacatgtcccacttaaatttcattaaaggtaaatatctccaagcaaatgatcatgagcttcatatcacaaagaaaatctgaagtcaggtcactcagtggaaagcttttggttctgtgtataggacataaatcgtgaccagatcataccaagcatttcatccctggctgttaataaatgaatattatgaagaactgtccataaactgagctcagagcatctacaaaacacatgtctgtaaggacaaggtaaagaggggcaccaaagagagcataaggtcctgaaaatataaatttagcaaaaaatttcacatcagttctcagacgaataacactatctctcgtcttgataaattttttcatcatattttaaattttaatttaaaatgatatagaaaagtaaaatacattatatgggtgcttaatactcctgtcaattaccagtaaagtcattcttcaaaatgtcatgacaagacaagatgcatcaactgcctgactttccactgcgaaattcttacatcccagcttcagggaggttctgagggcagtcaataggtgcccaatagcacctatttaaactatagctttgtcacgatactcatactacctgcaatatgaaaaagttcccattatacctttttaacttttataaagaaacaaactatttatttgtaatgaatattcaaagacacaaactattcgttgaaagccaaaaggaataaacttctcagaaaggaattgtttacagaagcatattaaaagtggttattttattagtttttttgaggaactctgttacttttcccttaacacatccatcacctcaaatactttttgtattttgtggtagcaacatttgaaatttactctcagtgattttgaaatgtataatacaccattattaaaattatattcaaggtgctctgcaatagagctcaaaaaagaaacaaacaagcaaaaagaaacaacgtattcctcttgtccaactgaggctttgcaccctctggccatcatctcccgatttcccctaccccagcctctggtaaccactattccgctttctgtttctatcagttcaactgttttagagcccacatacaagtgagaacatgcagtatttgcccttttatgcccagcttatttccttttcacttcataacatcactttgtaccccataaatatatacaactataacttatcaatttataattcatatatttatatatacataatataaaattccacgacccatttggtcactgacctctcggggaacatcaggttgttccctggtgccttgacaagagtttatcggcctcacccacacacgcaagtgatccaagaactgtcctgtgtcatgcacttgagaaagccaacacaggagacacagtatttctgttgctctagggccgagctgcaatgggttacctggggtgcttgtggataaactgctgattgctagattgaatcagattcttaggaatggagctgcagaacctgcattttgacttgactcctccatgtgattcttaggcatgctgatgtttgaggaatattcattctggaactatatgagtatacaacagagccctcaaaaagaaaagggcatggtggctcatacctacgatcccagcactttgggaggccgtggtgggaaggttgcttgagcccaggagttcaagaccagcctgggcaacatagtgagacaccatctccacaaaaaatttaaaaaatagccaggtgtggtggcacatgcctgtaacctgtagtccctgctactcagggggctgagcagggagaatcgcttgagtccatgaattaaaggctacagtgaggtatgatcacaccaccgcacttcagcctgggtgacagagcaagaccctgtctcaagaaaacaaaaaacaaaccaaaaaggaccacggaacagcagggcagtggaaagcaaggaacaaaacccaatcctctagggccacagccaccattcctacaacacaaaccacaaccacaaagtacctggaaaaatgcactgacaagttaggatttctggcttcttgagggtattttacaactgatgttaacattgttagttgcttttatcaatggcttcaaatttgtgcaattagtgaaaataattagccatgaagttgcttttggacccaaacaatcaaggaatataatactgggaaatgggccaggcacagtggctcacacctgtaatcccagcactttgggaggccgaggcaggtggatcacctgaggtcaggagttcgagaccaacctgccaaacatggtgaaacccctcctccactaaaaatacaaaaaattagctggtgtggtggtgggtgcctgtaatcctgaggcagaagaatcatttgaacctgggaagcggaggttgcagtgagcccagatcacaccagtgcaccccagcctgggcaacaagagcaaaactctgtctcaaaaaagaaaaacaaacaaacaaacaaacaaaaaactgggaaatgttccttgctacataagactgattcagtctcacaaatactgcattttcaacagacaatgcatgaactaaagaataatgggtggatgccagtcacctttgttcttaaatacagaacactggagaataaatgattcaccaagaggtgtcctcaatttcatagttttaaagacgtctacatcctactcctcccctacccacatgcctactccacggtcaatgatctccagaacttctgaagattataggcttattctttctatctttacatccataattggaacataaaaataatgtgataaactgttaactttaagaatgcttgtttgagcttgccagagacctaaaaacggacttgtttctggggaaaaataacagagctccaaataattaaattttaagtaaacttttgggattcacatgtgaaagtcagagatcacctatacattttattgatacacatgatagtaaaatctggttcaacgcggttaacagcttacatcaatttacaaagactactgatgtgactctgattacaaatccctaattgtgctgtgagagactgataacaaatcatcttgtgaacaagaacaaatgaattaaatatacaaattataggactgttagaataacagttccattatttagagcacaataatccagcaaacatatttggaatatagaaagcagattttcagagtggccaaagcatacatgtttacaagtccatgcaattaaatacactttattcaggagagcccttcgaagctcttacatatggacaatttggagacatttagttatttttctaattcttgtaagaatccaaacaacttattgaggagacgaggtgatggccagcaggtactacataaaatcgagaatgaccaccacaggtctgacagtaaaaacaaatgataaaagacaacataagcaaagataaaagacatgtatcaactgtgagtaaacatctgcaacatatatttaaatatctaatatataacaaactccaacacatcaataacccagcagaaaaacaggcagaagataaaaacagaccatttaagaaacagaaatacaaatggcgaatacacattaaatgatcttcaaccttcctaatgatcagtgaaacacaggttaaaacaaagtcaccagtttttacccacaatagtggcaatgatcaaaaagactgacaatcaattttgaaaggctatgaggaaactgataaactcctggttggggtataaattaatggtgacgcggcatgttcatatatatctgtctctctccatatgtgtgtgtatgttgtgtgtgtgtgtgtgtatgtacatacatatggtttacaaacatttgaacagatactcaaggcaacacatataaatatatcaatggcagcactgtttgtaatagcaaaagctagaaacaatctgtccatcaatatacaaatggctaaataggccgggtgtggtggctcacgcctgtaatcccagcactttgggaggccaaggtgggtggattaccagaggtcaggagttcaagaccagcctggccaacatgttaaaaccccatctctactaaaattacaaaaattagctgggcgtggtggcaggcatctgtaatcccagctactcgggaggctgaggcaggagaattgcttgaacccacgaggcagaggctgcagagagttgagatggcaccactgcactccagcctgggtgacagcaagactccatctcaaaaaagaaaagaaaagaaaagaaatggctaaataaacgataggatggaatacagtggagcaattttttaacatgaggtaaactcgcatatactgacatggatgtatgccaacatatataaaaaacaaactgaaaaaaatatgtgtagtatgacacttaagacacacatatatacatatatatgtatacactcctcacacacatacatagtacaagtacaaactgcagggttgatactcaagatatcaaacagtgacacagggctctgagcaatttcagcagatgcttgctcagtgagaatggataccagctgtattggtacaggccatttaatgtatacacttgctcctcaacttatgatgtggctacatccccatcataagttgaaaaatatcttaagtcgaaccatcttaaggaccatctgtattagccataaatattaacacggcacataaacatgcatagaaaaaaatctggaaaaaataaaaaaccaagatacctgtggcacagtggatatgaggggcccaagatttggggaggggttcaatgctgaatttgacctcatcagtaatgctttaaatttctatgagaatgtactcatgaattaattatgtaactaaaatttaatttttataagaaaaaaaaagagtagtatggaaaaagtatatcagttgaggtactcattcattttacttgtcaagtgttatgtagttcttgaatcaaatctggctaaaattttctcataaagatgaccaatgtttagttccctaatctagaagcaatcaaccatccatccatccatccatccatccatcacaaaaaagagttctggtcggagaagaataccaagggacactgtctatcatattccaatttcagtggtggaggggatgcacaaagtaacatcctgatgtagtatttgtctagcttcaagtccagtgtttcctaaacttgggtatatctgagaattccttgaaacctcaccccaaatattctgttttcgcaggcctgcagtgggggctcaagattctgtatccctgccaaaccccacaggattctgatacagacggttcaaggaccacacactgagaaacactgctctaatccaagggaattacaacattaatctttccaccctcatcccaagttcaatgaactgcatcaactttgtaagtgacgtcacgttaggatggacagacgccaaaaaaagagataacatcaaggtgcaggcagacaacgagggagtcaaataagcagagtacacaatgtgctagtcagctttcactagattagttgtggcagtagcaaatcaccttcaaatgttagtggcttaaagtgaaggtttatttcttgctcagatgttgtggctgcttgagggccaactgtggctctgctccaggtgtgggtaggctgaagaagattcccccggcatctccttcattctggaatctatctgaaggggcagcaccacactagacacctgatatacatgacgtctcttttgtgtttttagagacagggtctcactctgtcacccaggctggaatgcagtggcacgatcatagttcactgcagccttgaactccaggactcaagggatcctccctcctcagcctcctgagtagctgggactataggcacaccacagggcctgtctttgtctattttaataatataattgttaatgttgatatattttcattttggttacatatatattactttcttggctatataaaagtttatgcataacaattattcatttatcaattttttactattatagtgttgcaacaatcaaccttctacacatttctttacattcttttctgattattcgtttatgaaaatctcctagaggagacaacattgagatcaaaggaaatgcatattcaatactcttgatacacgttgctgagctgtcctccagagaggctgtcccaggagtggacagggactgtgttttcagtcatgtctgaatctcaagccaaatcatcgttcttagcatattttatttatttatttatttattttatttttaagacggagtctcattctgttgcccaggctggagtgtagtggtgcgaacttggctcacttcaacctccgcctcccgggttcaagtgattctccagcctcagcatcccaagttgctaggactacaggcacatgacactgcctcggctaatttttgtattttcagtagacaatgagtttcaccatgttggccaggctagtctcgaacccctgacctcaggtgatccacctgcctcagcctcccaaagtgctgggattacagaagtgagccaccatgcccggcctatattttagacccctaatcaactgaatgaatggaaggaagaaggaagctgaaagaaaaagacttttctgaggaagctgtatgatttaaggaaaggcagatcactggagaagtgtaaaacacgcttagaaaatgagagctaggcccgttcagcagattgtatcacatgaaggaaggctgaggagaatgaagtataagagatcagggcttctcaaactggggtgggcatgcacaacactggtatcccgctaaaactctggttctgatccagcaggtctggggtggggcctgacagtctgcatttctaacaagatcccaggtgatggtgatgctgctggtccatgaacttcactgcaaatcataagaaagtagatgattacactggagaggcagattctctctaaaaagtttccaatgtcaggctcaagagtttagagtatatttagttggtagtcaatttaaggaaaggggtgtgatgaaggtttctgagcaagggagacctaatcaccttaaaagaatcagattaataaaaatctttatatacattaccaaccgagtcttgcttagaggaccacttattttgttttgtttttgtcactttaatattttctcagttttggtaaatatagcacacaaccttgaggctattttagcaaagtttcagtgctttacatatatccctctctagcttaaaaatgattgttaataacagaagggacaattaacaaaggatccatggtttggcttttcctggcctccctacccctaatctcctctgacctcatcagctgaggccacaccccaaggctcctgggtgttgctttctcactgtttctggtggcaaccaggactccagttggggatcctgtttataaaaataacatagggataaccaagagttacatgcccccatcacttctcctctcccaagatgaaatcttaactacttattcagtaagcagtgactgccaattcttggggcatctatcacctcaacacacctggatttaagagtaaacaatcggctgggcatggtggctttcacctctaattccaacactctgggaggccaaggtgggcggatcacaaggtcaaagagattgagaccatcctggccaacacagtgaaaccccatctctaccaaaaatacaaaaattagctgggcatggtggcgcgcgcctgtagtcccagctactcgggaggctgaggcaggagaatcacttgaaccagggaggcggaggttatggtgagcggagatcacgtcactgcactctagcctggtaacagaacaagactccgtctcaaaaaaaaaaaaaaagaataaacaaccacacaggaaacaacagtgactgtacaatgtgagcaatgacttcaactcaggcaaacagtgaaaggtaagaacaccctagacagaatccacgggcccaacagctaattccacatctcatccatctctgttccctccagtcactagcattggaatgctgacagaagatggccagcatttgctacaattctttcacctattccattacagcctagacagggagggctgtaaaaaaagactcaggaataaggtaggcagaacggcctcagtaccttatgtctgggcattttgccaacatcctctcagatcctgctcatctagaacacagcagtttccgaggttcttatgaggctctctagcaggaagccactgcttgccaaagctcatgagatcaccaagttaataatgaatgcacttgtgggtggggtgaagtgtggtgcagctagcatgactgagacttcaaatgacctgggctgtgggaaatgagtcttggccagaacacttcagatatttgccacagcacgctcatacactgttagagtgtaaggaggtataacctttttcgaagataattaagctattgctaccacaatttgaaacacatatgcccttttatccagcaactcaactcttaataatttattccacagacacataccaaagaggaaggtacaatgatgttcatttcagcaaaatatgagaacttaaatgtcatcaagggcctggctaatatacaaaaatataataaaatataaggtagatattaaaaaagaatgagaaaaaccttgtgtgctacactgaaactaccgccaagatatactgttacatatataataatgtatgcatataatgtatcatctacataattatgtatgcacacaaacacacaggctaccctctgttaacagagattgtcttaggggaactgggtttctgaggttagagaaaggcctttgttttatagctcctgcccttttgttttatttatttatcatacacatgtattactatttcccttttttgtttactttcttttgggggaatatctatttatttacttttgggttcccaggacatagattctttctgagcactcaaggaattacagaaaacatttacaatgaaaaatgcaggtcaagctagcaagattaaatgcaaaaatcttaagatattagcaaagttaattcaacatcaaaaagataatctatcatgaccaacttggctttatcctaagaatgccaagctgttttaattttagaactcaatcaatataatttaccacactgatagatgaaaaagaaaaacccatatggttagcagaatacatgcataaaattatatgcaataaatgtgaatgtcaatttattattttaaaaataaccttagcaaactaggtatacaaagaacttctacaaatctgcttaaagcactattttaaaaaatccagaataaacatcatacttaatggtgaaattttgttccaataagtcctatatacaaacaggatacagaggagttaagtggtgttttttttttttttcttttgagacggagtcttgttctgttgcccagggtggagtgcaacggtgtgatcttggctcactgcaacctgcacctcttgggttcaagtgattcttctgcctcagcctcccaagtatctgggactacaggcacacatcatcacgctcagctaatttttgtatttttagtagagacggcatttcaccacgttggccaggctggtctcaaactcctgacctcaagtgacccgcccgactcggcctcccaaagtgctgggattacgggcgtgagccaccacgtccagcttaagtggaggttcttaatccctttctgaaagacgatccctttaatatatcttacatatcatttcagggtgtttcatatccatctcccttccgaacatccaaagccagaagatgcatgaattccaactgaaaaagccctggggaatccattctccagcactactggattcatactaccaaaataacccgctgtacactttacagcattttaaaaccttcagcgggtcctcagcctacaaaataaagctcacactctagctctgcacatctgactccagtctcctattccaactttctctctcattgctcacgacactaagcaacggtgctcatctccttggtgttcatgtcctcggtatttaatgcctatgactccacccaccttgcctttctgcccacactcacattccactaagagaactgggaatcaagacattacttttattactgataaaagctgactagggaaaatggctaaagatcagtgacaagaattagccagacctccccagccagtcactggcacagctagacaaactcaagccacgccagcaaggccaggtctgttaacacaaggcagaaaaggctgtagtacagaaccagctctgaacagagaggccctgcagtgccgagctgaggatctccttcttacaaattcaccaatcagataagccactctttttcccattgtggtccctcaggctggaaacatgaggccagggaaatgtcacctccttcactaatattcaatccttgttttcaaagcacagtacaagtcccactccaacctgaaaaatcattccatccccagaaaaattacccattatcgattccttggaattcctagggaacctaatgcctgggcactgttttgattcaacatctacaataatgtctcgtatactgatagcagtttctctatcaagaaaaaccgagtccctgtctagctctctgaattctcatcatttagatgcatgctcagaacaaagacgatgctcaactatatgaattttgaaaaattatgaatgtcagaatgcagagtgtggtctttaataggtaagaaggaatcttaagaaagagaacgcatgaccaaagaagtgtcttctgaagatgagtaatcgatggcatgtctgattagaatacaagacacagacacaagacaagagaaatggcaataaagaaaactattatttagatgtgatttagaaaagggtcctcaatatcagagtaataaagcagaaaccataaaataatagaaagctgtccaacaaaaaactgaataaaaacaaatcaagaaaagaaattaggaaatgcgtaaatgtactaagggtcacaatagatcaccagctgacagtaaactgctgcttagtgacattgttcacacaacagggctgttacagatgggaagtagtaagtcatttttacactttctatgtataaccaacagatcccaattagatcctaactgaaaagaataacgaagacaatttaaagagctgaaaatgaggcttctagaaggaggaaaacagcaatttatttatttatttatttaattctgagggggtaatcatactcttaaagacaggctgggcacagtggctaatatcggtaatcccaggactttaagaggccaagggggcagatcacttgagcacaggagtttgagatcagcctgggcaacgtggtaaaactccatctctacaaaaaaatacaaaaactaggctgttgtggcactgagcacctgtattcccagctactcaggaggctgaggtgggaggatctacatgaacccagggaggtcgatgctgcagtgagccgtgagtaacagagtcactgccctccagcctgggtgacagagtgagaccctgtctccaaaaaaacaaacaaacaaaaagactactggtgaaagaaaaagtgcaactagacagtttactactctactgaaaaacagagacattcagtaacagagaaattttacctaaatctgaagaactcttaatagaatcattgttaataaagtgatggtggaaacaacactcttttttactttgacaactcaatacttacgagtccacagttactaacacaatgacacagcaatatagtacacaaagaaggttactagtcaagctacttaagacaaggaggacaaaaataacagaagagccataaaaataaatatatgcaggctgggcgcggtggctcacgcctataatcccagcactttgggaggccaaggcgggcggatcatctaaggtcaggagttcaagaccagcctggccaacatgatgaaaccccatctctactaaaaaatagaaaaattagctgggcatggtggcacatgcttgtaatcccagctactcgcgaggctgaggcaggcagaattgcttcaacccaggaggcggaggttgcagcgagccgagatcacgctactgcactccagcctgggtgacagagcgagactctgcctcaaataaataaatgcagaaggtatttgtagatataaatattcctctaaagaggtatttaagattaccataaagatattttatttgtcctgagtcaagaacatgataaatcagatataccgcctaacaaaactattcctaaatcctggccaaaagtatgtgtgcttcctccactacatagcactcactccctccagcccataaaggacatcattaattgatggcttgctttcctgcgaaaaccatgtaaaatctatgacatcggctttcactttgcaaaaattttatatttaaaaataatgaatcccagcactttgggagaccgaggcatgcggatcacttgaggtcaggtgtttgtgaccagcctggccaacatggtaaaatcccatctcaactaaaaatacaaaaattagccgggcctggtggcgggcacctgtaatcccagctacttgggaggctgaggcaggagaatctctcgaatctgggaggcggaggttgcagtgagccaagatggtgccactgcactacagcatgggtgacaagagcgagactccatctccaaaaaaaaaagaaagataggtccattgcaattcttaaaatcttgttgtagactaaagttatcaacagagaagaaaaggaaaataattgatgaaataaatttaatagcttgttgtaaataccacgaattgcctttaaaaatttcctcaacattaaaaaacttagaaatctttggctttcattaaagttgggaatatatgacaacacacacacacagcaaaaggtatttttggtgggaggaggagataatattttggaaaaaaaatggcaaactatattgctaatgcagctccagtgaaatgcctttttttacaaagtaaaaagatcagtgttaggttgagaatgggttagagttattccaattcactatcaagctctaattccctccacagcatcctgcccagaagtttaaatacctcctcccactgtgaagaattaactctgcctagagagcttttgttgttttaaatcttttttcttaaaaaaagaaagtcatgcatgactatatactatgagccaggcaatgggctaacaactttatcttgccacactaatctttacaaccacctgaagatctaggttctcttgtcactcctatcttgcagataaggagacacagaaaggttaaaggtcacgtcaggccattggtggaaccaagatatgccatggtccttggaagagttctttcagcctacacaacatatgtattagtccgttttcacgctgctgataaagacatacctgagactggggataaaaagaggtttaattggacttaaagttccacatggctggggaggtctcagaatcatggtgggaggcgaaaggcacttcttacatggcagcggcaagagaaaatgaggaagatgcaaaagtggaaacccctgataaaaccatcaggtcttgtgagacttattcactactatgacaacagtatgggggaaccgcccccatgattcaatgatctcccaccaggtccctcctacaacacatgggaattatgggcatacaattcaagatgagatttgggtggggacacagagccaaaccatatcaccatatatatttccatttactaaaaaccacagaatttgacttcctgaatttgtgtttctaaactaaaaatttccttcaaaacttttctcatgcaaataccagagcctctgacgtttctgtggactatggattcccactcaagaatcttagcattttctctttttttcttattttatacatactcgactcgccaactaaattgcaaagcatcaacaagacaaatccaattttcttctctcaaaccgattcagaggggtaagcagagaccaccacagtgtttaaaaattagaatcactgattagttccttacatttgtcttgcacaagaatttctgctatacaacgctagctgggagaaaataagaaatggggggagagaatgaatggccaacagcaatgtttcaggtataaataatttattaacagtactccaaatttaatgaaatagcaatattttaagactttgttcatagttaaaatatagacaccacattatcgaaacatgaagcaaatatgtcattgaaaagagtgagaggtataatgcttgcccaaacagatcagatgggtcatttaccctacatattctatgcttatcttgcttacttactgtctctctgtgaatgatggtgtttgtttcaggtaatttagccccagtaggcaggctttcttcacgaagagaagaaataatgtcttagtaagaagacagcgcacacatgcatagtttctacatatacttgcctatatttataggcaaaatacctcaattaaagtaagagttacaagaaacaccattctctaaatctaatgaataactcgggttttttttgtttgtttgtttctgtttttgagagtgttgctctgtaaccaagtctagagcacaatggtgtgatcatggctcaatgcagcctggagttcccagactcatgtgacctcccacctcagccatcccagtagctgggactacatgtgccaccatgcctggctaattgttttaacttttttttgtagaggtggagtctcactatgttgcccaaactggtctcaaactcatgggctcgagtgatcctcccacctaggcctcccaaagtgctgggattacaggtgtgagctacattgcctggccattaataactcttgttacacaaaactaataaccttaatgacttttttttgcacaaaactaatgctttactccttaaaacctggagcattttttttttttacttcaaagattgtgttgcctcagaaccaattcacaagagaggcaatgattatctccttaaagtgtggtctcatgaacaaccagctactcttgacttctttatggagaggccttccttgatctccaaagctgctggaatgtcctgagtggttccgaactgcctaattttccccagagaggcacaaaagatcctgcgtctaccactgctctcaactcgctcaaagccagtggcctcctttttacatccaagccacccttttacttattttgaaactcaaaggaagtagattataaacaaggtggcatagatttgttcacagggctatatttcaggaactataattatttgtgtggccttcaggtcagactttttgcttttacagctctaaaatgttatttgtttaaatcccagccctaaaatatttaatataaactattaaaacaccatttgcatgaccaacttattcttcactgaatctcggctcataaaaaggttcattcatgttaaaaagctatttttaaatgcggctaactcattgcttagaatatgctaacaattaagcattatacttcactggaatttttatagtttaaaattatatttctcccatctcatttcctcccccaccaattctgccatcccaaatagcaacattattttaaactttgctgttttctatgacaataacctcattcactggtcattcagaaataatgtccttctgaagatgctggcaactgactttcacactcagttatatgtcaggttttggctacctaaagatgtatgagcacatcatgccaaggcccaagagaagttcctccagctgaaatcaagggaataggttgcgcccttgaggaaccagcgtcccctctatggagccattcacaggctgtgctggtaaggccttgttctctcatcccattaccccgttcggcgggggtgacagtgacagcaagcatcacacacgctagtgagaaaggacccatgcccggttgccactgtgaccatttactactcaagtagagcacaaggtttaaacaatgctctcaaaaattacagcctagagttattgaaaaagctgagtccccacagatagactcgaagctgcaaaatgcagtaagtggtgtacataaaaagtgtccaatccaacaagctgtaggtcaagcttgcaagattctggagatggatggcaagtgaaaacatgtgaagccaacaggcccactcttgattttgacacgtggatattttcacacccatgagatggatctgaagcttaatacagaattgtaatgcgaaaagcaacacgtgaacaaaataaatggacacataacagcagcgtaaatgccaggcctgagttaagctcctggtaatataacacccggggtttgggcttttccgtgcccatttcctcttgtgagtttaaggcacattactaaaatgatctcattaatcctcacaacacctgatgaggggagtaggcaacaaatattttaatctcccatataagatggaaaaaacaaatcaccaatgtgctgtataacttttcccaggattacagctagcactcagtcagagaaaacagtcgacttgaatctcagtaaagagttgactataccaggctatttgaaagaaaatgctgctcactaagatggatttcttaattaagcagctgtataccacatacattccaggtggactgccattccacttctcacagagtttccacacctatactaggctgtcaaacagagtcatttttcaggccaggtgcggtggctcaggcctgtaattccagcactttgggaggccgaggcaggtgaatcacttgaggtcagcagttcaagaacagcctggccaacactgcgaaatccccatctctactaaaaatacaaaaattagctgggtgtggtggtgcacgcctgtaatcccaactactcgcaaggctgaggtaggagaattacttgaacctgggaggtggaggttgcagtgagctgagattgcaccactgaactccggcctgggcaacagagagagactgtcttaaaaaaaaaaaaaaaaaccaaaaaacacaaatagagtcatttttaaaaatacttccctagacctcctggcttccagttatgccctacaactgttcttctcaaacaggggactcctcagatccccagggtcacaaaccagtgtgccccaggaggacgcaacgtttccggaccaacgggcacatcttcttggggctcaatttgaatagatggtcatttaaaatctgattttgatatttaaatatatttttaaatgaaatgcaaaattggcataaaattttcaaattagtcttaaaataaatgatacctaaaagcatgctgctttaggagatactcacaagcaaggcttgggtagggggagaagggatggtaggtgcactttgctattaagtgtagttcagggaaaacatgtccaaaaacagaacaaagcaacttaagaggaaaaacaattccaatctgcttgcctggtccaaaccattccaggcagacaggaacatttcctgccataaaagcttttacttggctttcttttcacgtgggctgtaagacctatcagcatggaatcccacttaggattttcttttttctttatttattttttttttttgagacggagtttcactctcgttgcccaggctggagtgcaatggcatgatcttggctcacggcaacccctgcctcccaggttcaagtgattctcccgcttctgcctcccgaatagctgggattacaggtgtgcaccaccatgcccggctaattttgtatttttagtagagacggggcttctccatgctggtcaggctggtctcaaactcccgatctaaggtgatccactcccaaagtgctgggattacaggcgtgagccaccgcgcctggccaggattttctattaaaaaatcttaagattactagtagtaaaatgctatttccatattaaacctgacaacatcaaagctacctattgactcacttaactatttccagaaagcccagcagataccagacttgccctgctgaaggcctttatgagctggtccacaaaacatcttagaacctttgaccatcagggtagggttctctttactatttcaaccagaaaattagaaaatcaaggaaaggcaaatgacctcagatgttggtaggaggaattcctttatatttactaaaaatatctactagctgccaaaagagtcacatgataaagttggtaaccagaaatggaggcatgtgaaagatacacacaggttatcaggaaaatcaggtgacggaagatacaggcttctcccaacacagactttttccaagtgctcagaattagaattgggtatcgagggcccattcacatattcctgggagctgcgaggagaattgcttccaatatccaagttctacaaaaggctagcaaaagatccaaacctaaaccaccaaaaccagactggtaactgctttgaggaactcactgagcactctgaccacagcagacattcatctcaagctcctcacggtggctccagatttataaacagaaatttatgtccacatttctatagttcctgaaattgccagagaaggaaattctgcacacgcacacaaaactgtgcaccacttcagggcagccactggcttcaattaagaaaaccttatgtttctacccaacatctgagattctccaactcagaaaacctccctgcaagtccaattctgactcatcaggattctctgacactgaggcaaagtttacaggagaccataaacttttcaagaagactttaaactttattttaaaagcagaatgtgtatatctaaatcaattgtcctcgttcaaatggtcaccttagaaaaccacacacgttatttcaaggaatcctgagcaaatcatttggaattcctattctgaaagaaccttcgacgccagttttcacatcacacgatgcacgcttctttatagacatctcaagactaaagaaaaactatttcccagcttgctgtcacctagcttgcagagcatactttaaaatgttgtggcctgggccaggtgtggtggctcacgcctgtaatcccagcactttgggagaccgaggcaggcagatcacgaggtcaggagtttgagaccagcctgaccaacatggtgaaaccccgtctctaataaaaatacaaaaaattagctgggtgtggtggcatgtgcctgtaatcccagctactcaggaggctgaggcagaagaatcgcttgaacccaggaggtggaggttgcagtgagccgagatcgcgccactgcactgcagcctgcgtgacagagcaaaaaaaaaatgtctccaaaaaaaaaaaaaaaaaaaaaaactccacccacaaaaatataaaggcccaacaccactggggatacgtttttaaaatgcagtgggggatatgaagacaattccaaagaaaaaagatttagtagcatgtattgagttattataacatcacagaaataagtatatagccttccaaagtgtctactatgaaaaggaaaatattcttttaaatctttaaattacaacataaaacatattaacttaataaacatttcttgaggggaaggaggtaatattcagaaatgccttccagaatgacttaccttactggaatctactttaataacagctgtaaagtgcgaagcagtcacatcataaccatacattctcttaaaaatccctctcccacaaatattcgttgacaaagtgtcctacaaagcacatattgtcttaattcaaacctgaaaataagacatctaaatttcgatgcaacagcagccagcaataaaatgactataacattagcttcacgttcaattgcatagaaatcaacggtacaccataaatttgtgttaataaccagaaaagttctgggtgacaggggactctgtaatgacagacaatgtatgcatgttttaggccttgttaaaaaaattatgttataccaacaactttttattagtggccatttctaaagagaggtcatataccttctttgtttagcaaaataatttaagactacattaatgaaatgcccttgatcttttgaatgttcatctttaggtaaattcagtattcaaattactatatgggatgtttcataactattagccttggctatcttactccacagacctgaattcctgtaaacatacctgtaagttaaagtaaacccaaggatctttcaaagtccaaaaattctagtcacgaggagcaaatatttaggaggaaataatagttccatcattatgggtctgtagacacaacagatacatgttctccatataaatatttaaaaaaaaatctccccacaagggattttttaaaacagtgcgcaaaatacctatagctttaagaattttaaaagtttatgtatattcctgcttgcacagtaaaattaataaacactatctagttttttgaagaaagaaagaaacgctaggtaaaaggaaaaacaagaaacaacctcggccaggtgcgggctcacacctgtaatcccagcactttgggaggccaagttgggcggatcacgaggtcaggagatcgagaccatcctggctaacacggtgaaaccccatctctactaaaaatacaaaaaattagccgggcgtggtggcgggcacctgtagtcccagctactcaggaggctgaggcaggagaatggcatgaacccgggaggcggagcttgcagtgagccgagatcgcaccactgcactccagcctgggcgacagagcaagactctgcctcaaaaaaaaaaaaaaaaaaaaaaaacaaagaaaagaaaagaaacaacctcatttcccccaatatatctaattaccggcaaaccaacattccttattttcttttatttgcaattcgatgaattccctaaaggtctggaaaaacttcagcatttctaattagactgtaatttttctaccagacaatcagacatagtttcacctttatacaacttcccatgtcctaaatgccaacatcctggcatgctccccgtccatcttccttctcttaacagcacctgttttgaaaaggtgaaaacatttagtctttcctagaattgtcctctgaaaatcaatcagttaaagatgagaggtctggatgcggtggttcgtgcctataatcccagcactttgggaggtgaaggtgggaggaacatatgaggttaggacttcgagaccagcctgaccaacatggtgaaaccctgtctctactaaaaatacagaaattagctgggcgtggcggtgtgcacctgtagtaccaactacttgggaggctgtagtcccaactacttgggaggctgagacaggagaatcactagaacccaggaggcggaggttacagtgagccgagatcacaccactgcactccaccctaagtaaaagagcgagactctgtctcaagaaaaaaaaaaaaagacaaaaaattcctaactgccacataaatagcaattatccaccccagggaatgcattccttaatgagaccatgcagacctcacatgtgcttaggcaggaatgaaaaaaccccagaatcctaggccacaagtttaaaacagtcaaataaggaccttcctatgtagattacaaattaaaaacaaaatggactcaagttagtttaggtagaaaaggtgtgtgtttactggcaaggtttggggaagctccctgtctctgggagggccggacacccaggctcaggcgggaacaagcagggcaaagctcagccaaggtcctgccacaccacaggctgaccgagtcactgcagccaccacggcctcccctcagtggacagtcccctcccatgcgcctgggctctggaccctgaatactgtcatgaggacaataccccatcaactggcctagctggccccaagagtcttcacaaacagaaccactctcctgagaaaataccagaatgggtggggctgattgtgctcagatcacaggcccaatctgatggccagaggtaggggaatgaggctgcagcccccgggcttcagcacaaggagtttgagtcccgcctcacatctgcctttgagtccctcaaaaaggaaggggacctggcacataaaaagataattctgccatggagggatgtggaaaataggattcggagggtcccttcctgttctaaaatactataaacaggccaggtgcagtggctcacacctgtaatctcagcactttgggaggccaaggcaggtggatcacttgaggtcaggagttcaagatcggcctggccaacacagtgaaaccccgcctctactaaaaatataaaaattagctgggcatggtggcgggtgcctataatcccagctcctcaggaggctgaggtaggagaatcgcttgagcctgggaggcagaggttgcagtgagccgagatcacgccacagcacaccagcctggacaacacagcaagactgtcaaaaaaaataaaaataaacaaaatactataaagagtcagatgaagatttaatgcctatcatcctaaacagaaaagaaaggtatgactcttactaattcaaataataaggaatgaatagcctatttcctcaatctattttcatagagtatgatctgatgaaagctattcattaaaacaaaccaaatagagtgtccttctgtcaactaggctcctactttatttatgtacttccagatccatttgtctaatttccacttgtgaaaagcaaatggaattgattttctgcaatgatactaaatacaacgctgttataatgttcagaacaggtaacaggaggggagcagggagtctgtaagagactgccaggtgcaggaataacaaacagacagatgtgatcaaagagcagcagttatcacagggtcagattttgactcaacatagctaattcctgggaacatttgaaggaatccaaccccggaacaagtttcacaacaaaacagtacctccaccaatggaggcagccactgctaggaagagagcaatgtgctgaatgtgttccccccaaattcatacattaaaaccctaatcccagtatgatggtatctggaggtagggtcttcataaggtaattaggtcataagggtggagccctcatcaatgggatcagtgccttcataaaaataggccagaaaactaggtaactctgtttacaccatgtaaggacacatgtaaaccagaaagaggacactcaccaaggattctaatctcaaacttccagcctccaggactgtgagacacaaatgtttgttgtttaagctacgctgtgtatgataatttgctacagcagctcaaactaagacacacagcatggaaagcatcactgggcaagtaggtaggctggctgggccacccttcaaaggtcctgtccaacgaggttttaaaaaaatgattttctagattctgaaacaaataaaagctgaaattaacaagacaaaacttcgaatttggacaaaaataacagacccaatataggataatgtagacctgagtcttgggggtttattcgatggactacctcacacaatctgcgattccactgtaagggcagtgtccggcacccaaaatgcttggaccatctgggggttctgagttcatctccaggtttcccattttgaaaagaacactgacacgtgaaagtattgagacaagggtgacaatgatgaagaggcaactgaaaaccccctcaagatggggatgatgacataagaaaagaaaagggatctagatttgtctgcttaggctgctataacaagacagaagactgagtggcttaagcaacagacatttttctcaaagttctgaaggctggaagtccaagagcatggtgccatctgggttggattctggtggcggccctcttactggcttggagacagccaccttcttgctcttgtcctcagatggtctttcctgtgtgtatacactctggtgtctcttcctcttcttggaagaacaccagtcctactggattaggggcccatccttatgaccccatttaaccttaactacctcctcaaatgccctacctccaaatacagtcagcacactatgggttagaacttgaacatgtgaattttagggagatacaagtcagttcataacaggactcaatcctaagtatatgaaaggccatatctgaaaaggataccaattggatctctattgctctagatggcagaattagacatgaagtgggagtattagagttggactagatgaagtttaagcttctttcattctgctgttattattaaactatagaatatgagttactaaggacttactatgaaccaaactttgtgctgatcaaatctttctgtccattctgaggtcgatactgctattatgaccatttactgttctttacaaatggaggcctgctcttgcacagtgtcacattgctgttaagtagcaggacaggatcccagaccatcacactccaaagccacccaatctagcttttaaccattgagtagcctacaatacaaatgataaaataactccatttaccaatagaaaatcacacagaagaaaacgaaaatactaataaccatattaccaccatcatttatttttctatgtaccagttctctccatagattgtcagagttaatcttcacttcaagccaaggtaggcattattatgcccatgttacagataaagaaaaaggctcaaaaagccttcctcaaactcagacagtgactaaaaacatgtggggaacaggattcaaaccaacctctgagttatttcaaatgcaaatcttttatgtcaattacaatgcactccaactaggctctgacttggctcaggccctgggatctgatagacttcaaaatcctctgaaactgacatttcccagggagggccacatagaatgcagacactgcctttaagagagaaaaagacgcaaggagagcaaattctatgaaatgaaatcaggctttccactaccaaatcctgtgccattcggcaagaactcagggagccccactacgcgctagtcccagggaacacacagagcaacaagcaaaaggaaaccccactcccctggaccctacattctagtgcagggagactgaaggaaccaacctccaatataacacatcaagtcaaaaaaaaaaaacaaaaaacagtgaaggggcaggggaacaggggtggagggttgagtgctgtttcagaatcaatgatcaggctgggcttgggtttaaactgctgcaaaggagcacagaagacctgctagctatacatccagcaggtcctgcagtcttgactacagcctggtatttccttgcttttcactggaggaaagggtggaccgcagtgctaattacaaacaggtcaaagggaaaaaaaaatacaaaatctttttccttgaccagaagggaagcagttaccatgcactgttgccatggcattggagaaagagaaaaagcgacattctaagtaccagagtatgaaaagaaacacaacagtgaggaaaggacaagaggctggcagaggtttcactccctgcagtgctgaggcctgctgggtggcaggtgggaagcaaagctttcaaaagggacaagggttggaagggtggggaagaggaaaagctcagagctattaaggaaaaggtctctgcctagtccccccgttttctacatccctaatatatcagggtacttaataaaatagttgcagaaaaataaaaataaaagaacaccaagtttctgaaatgcacagaataattctagataaacattttctgaaattttttttttttttttttttgccaatatgtaccataggcttcagccagctaacttactactgatgtgattctgtatggctcaggagtagaaggctataattggtgggatggaaggcatatgctaaaagtcacgcagaagagcgtttgtagccgatttctgccatttacaactatggaactagagataagtcacttggcttacccaagtccctcattctttatccataagattaaaatagaaagagtaaaagagataacaagtataaaggttgacttatgatagtaaattaataaacattcattcctttcctgcaacagttccagtatcttttgctctaataccatcagtgttgggaaggttcattccactgttagataactgattttacaaaattttaaaaattgcacatatagtcaaaatccttcttaaggcatgaacaggcaattcacaaaggaagaaatactaactgcaaataaacatatggaaaatgtctcaatgctaactcataaaaaaaaatacacattggccaagagttttaaaaataatattatgtaatatcattggttattgagaaataggcaccctgacataccctgatggtcaacctacttttatcattcttctagagagacagaaaatacgaatcaatgccttaaaaatgtatattcccttccatccaccatttacacttctaagaaatttccagagaaaataataaatggatgctcttgacagcattgtaatgaaaaactgtaagcaacaaaagtcccaccattcacataaactataatatcaccataaaatgtaaaatacagtcattaaaatgcttatactagaaagacatttgcaatgcataggagaattcaaaatctaatttctttattttacagagagcttataaaaattattaaaaataaaactatccaataaaaccacgaagacagttcacaaaaaaagaaatacaaatgcccaataaagatacattgtataaccttattattaaataaattacaaattacattgaaatactatttttcaccaattaaaaattgtagcatctgtgatacccaggactagaaaggtacagtgacacaggcaatttcatacccttgtggtaggagtatatgtggacattactaatgtttaccaataccaaggctttctccatctctgacccccttgaagctgggaatatgtagttagcagtagccaagttccaaaagggtccaaatcacagatttcacttactacatgacacaagaactatttaacctcattatgtcttaatgtcttcaaaggtaaaacagggataataacaataatctacctcatagggatattttgagaattcaagcatagtgcatggcacgcagtattactaataataatataaatcacagatcgtactatgtagcaggcactgttctatgcatttatccatagtagctgattttatcactcaataaacagtaccattagtatgacaatattgccgcattgcttgtaattgcaaatatctgaaaacaatcaaattgtccatcaatagttaaggggacagttaaaccaaagtatacaaaggacgtatatgtggctgttatagagaatgaggtagttctgtacatgctgatagagaaagattttttaaaaaatagagaaagactattgtttgactttgtttttaaagtctaacggtatgagtgtggttaagaaatggtgggtggatcatctgaggtcaggagttggagaccaggctggccaacatggtgaaaccccatttctactaaaaatacaaaaattagccaggtgtgctggtacatgcctgtaatcccagctacttgggaggctgaggcaggagaatcgcttgaacacagaaggcggaggttgcagtgagctgagactgcaccactgcactctagcctgggcaacagaacaacaccctatctcaaaaaaaaaaaaaaaaaaaaattgggttcttgagccagactatctgagctcatttcctactagctgtatggctttgggaattaaacacttagcctcagtatcctcatctgtaaaacaggattaataatagcaactacttctgatggcttttgtggggattaaaggagctaacagataaaacagtccccctggcatatagtcagcagccaactaatgttatttgctttattactaatcattttaacatgtcacatggactgagagataatgggcctttttattttctttatgcttatctgtatttaaaaagatagagagatttgtcttttgaaaatacaaaattgtattctgatatgagagatgtatagaacatgtcatatgagaaatgttagtaaaaaacagtatatacagcccaaagtcatttttattaaaatatatttaatgttatgtaaataagtgtacattaaaaatttagacatgcactaaaatattaccagtggtctctctgggagatggattataaattatttatattttcttctttttacttatccctattttctgattttcctaaaatcaacacacattacttatgcaataagattttaactgtcgtaatttatttccaagcatagaagtcacaaaggaagaggttaaactgagaggcttccaatgatgtaaccagagatggacttttgagcaaaaacaagtgaacaatacatgatttactgagaacccatacgttcgatatcatgacgctagcaaggaaaacagcaattgatcatcagtacctaagactgccattctccattgggccaggctcccacctgactttagggaggaatttgaaagccagaatctcgccccaggtaaatgcaataggagccaaagcaggtaacacagctcagagctgaagtttgctgaaaaggccagagggcactgcctgcaaggctaaaagcaacactgcacgtccacacgctgggtttcaacacttttttcacagcagcaaatccataacggactctgagtgaactgggaaagaataactaaaacattcaaaatacttccagaaaatcattttgcatgatgacttctcttactatgtccagctctgagtaagcaaggaaggtcacaggattttgttcagatttggaagtagaaagggaaacgtgaggttatactcaggaaatccttttgctaagattcaaaaaatctgaaaattaacaaattctaaaacatgcacctttcaatttgcccctcctctccttaacatctctccataacctgagatggctacatctatggttggactggactagaggcaataaacacagacacagtaacctcaacatggggtttacagcgcaggaatgaggaggagccagtggcaggtatagaatgttcccacacctcaaccactgccaggctccgcagctcactgatgcagcagacactgcttcagagcactgctttattggtaccacttctgagaagcagcaaagcagacatacgtctttctctatcatcttctctgtctctcaatccctctcaatgacaatgactcattctctctttcaacctctctcccttcctctctcctaccctctaccctcattcccacccccttatcactacactaaggccagcaagaagccacaaccacagaagagcttccaggcagcagtgaagcagttcagtctcaaagaaagccagacaggagtccagatgcctgtgttccttctggagttcgctatatgacctcactataatccctttaccactgtgggcttattttctcatctggaggacgaatgggtaagaagagacttctgaggtctttttcctgctttaaaattctgtgatttcacaataactgaatacagtcactaaacgggaaaccaccaagacactggggggcggccagcacatagccatctttgttgtatttttcattgcaggcttccaaaatgtctgttgccaagaagtatatccaactagaccctcggcccatgttttaatttttatacactgtaattaaaagcagaatgacttgctttcactttggattatgtaatttctttctattcataatgagcagctcttacatgatgccaagtgagttttctcttagggagcacattcttactcaaccagagaactgttggcatttggattaatagaatcaatagtatctttcattccaaaaccagaaattgctgttttgatatggtctgcccacagttcttccaaggaaaatatttttattattttactactaatatctccttacagcttatacatgagtgaagcatttatttttatattaaataaatcatgctctttaaaataaaaatgaatatattcttcttgttagagctcggagttgaggccagtgactggccaatgaactcacaagtgtagacagggtgttacgcaagggacaagtttttcactaacaccacaagagtctctggcccaatgagaggagtttaatagaaattcttgctacaactaaaagaaagaaaagaacaaataaaagaatatactctcctactgtaaaatctacttaagaaaaagtaggttatcaggtctttattgcagaaagtggtttttatttcttctctgctgtggaaacaaacctccaaatcattgaaaggtggaacagtatccttctacagaaatcagatttaatcttgacagaattaaataagaatcactcattatacactgatctatgttttggcaattatacactgatctatgttttagcagatattatggaaaactcaaaggtgtaacaggttctctgccctgcaaagagtttacaatctcatatggaaatcaaatgtacacacatgataaatgctacttaaagacctactgtctgccaaacactatggaaggcacgaggtatgtgagtgagactccacctctgccaaaaagttcctcacaagctggtgagaaagccagacctgagtaacccagacagtgctaatctcccaggatcacctccgctgcacttagagtgggaagtccagtggctttcctaagaatgtggtggcttccagggtagacagacagggaaggagatggaggtagcttatcttatggtcacctcttgtcatttctcatctcctggaggtattccctctctgtcaagtgaaagtagcacctagttgggttggttggttggttcgttggttggttggttggttgggttttatcagtctgacaatcttttatcttttaattggtacatttagaacatacacatttaatataattacaaatacattagggtttacatctaccatcttatttgtgctattcatctcatctattttatccttctctcctttcttgcctctttttgacttagttttgtttttatttttccctctctccctccacacacgctcaagtttagatgctatatgctgcttttgggctttcattatcctagaaattacaataaacatatccaactgatcaaagtgtaaagttaatcagttatttgacgcttctgcctgatcttaaaacacctgaatactatttacacccttcaccatccccactcctaattcggaacactgagtgcttccgccacagtgaacctctttcagttccctgaactcttttcacagcttctgatcgctggtcttcgcacttagctactcccccaactggaataccaccctcttctcctcacaccctcttcccaacctggctaaatcttttacacctctcaggtcctagtttcagagttatttgcaccctggctcccctgtccctgctcccctcccccgtgagtttccctttgttatgtctgtcttccctcctagacattaagttaaaacagtcaatgactgctgggcacctaggctgtaacataagggtccaccaggacactgctagccctcagcaccacataatggatactcaataaatatttgttgaatgaacagatgaatgaaatatagtggtttcaagacatgtaaaaatcaggaaagacgcaagaaaagtcacaggtcaccccccaacacacatacaaaaaaagtccactcattattgaagcagaaagactactatggtgatttaaagagtgcaggctccagtgccagactaaatgaattgaagcccagattctatcacttactagtgggtgaccttggataaggtactcaacatccctgtgtctttggaaaatagagataaccataaaacaaactcatcaggttgttataaggaacaagtaagctagcacttgaaaagtatttagaagacttcctgttaagattctgtatatacaggcatactctggagattgtgtgggttcaattccagaccacaacaatacagtgaatatcacaataaagcaaacatcacaataaagtgaatcactccagtgattcactgtgaatataaaagttgttgacactatactgcagtctattaactgtggaagagcattctgtctaaaaagaaaacaatgtcaatgtacacatcttgattaaaaaatactttattgctaaaaaaaatactgacaatcatctgaggcttcagtaagttgtaatctttttgctgatggaaggtctttcctcattactgatggctgctgactgatcagggtggtagctgctgaaggctgaggtggctgtggcaacttaaaaaataagacaaaaatgaagtttgtcacatcaatggtctcttaagacaaaagatttctctgtagcatacaatgttgtttgacagcatcttacccacagtagagcttctttcaaatctgaagtcaatcctctcaaaccctacactactttatcaactaagtttatggaatattctaaatcctttgttatcatctgaacaatgttcacagcatcttcaccaggagtaaatcccatctcaagaaaccactttgtttgttcattcataagaagctactcctcatccactaatggtgcatcctggaattgtagtaattcagtcatatcatcaggctccatttttaattctagttctcttgctatttccatcaaatctgtagctactttctccactgcagtcttgaactcacccctaaagttatccatgagggttggaatcaacttcttctaaactcctgttcatgttagtattttgatgtcctccaatgaatcacaaatgttcttaatggcatctagaatggtgaattcttttcagaaggctttcaattgactttgcccacatccatcagataaattactatctatagcagctacagacttatgaaatatatttcttaaataataagactcaaaagtcaaaattactccttgagtcattggttgcagaatgaatgctgagttaacaggcatgaaaacaacatacatctccttgtagatttacataagcgctcttgggtgactaggtgcatggctgaagagcagtgatattctgaaataaatattcttctaagcagcaggcctcaacagttggcttcaaatattcagtaaaccatgctgctaatagacgtcctgtcatacaggcttggtagttacatttatagagcacaagtagagtagatctagcataattctgaagggccctaggatttttagaatggtaaatgagcaatggcttcaacttcaagtcaccagctgcattagcccctaacaagagtcagcctgtcttttgaagctttgaagccaggcattgacttctctgtagctatgtaagttccagacggcatcttttcccaatagaaggctgttttgtctacattgaaactgtgatgtttagcatagcctcagtcatcaatggtcttagctagatcttctgaataacttgatgcagcttctacatgagcaattgctgcttcacctttatgttataaagatggcctccttccttaaaccttatgaaccaatgtctgctagcttccaatttttcttctgcagcttccttacctctacctctctcagccaagaattggaggcttgctctgaattaggttttgttttacgtgaatgttgtagtgatttgatcttccattcagatgactcagatttgctccatatcagcaataaggcttctgctttcttatctttcacatattcactgaagaagcactttgaatttccttccagaacttttcttttatatccacaacttggctaactgttggtgcaagagacctagcttttggcctggcttcaacacgcccttctcactaagcttaatcatttatttgatttcaagtgaaaaacatgcaactgttccttccacgtgaacacttagaggccattatatagttatgaattggattaatttcatattgttgtgtctcagggaatagcgggacaggggaaggaccagtcgtggagcagccaaaacatacgacaatttttaagttctccatcttacatggacacagttcttggtgtcccaaagcaattacaagagtaacatcaaaaatcactgactggtgcagtggctcatgcctgtaatcctaccattttgggacgctgaggcaagaggattgcttgagtccaggagctggagactagccagggcaacatagccagacgccgtctctacaaaaaaaaaaatgttttaaccggctggatatggtggcatgtgctgtagtcccagctactaaggaggctgagacaggaggatcatctgagcccaaaaaagttcaagattgcagtgaaatatgattgtgctaccatactccagcctgggcaacaaagtgagacactatctcattatttaaaaaaaaaaaaaaaaaatcactgatcgcagatcataacaataggtataataataataatgagaaagtttaaaatatcgcaagaattacaaaaaggtgacagagagacacaaagtgagcacagtgggaaaatgatgctgaaagacttgctccacacaaagttgccacaacccttcaattaaaataataataataataataataataatatctacaaagcacaataaaacaagctatgcctacatgtttacaatagagctgactctctagttgttaaaccacataactgaactacacaattctcaacagatccttacttaaagcccaggtattcatacattaaaatgatcctaacataatgtctttacattatggtacaaatttatagcccatgaagacaacatcactgcattaaaatatttgaaaacaatcaaccagaattattttaaaaagttaaacagtattaagtgcatacattaaaaataccaaaaaaatggggcagtaatacattttttaaagaatgctctcaaaaaatgttatcaaagaaactatttgagcatttgaaggaacaactttcagtttttaaaatgaggccacaatataattttgtgaattttgtagtcttaccaaattgtattataattccttaattgtagctacaaaaatgttgaggtttttaaattttttcacatttgaaattttccaaataataaaagtaaatattcactattatcccataagacagacaaaaaagatcatacttctgccaacctgactgtggggtagtacggccaagctgcagtgcacaaggcaaagaccttggaggctgtgaaggcagccagtttcccctcatagatccaccaacttaaccagctcaatgtcaccaggaaatggtcctaaccctgacccatcacgcttcgcttttttgttttggcggtggggggacagagtctcactctgttgcccaggctggagtacggtagcgtcatcttggatcactacaacctctgccctccaggttcaagcgattctcgtgtctcagtctccggagtagctgggattgcaggtgcccgccaccacacccggctaatttttatatttttagtggagatggggtttcgccatgttggccaggttggtctcgaattcctgagctcaaatgatctgcccgccttgacctcccaaagtgctgggattacaggcgtgagtcaccgcgcccggtcatcctttgcttttatagagtggagggctgccctgtctttacctggttctggaactgaaacactatacctcctgtaaaattatgagcctttggagtctcattaaaatgaacaaacacaagcacagaggtctgcatatagaatatctggggccctaaattccctaatacttaagaatacaatcactgtcctattgtgtttcttgcttatttatcctaataggaaggcaccaggaattccctagttaagagatgatataaaacatattttgaatgaaagctgcaataaagctacaaactatgatttggggtctttgcttaagtctgagatacttggggactttatcatgaaacattagtttacttgtcttttgtcaagagtaattgcctaaacttgaatagaaatatgagctttttcagttaaacatactcctaaaaatagcattttcttctgggatttgactactaaaagcaggcatttcaatgaagtcaatggcacttatcagtaaaaaatcattttttaagttgtaatgagatcttttctttctaaatattaaaatattagaatgatgtatttcattttcctagaagccaaataaatatttcctatttagtttggacattcatggatactttttttaatggatactttctaactctaaattaatagtattatattataattacattttattattatagtttgctgtcaatatcctacctcactttgttactcaaagttctatttaaagaccaagattacagttgtatctaaaattcctaggtcacaaaatgtagggtagcacagcagtagaaccttaaaatacacattggataatgatgtaacaaaacctcattaacttagattaattgtgcaaggtcaaaatgaatttaggagttttatcttaaaaagaaaataattttgatgctttcacatacagagaataactgaaattggattaacagtagaggtccctggagaaactgcattaatgaatagatataaatgactgtcattagaacttcagttatcaagttttcaaaggcacataaattgttttcgccccttggtgttaagtttttcacttgtttttgttagtgcttttattttgcctttactgtcaaatactgggtacctcatatgagttgcactgtgtttctgatttaattcccagaacacgcttgcaaggttggtattattaccccattttgtatccgaaagatacactcaaggatcagggaattcagtaaggtctctctggctttttctgcttcactacacattctcaggaagtccataagctctttcttgagataaaatggtctcagcaaaaaaaaaaaaaaagttcaatgtttgaaaaaaaaaatctcacaagcattttattaatggtgctgtatttccttatccggtcagcagatatattactatggctctttttgaagagttagacacttcacttatcgctgaatgcccctaaagtattctttaaacccaacgggctaacgtagccatttgcaaactgggtacaaaagagagtactccattaagggaagaccaagatgaggcagaacaaagagccagcagtgggcagataaggaacttcttcccacgcctaatccatgaggacttgaggaaaaaaatcaactcacttttctggacctcacacaccgtgggcctactttaacccatttatgcttagtgttccattaatggaacgctaagcttgtgggagttatgtatatcctactgctcaaggtcatcgccaaggtctgatcttttcacaaaaaaaatttgcaacctccggcacaaatgggttaatggtgccgtcacagggaggcgaacaacatactatgcataatagtgctttgcaaactatacctaataatttggtaaaacattttcactccacccttttgtttttaaaagatatacaacactcacggtattatttattatgttttagaagaaaattttttgaggtttagcttaaattttaaaactaccaggaaataaatgagatttattttagagaaatttattttcttttttatttttttttttatatatatttttttaagacggagtctcgcactttcgcccaggctagagtgcagtggcgcaatctcggctcactgcaagctctgccttccaggctcacgccattctcctgcctcagcctcccaagtagctggaactacaggcacccgccaccacgcctggctaattttttgtatttttagtagagatggggtttcactgtgttagccaagatggtcttgatctcctgacctcgtgatccacccgcctcggcctcccaaaaatctctgcctgtaatcccagtactttgaaaggacaaggcagaggatcatttgaagccaggagttcaagaccaccctgggcaacacagtgaaaccccatctctacagataatttttaaaagtcagccaggtgtggtggcacgtgctatagtcctagctacataggaggctgaggtgagagaatcacctgagcccaagaggcagcagtgagccgtgactgcatcactgcactccggcctaggcaacagagcaagaccctgtctcaaaaaaaaagaaaaagaaagaaaataataaatccgttttgcaaaatgagctgcaattacataatctaaatctgagtgtacacaaaaaatacaaaacaagggcctaggctttaagtttttcattctttcaacaaatatttacatagtacctaccataagccaagcaccatgctagcaatggggcaataacaccgaacaaaacaaagcccttaattgctagatatacttgaatcccttgcatttaatagtgcttggcacaaagtaagcaccaatgaatgttagaaaaaataaataaataaatacatatatatatatacacatgaataagttaggtgtataaaggagaccagaaagcagcctgtcactagaaaagctgcttgaattgaattctgaatacataaaacatgtgagtcctttgcaaagatttgactaaaagtgccctgataaatctgctccactagaatcgtgtagtaaagggaatgaaaggaaaagcacgaaagccctattcccaaactgcgaataagacactcctgcctctctgttatcttggaaataaaactgtaacagatgaaaatgagacaaacaaatctctaatttaaaaaataaataagcccgcaagtggaaaacctgcttttcatcaatcaaataaatcagggaaggcggcatttctaggccattgcccttgggtctaccacagcacttaggaaatggttttcctaattagtctaatcatcacttctgttctacatggttgtagctgactaattacccaactcaaaaatgctcacccaacccccaatgccaagctcctccagagctctatttccaatcacactacttaagccattgttcacaagaacattaatgacactatcacatgtttaaaaagtgttgatttgaaggtgtggaagagagtccccaaacttggggacttttttaccttagaaacttttaaggaacagaaatatgcaaataagagcagggaaaataactttggtttctgaaattctcttaaccattgttttacaagtctacagcaatggaaaaatgacatggaataaaaagcgtgtgtttgtccgggaatgtaagcgcttgccattttgccatgggggcttcaaagctgactgcaagccagggccgagcccaccatgtgactgtcactgtgttctaataaacagcagcctgcatggtcgggactccaggtaaagataaattgggttccgtaggtattcttttttcagacggcctctattcaattcctccagttttaaaattctcttatgaagaaataaatagcatgccagagatgacaaaggccatgaatgtaaaaacacaaggtagcggggctgagtctcaataaccagtgagcacctcctgtgcactggagctagacactgcacaatgttctagaagccattttttgttctaggacaatttttgaagtggtttcatttgccttattacctcagataggtgttgctgagtgactggacagatttcttctgctttcagtctcttttcatgggtccttcagaatgagttttggaaaggagaaaaacaaaaagagaccagaaggaactgagaagctcaaagcatcaaaggtgaataaatttggtatttggttttatttttaacatgtagaagagcatcaaagaaaaaagaaacacagattttagtcaggaaacaaaaattactcaaaatagcaagtataggttagatgatttaatgagaatactagggattagagaatgtcccagctctattaataaattatcttgggcaaatctccttagttctgaggtctgattacattttctatgctcatagtaccttcttcttacataacttgcatcatctcaaacaaatctaaaaaccaacaacaataaatatcctaacaaatggcactttttattcctttaagctgcctctcaagagccaccctgcaagtggggtttggatcaacttcccacctgacatatgcccaaccaagtggctattctaatgcctcagcactgtgctagaatcaatggtgaagaaagatgaaatgctgccttatctttgatctaagaagcttatagtctaggtggaaggatgtaacacaaagcaatatccaacaagagtgctacatctcaataaatggcaactccaagaatccccattaattgaggcagaaatctatgtcattcttcctttccttacaccccatcaatcatcaggttctgttgatctacacaaaatgtggctcatttatctttccacttgtctgtatcacagctgccaccatccctgtccaagaaatcttcatctctcacctacaaaagctcactgattaatccctctgcttcctttcttgccctcttcaatccgttcttcacagggcatccagagtgatttttttaaaaggctaaactgcttaaacctcttcagtgaccttccatgttcacaggataaaatccaggtaccctcctttagccgtaaggccctgcatggtctggccctagcttatctttgcaatcccatgccttcattcctaccgctccacccactcttcctcacttggctccgccgcctggccttctctcagttcttcatatgcgacgctcttttctgcccatggccattgtgcttgatattcctctgtacggcatatgcttcctctggccagcgccatttcatctgccagggacatctgctgttcctgcctggccagcaatccttctcctggtaacagaacaccttttttcttcttgaagtcacctttccctcattctcactccatgtggtttggcttaaactggcaacttctcctcatccccacccgggcaatctacaattaccaggatatttctggtaataaggaaacaaattttaattgaaattttttaaaacagaatattttaaagtaattacacaatcagaaaaggttgcctgtgcctatgaataccttctccagaggcctgtcctccacctacctttccatgatctgtaattcccctgatgatcacattcacgaacagatcaaccaagctgcagtgttacactaacagtcatgcagtgatctcagttttgccaaagtgctttcaaataactgaggagtgggggaagcaaaatcctgcctccaaagacagttaaaaggaccagatgatcctcttactctctcctattaacccagataaatttatcagctcagctagctgatacttcagccccaggaaagtgaaatacataactggggtagaagaagctgccggccagagcccaaggaaaatggggcaccagaaacacgggttttacatgggcccaattcagttttacatagggtctctccctcatcccgcgtggagattagcaagtcaaatttaatacttttgaccacacactggtttagatgcagtattgaactaagtcagactgaatttcagtggtaaaaatacacaaacaaaaaattactacagaagtgaacttggctacagagtcataaggtgatgtgtttactctctcggacaataatcttgggcaacagaaaacacacacacacacatacacacacacacacacacatacacacacacacacacacacacacacactcctgaaactccctggggaggtttcacagtacaccacttccctgggtgtcctgtggctagggtcaactgtgacctacaggcagggccttctctgactgcttttattgatagctgaaccaccagaattggtccaaaattggtaatacctgtggaatgagggagggagcatttgtcaatttgggacaccaccaaaacagccagtgacacttaaaaagactaattcatatacatgcaaaacaaacagtgttaattaagttagaggtgtcattttaatgcttgtttcaatgtcaggacctttagacaaaggcattaaagacattttgtctgagctctaaagtaaaaataaattaagggtctgaattagcaccctcaatctagcttcaaaacaacttttatccatgtttaaaatccccttgactaaattatcaaaataatggctgtgcttttattgaatatttacaatgcgccagacatggggctgagcatttcacaatcacgatttcccttaaatcattcaaccctcaaaaacactcctacgtaacaagttttaccctcattgtactaatgaagaaactgaggctcagaaaaactaatacgtttgcccaaaattgaatcatcagtgaaaatgtccatcaaacctaggtcggtcaaattccatcatgaattcataatggtttccaaaccagtctatggtagaacatttttaacaggtttataccctgtttttatgaaaaagtttcaggctttattgtgaattcagttatataactaataaggatcagacctcaaactgcagttaatcccaattgtgtgctgagatcaaaaggtatgtctcattaaatcaaggcaagtgggactatagcttgctgaaactcccagggaatccttttaatttgttagtgatacttaaaaaaaaaaaaaatcttctaatcttctgttcaaaacaatttgatggtttctcatctcacagtaaaagctaatgaccctacagttgtgcttggaagtgtctggcacacacctcaataaatacttgttgaatgaatggataaattcagagagccactatatcctttcttatcctttcaataaaaagatgcacaagtttccagggaaataaaacactaacaataaaagaagttgacgaactgaaagcttttctttaggaaaatcactgaactccaagttcagataagataaccaaaaaggactcaagtgtgccctaattagaacaaatgaacttcaggctacttcattttgttaactctgaagaagattcaacaggacctttaaaaatgtactagaaatgattcagtcttcttcatccatacattagaaaccataattttttttaagtagtggacttgaagtcaacacctgagtacttgtccaactttgtccttaattcattttctttctgtttcctcatttgcaaaatgacatgagactccaagatttctaaggtccgtctgagctctgatattgtattattaatcacaatctccaacttaattgacaaaacaactcaataattatttctatcataaaaataatctgattaaaggacgcaatttattacaaaatcagaaatagacacctcatccaaaggtcaattcctaatttcttgtataatccaaatcttccaaatgcaataatttaatccagaatatctagggagtgacatagcctctgtcccattaaaattggattaaaatccaaaataagaaaatcttgtaaatgtcttttctgtagtcctcagagaaagacagagtgagtgtactccttttgccagagtcagttttctctttagatcatattctttattccaaacacttactggtaactattacgtccactaagtcttctctccttaggttaaagatcacagttctatgacctctcctgacatcacatgattttttcaccactcacatacctgttcactgttaatgtccccctttaaatgtgacacccagaatccaataaaataattctcagagtctcattgtttcagagtatagtggcactgtttctggcacttatttattgatgaagataaaaccaacttgacagcattgctttaacagttaaataagataatgagtgtaaagtcttaacacaaggtttggcagatagtaacctctcaataaatggctactgctgctgtgattgctagtaacaataaattgtaatactatttcatgagtattagagcttatccccccaattcagttgtatgctttagctctcaataacactgaaagtttgccttatacattattagctgtttttccccacatcagggataggtagaaaaaatgctgaggctcaatttaaatcgaagatcaatcagaaaccaagataaagtaactctgaaattaagacttaaattaatggcaaacagggtatgatttatttaaggagttaatttatcctctgttttccagaacaatttgattatatcaaacaatttgattatatcaatataatttgattatatcaatcacttttttcagctaaagagcactatccctcaatcataccatttaaaagatgaagcaaatgtatgtatcactgacatgtgctgagaaggcagtctggcacagagttgaagggagtgagctctggaaccggactgactagagttccgtatcctagatctaccacttacccactgtgtgatctaaggcaaattacttaacctctctggtctcaggcttcacatctataaaatgtgagtcatgacaggacctatctaccttatgaggggcagtaaattatcctaaacaacattgctaaaaatgtattatctggaagtctcagacattttcaatttttataggtcctcatctctgttagccattgctgaagtcaatcaacatgtttgtattctctgcatatttataattatctattttctgaaacatccatttgtttttacggtagattttaagattactgtaaaaaaatccatctttattttaatacttaactaaccatatatgcctcactacagcaaatcatgtgttggtattaacagagaattatgagataaagaaacaaataaaactgtgcttgtcatacctgcagctgctctgcatatacacctgtgctgtctaatacgacagtcacatggggccatttagcacctgaaatatggcagatgtgctgtgagtgtaaaatataggccagatttctaagtacaagcaaagaatataaattatcactaagcttttgtcaaaatgacaatatttcggacacagtaggttaaataaaatatattacctacattacttccattgatttctttttacttttttttaatgtggctactagaaaatttaaacttacttgtgaaattctcatcatatttctattgaatagcacccatacagaagatcctaaaaagtatgcctcattaaaatcaggacaagatctatggtctaaagtatagcagaaactaaatgtagaatttacaggaattttcagagttcagataattaatttcaaactcttctccaacccccaccgagacatatccttttataggtactttttaagtaccgcgtccagtctagagccatctaagaagctttcattagccagtggtgactttcaaaggtttattctattttccacaagctgacaaaatttatttataacaaagccaaaggactgctttccagcaagggagctgtttactgaagagatttggccttagcaagtaggaatccagagaatttaaaagctgacaactgaactggcaaattggccccagtactgggactttgcctatagctccaaagcatgtactcagaggtctaggacaaatatggccttgggatgtgaatgagacccagaagtctggccttccctacataatgcaaatgaaacttggcctagtctcttcagctatctaattactaaacaaaactcccagacgccagtagcttttttgcaaagatcaataaaaatgcagagtggaaagcggagatactgaaatgctatcaacaaatgctacaacaatatattgttgttctgagtctgaaagttccagctggaaaaggcccaatgtggcaataatagagaagtagaggaagagcagaagcaaaatctaaggaggaaaaataaaccaggaagtattaccctaagatctctttctactcaaaatgaggtgcaccagtgtattagtctgttctcaggctgctattaaagacatgcccgggactcagtaatttctaaaggaaagaggtttaattgatgcacagctcagcttgactaggaaggcctcacaaccatggaggaaagcaaacggccaaaggcacatcttacatagtggcaggcaagagagcatgtgcaggggaactgccttttataaaaccatcagatctcgtgagacttattcaccatcaatagaaacagcagggaaaaacccacccccatgattcaattacctcccaccaggtccctcccatgacacgtggggattatgggagctacaactcaagaccagatttgggtggggacacagccaaaccatatcagccagcatccgtagcatcacctagtagcttgttaaacatgcagatctcaggccccactccagaactaaagaatcagaatcttcacttcaacaatgtccccaggtgatttccacagtaatgtctgggaaacaactggtcatccacacaagatccaaggacaccggtttctttaaattcttactcttattacccatctgttgccctgtggttgctacctggaaacatggggccttttgtgtttaatgcatgcaatgaacatttagttgactgaataaattcttggaaaatgtgatcttatacatgcttaatggacggtggggaatctgtgcctcagatgagagctaaagaagtcatcagttactgaaaacatgtggacagagtgtacctcagatccatgcatattgcataactattaacagaactagggactccctgaggttgaacaagatgagcagacacaattcatacccaaaagacatttatttaacggctcagacaaaagaaacagttttgatttttgatggagatgggaagataaggactttatgttgaaaaaaatcaacagcattaacaaaaattagtgtttacaacagtaagctagatgatttgggctgttttaaattacaccaaaggtcctttgggaattatgctactacatgaagcatcatatttttttcctctttactgtctttcccattggtattcgaacatgctgttacttcctgcatttttaaaacatctcttgacctcatttctccctgcagctacatttctcacattctctttacagcaaaaatctttgcaatatttttctacatttgatgtttccgtttctctacttctgcgctctcttacatacccactgatcaacatttggtccccactactacactataatcccagttggttatcaacctcagcaatgacatctccattgctaaatccctgggtcaaatctcatttgcccctcattttactttacttcccgggagaatctgactcatcttgcttgaagtggttttttcacatggctggcaagacctcgcactctcgattcccctcattcgctgctttccttcattctcctttattggtgccttctcatctcttcaatctcagtgtggaagcagcccaggttttggccctcaacttcttttcctttctattgacattcgctccctgtggatttcatccagtttgtatattctgacaactctcaaatgttcacctctaacccagccccttcctctgtaatccagataaatatatccacctgcctaccagacagctccctgactgagctcctgatcctttccaaaatcagcttctccctatctcagttaatgcacctccatccttcaagatgcacaggccagtattttgcaagtcacccatgctttctcccactcacatcccacattcagacaatgagaatatccttcccactcaaccttcaaaacataccatggtggtccaagccaccaccctcactcacctaggttacaacagcctcccaactggttttcctacttccactcttccccgcttcagtctattctcatgagacacagcagcagcatgtcctccaagaacatcagccagatcatgtcccatctttatttgaaactctctaacaggcttctctgctcactctcagtccaaaccgaagcccttgcaatagcaacaaggccccacaggacctggcgacggtgtccggtccgaccccactgctcactgtgctccagtcacactggtgtccctgttcctggaaggcaggaagtatggctctgcctcagggctctgcacctgctgtgccctcttcccggtgcacttaccttccttcttcaggtctttcctcatgcgtcacctcaacaaggtcatccttgaccacccatttgtaactgcaactccaccccctcccaaactccctcctctgccttatttttccctgaagggcttcacactgtcaacatactacacacacgcacatgcagacacaactcatacactgtctgtcttaccttgtaagaacaaggatttttttcttttttaatttttattttacttatttttttgtctgttttgttgaccactgtatccctggaacctaaaataatgcctgcctcataggagacactcaaacaccatctgttgaatgaatgtatgaatgaaggaaaagtgactgtgacacagaactgcatatgacctattacagtacgccctgtagccttttaaaagagttgtattttaaataagtcacttggtatgcacatatattcagataccgtggaaaagacaaagctgcgccaatttgataattaaattaaccacatacaaaatctggcccattgtaaagaaaaagctctcttaactgagagatgccctgaaacactccaagggtgctaggctttctcaaaaccctggaccttgcttcaccagagctcatttaaaagatgggtcctgggccgggtgcggtggctcacgcctgtaatcccagcactttgggaggccgaggcgggtggatcacaaggtcgggagattgagaccatcctggctaacacggtgaaaccccgtctctactaaaaatacgaaaaattagctgggtgtggtggcatgcacctgtagtcccagctactcaggaggctgaggcagaagaatcgcttgaacgcgggaggcggaggttgcagtgagccaagatcttgccactgcactccagcccgagcaacagagcgagattccatctccacaaaaacaaaaaacaaaaaaatgggtcccaaaaggtccaccctttctgcaagcaggtgaatgtagccaggctaatataatggactttgatttctttagatgaaagagaaattatgatgcaaagtacaaagcactttatagttatgatacataaattccaggtgtaacccattttcagtgaacttctggactcaagtacaagacagaaaaaaacgtttttgttatactttagtaactcactcactctgtagatggacatggtgggtcccatttttataaaccacatttcttaaaaacctaaaattatcttccaggtgaaaggaaagcaaaataatctcagcaaacattttagatgtagaaataaattattcaggagggaagcagctttgtacacaacataagtgatgtgaggcagacaaatgccaaaagtgattttagaacaaaatggaaagaatgtcctaatgtctctaccttataataacccttttcattccttagaccataacaggtttgcttttgtttctgaagttatgtatacagcagaaattcttaaccaccctccaattaaccaactccaggatgtctcacaaggtgacacaagttacccgggaagacatgctggctgatgcccattcatacctgctgctcacagctggtgacagataaagaaacagaatgaaaaaatcagtacctggcgctcaggctgtggtcttaagactacagcaagctcatgaaattctgcccacatgactgaggtggcgattaccaagaatcagttgtgtttgcacctgaatggatttgtcctggttgtacttgctaccaaaattatgtaacttaaatattatgtaaaacaaacataagcataatgagagagagaggtgtattgctaaatggaatgctttagaaagaagccattaaatggccacaagagaattctactgacaaattttttattttaaaattattttttactaaacagaggcaaaataaaactttacaaaatatttataaaatacaaatattcatgaaggaaatacctctgtatactaactacaccacccaagttttttaaaaaatggaattaccattatctttctaactcccctctgaatcttactgaacttccctctgaatcattacttaatgattttataaatgataatattttctcactgactaatcacagatacatttgttttagtaacgcttctaaaatttcggctttaattcctctaggcctgtcaagttcttttaaatctataaactatattatctttacataagctccagttttagaatatgatattgtattttattagactttctttcccaagcaggacacagcaatatgagaggccaacaactgatatacaagccacaccgagaaggtaggaagaattgcacccaaaatgaaaaaatatgacttggcacagtgactcacacctgtaatcccagcactttgggaggccaaggtgagaggatcacttcaagccagtggtttgagaccagcctgggcaagatggtgggaccccatccctacaaaaagttaaaatacaaaaattagccaggcatgttagtgtgtgcctgtggtcccagctacttgggaggctgaggtgggaggataacttgagcccaggagttcgaggctgcagtgagctagaatcatgcccctgcattccggccttgctgacagagcaaggctctgtctgaaaaaaaaaaaagagagagaaaaaaaacctgatacaatcaaaagaatgaatgaaacagatctctgagactgctacatcacacccggtgaacacagcctaagcctttatctacttctatcagaagtctctgccagaagggaaagagctgggtgaggaaatccatagtaacacattactcttatcttttatgtcctagattgccatttgcaagagagctattaatgaaagtcacacacctgaagctctaaaagcagcccagggaatggggaaaattccctgtctccaaaacaggagatgaagccactgtgaagccaatagcaaaaaagtgatcaggccagaaatcctgctgactcaggaaattctattctgccgttagacgaagctaaatatcagagcacctactctgccgtatattcttaatagggttcctgtacttagctatgtaacagcctatggggtttaactcattcgctaaagaaacatattgaatgaggaccctgggccaaagcaccacatatagtcgtccatcggtaaagtggggcataagtggggattggtcatagatttggggattcaaaggtgctcaaatctcttatacaaagtgatgtaatgagtaagaaggaactaagcgcacacattctctgagcacctgccacgcgcaaacacagtgctaaatgcttccacatgtattatctttttaaaatgacttttttttttagataagatcttgctctgtcacccagactggaatgcagtgatgtgatcacaactcactgcagccttgacctcctaggctcaagcaatcctccctcctcagtcttccaggtagctgggactacaggctcgcaccatcacatctggctaaattttttcttttttgtagaggtggggtctcactatgttgcccaggcccgtagactttatttattagagtagttctaggttcacagtaaaattaagctgaaggtgaggaaattttcgatacacctcctgcccccaacacatgcacagtttcccccattattatcaacccccaccagagcggtacatttgttgcagtcaatgcacctacactgacacactgatcttatttagaccttagttccagcgtctctggaagagtggcagttttctcattggctgaccctattgcctggtctcgctgctcggtgcaaaggcctttagaaattctctgctttgactgactggctaacaagtggagatttgtacccgaagcatcgaatctgtataggaatcaagcacatggaaaaatctttgattcctccagtgtcttggatctcaaggaaagctccagcctcagccttggtggaggcagcagccccgggctcagagaaggaaggtattcagatgacaggattcagacatctcaggatgaccaaagagtatccaaccattcaccaaggagcagaagcttccctatcactgacagacagtacttcctgcggtgtccccagcatcccccagaaactgtggacaaggcacaagaagaagtctgaatatgtgaaagccagcaacagcgcctttgaggccgactaacggtgaccctccccgggtaccctgcactggctgaggttgactagacaaggggagaagggccaggactggagctgagccacactcatttctgctagcagcttggtgcaaacatatcatcctctctcactaactgatcaccctgccttaggacacagaaaaggaacatcccttgaaggcaaaatgaaactgttccttcttagaactgctaaagctgttggccagaaagtgactttgagaggtcataaagtttatatctctatcttcaagcaaaatcacacctacatggaactttcccagcctaaagacctccaaggaaggaaggcgacaactcccccgtcttccttgtgagttgctggtgttctagggtgtgtaactttctggtcttactgtaagagcttgaccctgaggcacttataaacacatggttcttaccgttcctattatcgcatttatttcaccttgatgaggtatactttttaaggaacaagcatatatcaacttagtagttctagtatctactgaagagtaccatcaagattgattgtgatggtcatttggcatgactgcatgaattctttattcttttatgtgcagtttttctatagaaaaacactgaaagttaaaagttgaaaaaaataaaaccatgtagcatttgcacataacatatttacatcttcccatatactttaagtcatctctaggtttcgtataatacctaatacaatgtaaatgctatgtaaatagttgttatactacatgaataaataatgacaagaaacagatgtccatacatgttcagacacaacattcttccacatattttgatctgaggttgattgaatgcatgatgcagaacccatagaaacagagagctaagtgtattagaatttttctcctggcttccataaagcacacctgtaggcaatcacagtctagggtacaagaaagtccagttttgccgtttaataggtgtgtgactttaagaagggcaataataattccagttcccactcagctaagtataacctaccatccaggtcacatttactgcctacttactgtctttccaaaactgtctaagccccttctaaccactaaatgttggtgaggtattccatgaggtaatgatgcagtgaggcacagagatgttaaaataacttgcccaaggtgacacagatagaagcaaatcagactatccaattcaagggcacactccaaccactatgctgcactgcctctggtaacacagaatatcctttaagagaagaacagggccaagtacaatggcacccctgtagttccagctatttgggaggctgagggaggaggattgtttgaggccaggagttgaaggctgcagtgagctatgatggcgcctgggagtagtcactacactccagcctgggcaactgagcaagaccccgtctttaaaaaacaaaaataaagaggtcaggtaagtgagtctccccctcccaacttcacacttctcactctcctgaaattcttcaggagatcctaatcaaccacataaaacaagcaaagtgtagagattatgtaaaatgtttatttttctttccatgcccttttctccccattgagtttcatggagatctgtgtgactatgggaggcctccagagattcagcaatggtaagaaaatatgagcacattttaaaagaggagggaagaaggagggaggattcctcccaagagagtggtggcaactttacaacttgaaaatgtctgtgagcctggcttaaatttttatgacacatctctaccacactggcagggggtggggggttggggacttgggttgtcttggatcaagacccagtgctgaggtaagcaatgtagccagactggcttgatcagctccttgtaatctccctggcgagggatgtttgtcaactggagaccacacccactaaagagaactaattaggttctaggggcaaccactaaggtcatcattattaccaggtgagatcagtttcccaaacattccgatcttaagacttgcatggggtgattaggaagactgctccttcagaaccactgtaccagaatcttcaggcagccctagaaatctgaaaccaggtaattcttgacagacaagtttgggaaacactatttagatcatgacattacagtatctaaaaagatcaagaagggtcttctaggtagggtgtcctcctttcaagcaattctctgtctaatccaggaggagaagactattttctatacataaaagtctccagagaactggcttccaaaatttcctttcagtatacataagagtctcaagtctgcagagctttgtggtccctctcaaatagctcaggcaaaggttaaatctccatccttcttccaaccagatatttaaaaaacaatatttgttacacaagtcatcatactgaaagttttgttaactcactttggaaaatacgtgagggcctagaactgtgctaagccctctggtgctctgtttaagataaagaacttcacttatttcaaaggtcaggaagaagaaacagaaaagacaacccacagaatgagagaagctatttgcaaagcatatatctgataggagacttcaacccagaatataaaaacaatgcttaaaatgtaagagtaaatagacaaataatataatttaaaaacggtcaaaggatctgaatagacacttctccaaagaaaatatacagatggccaatgatatggtttggctttgtccccacccaaaactcatcttgaatcggaactcccacaattcccatgtgtcgtgtgaggaagccggtggaaggtaattgaattaccggggtgagtctttccaatgctgttctcttgattgtaataagtctcaagagatctgatggctttaaaaatgggagtttgcccacacaagctgtctctttgcctgctgccatacatgtaagacatgacttgatccttcttgccttccaccatgattgtgaggcctccccagccatgtggaactgtaattccattaaacctctttcttttgcaaattgcccagtctcaggaacgtctttatcagcagtgtgaaaatggacgaatacgagccaataagcacgtgaaaatatattcatcatcattagtcattagagaaacgaaaagcaaaaccacaatgagataccacctcacacccactagaatggctacaaaacttgtatgcttgtgttcagaatggcattattcctaactgtcaaaagtggaaacaacccatcaactgatgaacggataaataaaatgtgacccatctagtcaatggcatactattcagcaataacaaggaatgaagtactaacacatgctacttcatggatgagcactgaaaacatgaggaaaaagccagctacaaaaggccacattttgtattgtttcatttacatgatatgtgcagaacagcaaaatccagactcagaaaatagattagtggttgcctgtgatgagggataggagcaatggggagaggtggcaactcatgggtctggaatttttggggtttttttgttttcttttgagacagggtctcattctgtcactcagactagagcacagcgatgcaatcacgacacactgcatgcagcctcaacctcctgggctcaagcaatcctcctgcctcagcctcctgagtggctgcgattacaggcacacatcaccatgctcagctaatttttaaatttttttgctattaaaggggtctcactctatgttgcccagactggtctcaaactcctgagctcaagagatcctcctaccttggcttcccaaagtgctgagattacaggtgtgagccactgtgcctggcctgggctgtttttgaagtgatgaatatgctctaaaattgactatggtgatgggtgcacaactccatgaacatactaaaaatcaatgagtgtacactttaaatgggtgaatcgtatagtatgtgaatatctcaataaagttgtttaaaaaaaggatcccatttaatctccatgagcctcaatttcaccctctgaaaatggagacaccacctacctttcaatactataaaggatatataggccaggtgcggtggctcccagcactctgggaggccgaggcaggcgaatcatgacgtcaagagattcagatcatcctgggccaaaatggtgaaacccgtctctattaaaaatacaaaaattagctgggtgtggtggcacgtgcctgtaatctcagctactcgggaggtggagggaggagaatcacttgaacccgggaggcgggggttgcagtgagccgagatcacgccattgcacccccggcctgggtgacaagagcgaaactccatctcaaaaaaaaaaaaaaaaaaagaatatataaatacatacagatgcatgcatgtacacactcacacatactatgtttcacatagtacctagcccataataaatactaaatagatgtcattctttctcctcttcctatccccacgcttttgtattgttatgccttgatactgtggttccaccacaaattacaaaactcaaaattaaaatgtatttcaacagaggtctaaccatgagaatttcacactgctatcctcaagactactcctacatggctaactctgaagaaatcctggagcctgcgaatgtgactgtctaccttccagacttgtcactacagagtatttggggataaagagtaagacctttttcctctgttccactgccttattagaatgttccttatttctaaccactggacacgggcaccttcacttacctatctttaaaactcagcacaatccttgccaatacagatgctattcagacatttttcctgtcaatttcatctacaatgaaaatcaactgggcctccaagacagctctgcaggtgtccccaaaacaccttagctttgatatatagcactgcccacctgattattcactgtgatactaggcagattcaaagagggctagaaattagggaaccacctacagcttgcaacaaaaagtcaactgcagccagctgggcccagtggctcacacctgtaatcccagcaatttgggaggctgagggggacagatcacctgaggtcaggagtttgagaccagcctggctaacatggcgaaaccccgtatctactaaaaatacgaaacagccaggcatgattggtgcacacctgcagtcccagctcctctggaggctgaggcaggagaatcgcttgagcccgaggcagaggttgcagtgagccgagatcttgccactgcactccagccttggcgacagagtgagaccctgtctcaaaaaaaataaatagagagagagtgagaaatgacagcccaggacagataatgccatctattaaaaaagcacttttgctgtaaagttgccctaatatagtagttactagcggcctgaagctatttaaattatcgaaattaaataaaatttaaaattcagttcttaaatctcactagccacatttcacatgcttagcagccacatgtagctactgactatcttattggacagggcaaatatgggacatttccatcatagtaaaagctctattgaacaatgctgattcaggcagtaactgcatcgattctataaagttcacaagttctgagttcttaggtactgtagtttcagtatttgctgattgtgaagtttgactcgcactagtacgatccaagtgaggtttgcctaggtcagtggacaaggttttttggagtgtacactgagctcagcacgaggtaagcacttaatatttgctgaatgcttaaatcaacagcataataatatctgtacttcagactctgccttgatactttcagatattagctcatggaaagcaatggttaatttttcttcaagggagattttttatttttatttttatttttatttttgagagggagtctcgctctgttgcctggctggagtgcaatggcacaatctctgctcactgcaacctccgcctcctgggttcaagtgattctcctgcctcagcttcccaagtagctgggattacaggcacctgccaccatgcccagctaatttttgtatttttagtaaaaacaaggcttcaccatgacagccaggctggtctcaactccgctgacctcaggcgatccacccgcctcgggctcccaaagtgctgggattacaggcgtgagccatggcgcccggccaagggagatttttatagggagatataagcatcagcgggtggggaaggtggctgacagaccttttgtagccactagaaatgaatcggcgaaacataaaaatctgcccaaaagtaactttgctattcaaacaaagtttcagatgcaagaaatatcttgcctcttcaaacactcactacttgcaccttgtagggacatgaaggcagagtcagaggagacactctggaagatcacaaagcctgctgtcaatttccaagcatttttccaatataacttcgccagaaaataacacagtcacgaagacagcagccatctaatggcatcgtctgtgccatcactcttatacctaaatttccactctcctagtgtcctatgactcaatcaaaactgtgcctatcaaataacttcttgaaagtacaagtttttgaaaatctacattcaaaaaagcatgtaagtttccatatacagagaaaagcagttccactggcccttaaccagtaatctcctagaggccaaacaaaagaagctacagctgcttctattaaaattttctacttctcttgtccacagaccaaacaggcataagaaaaccaagctgctcgatttctataattcactttttcttagcaaaggtctgagaacagaaggccagggaaacagggagcagctgccgcctggtcttatgaatgccctcggctcattccccatcctcctcctcattgtttcaagctccttttcttaacaatctctaagccccagctcatgggaagaaataacaaggaaaagcagccttcactgtgtcaacaccctctgtggttgaagcatctagatcacttctctgaggtgatgcaattagaaattaaattagaaattaaaaagaaattaaaatacattccattttaatttgttaatctgctttattgtgaattccaattaatgacacataactacgtggaactccttacatgtggtcctacagagatccttttagacaccccaggggttttgttgttgttgtttaattacaccatttctatctcttgagccaaacaacaaatctggtcccactattaagccaacaaatgtataatggtcggtgatgaattagtcatccaatattcagattccaagactcgaataatctaaatattagagccaaagagctcagtttctgcaacacgcaatgctaactttgagacataaaaacagaatggtggttaagaaaattggatgacctgagtttaaagtctcagctctgccacttactcactgtgggatcttgagcaggttccttaacctctcctgacttcagaatggaaataatgacactactgacctcatgggttgtcatggggaataagggagacaacccaagtaagaactcaataaacattagctgtgattgtaaaaacgccccatgccaggaaaatatcactcgaaataagcgttttccaaaagttaggacttggccgggcctggtggctcatgcctgtaattccagcactttgggaggccaaggaaggcagatcacctgagctcaggagtttgagaccagcctgggcaacacgatgaaaccccgtctatactaaaaatacaaaaattaagctgggcgcagtggcgtgtacctgtggtcccagccactcgggaggctgagacaggagaattgcttgagtctgagaggcaggggttgcagtgagctgagatcgcaccattgcactccagcctgggtgacagagtgagatcttgtgtcaacaacaacaacagaaaaatcaggacttaacaagaaacttagaaaatgctgctttctcagaagacccgtgtgaaaataccatgtaagaaaagaacaccagcttaggtcaaaatgttaattttcccagttatcctaaatccctaactccaataataatcttttaaaaatatccttcaacatgtataaattattctgattcatctcactgatgtacactcagaggaaagggaatttcaaaccagatggctcaggagtgagtggtcctcaagtaagcctcaaggagtgagtggtctgccatggccgcagcctgacatgcaggaaggggagaagagcgggcggatccctcacaccaccggtgtcaccaagagagaaaatgctctgccacctctgtgccctgatgtgtcaacaaagtccctccccactaggcaccaactgggcccaagtttgttgaccttctgggcgcagtgaaaaacctttcttttggtagagcaaacaagcactgcagggacatgcactgtttttatataaataagatagcacacgcaaagattcattattaatgttgagttatgccttattttcaaatgaggcatggacatttggtaatttggatttaagaataacttgttaactatatgctgcaaattatcctttttctccattgtaaattgcaacagccactacaacactacttaatttggagcttgtgaaaaatgtccttgaaagatggtcaacgtaactcagaaacactctttgaaaaaataatgccaccacttaaattctttccagcaaatccctgagtctgcatacaatatcacaaacaacacaagctgtcaagatatgggcactccgaacaaatgctctggagaatttcacatggatcctgtactctcctaaatgaaagccaggctggtttaactgtaaaagaactaggaagaactgagaggcaatattcaaagtgaaaacacttccactcttagcaaagggaagccaaggacctctgtgcttggcccagacggtccgggaagaacccctaaatggtgagaatcacaacagcagtaattcaaggtcacactagatccccagcctcctataagcctgattcacatactaaactccacagactttggtcaccagattattttttacagtctgacccaacttcaatcatgtctgaattcctttccaaaaattggaaacgatcactatccataactcacctcccaatccaacccaaacccaaagacactcttttcataatgtccaaatgacattaccccatgtaaacctcaaacaaaccagtctttaagccaaagcagatacacattttaatattcacatggttttgcctcagcatctcttaaccaagactgcaattaacctatcaccacactggtgtcttagtttatgaataatgcatgacaaatcacacctgaatttctataaaagaaaaaaaatcacctccaaaagtagtagtaccatggacatgttttttcaatgtaatgccacgctaaattccactcaaataattttccatcagggctggcaaacaaatatgtaaatatcaaggttttagaaagagggcagagccattgactgaaagtacctttaaatttttctttttcaatgagctacttccatcttactttatttttttatttccaaattcccaagatttactagcctgtaagaatttccaaggttactcaattttttaaattactagtatctgattaaaagcagaattgaattgcttaagtgcaatgtacataataaggtatatgttattctttggtcacaaatgaacagtgtcaacaaaactttctttaaagaaaacacacattaagattggcaaatcaagcttcttatgctcgcatttaaaaaaaaaaaaacaacaacaacattcaaccacggaatttggccgtaataaggttattttagctttgtagctctaatcactctcccacattcaatggtcaggataagagtgctgatccattcacagaacacacaaacagatatttagaatgtgaaattaagagtacatcactgaataagtaatgcataaaacgtgtctaggcatggaaatatcaaatggtagggctagaaggctctgaaagagcatctacctaatcccctcaccctaccaggaaactgtagcgacagaagttaaataatttgcccaagacggtggcaaaaactcacccagtcagtggcaaagcctctaagctaggtgtcctacctacagatccaagtccctttcttgataccactctactccttttagtacaaaaagcttctattaatgaaatatcttacaagacaaatcacttgtggatggatataaaaaggttgtggaaggacatccagccagccactaaaaactggttgaaaaggtgctaatttattttgcatttgcttaactggtgatgttgagcatgttgcacttttaactgctgaagaggaatttcatgactttttgaaaagaaaacctcttggtttgtaaatactctcagaaaagaaaggatcatttcttggaaaagggtagaaagtgaattccctttcctttagcaggggacatcctttccctcacatctcacaaaaatccaatcaacccctccctttcaaggtccagcataactgccagctcctctctgagaacttccaagcccggaggccagaagcttcctctgagatcctccatggtagcctacgcataagtctctcccaggcaagctctcaagcacgcttcttgaaagcagaaatcctatcctacttacctagctaccgggctttgcaaaatcctttgcacatactcaattacaacgaacgcattgaggcatttgttgccagaatcccacttacagtaattttccagatctccgtcttccctacaccaacacctggacccactcaagagttattctggagcggaaatcctggatcccgctatcgggagaaccagtgtctagaaaatgaaatcgtggtgcccattccatcctctgcctagtgggcgtttaacatcctttgacatcgaggggaatggcaaaacgaaacatttattatttaggtcaccaacaacattctaaacccacgtcctctaatcggtgttaatgtgtttaaaaaaaaaattcagaacatcattcgccagaacggaaagctgaaaacggcggataaagttaaatgcatgtaaaacagaatgacttaaacatctgtaaaagctcctgggaattgcaccgaataatcttcccttgtccgtttgctcgctcaattcaagtttgtttagtttagtctttttttctttctttctgacagaaacgtgatagtccctaaatacaagctgaccgggcaaagaaagatcggcatacgaggtcctctttcatgttgccttcttttgatagcttttctccaaagtctgaggttttcaaagccgaggtatgaactaaaacccctaaaccttaacaccacaaagttgaccctgctgggctcctaaaaaacacaaagcaagcaagcgcgaagagaaaaatcgcaccctgcacctatccagacagcacaaacccaggtggccccgggatcctgggggacagagcggcgacaaagcaacacaaaccccacgtcgaacagcggcgccgcgtgcgcaccccgcgcccgcgccccggccccggagctcaccgctgcgctccttccttccatcttccatcgccagcccggccgcgcgccgaaaccgccgccgggcgctccggggccgcagcctcagggcgcgagtgccggcggccagcgccgcgtgctctttgttgagctcccgggactgccgagaggcggcggcccgcgcgcaccctggcggaggctggcgaggctgcgagcccgcggcagccgcccgcccggcccccagtaacgtcaaagcgaaggcggcgcaggcgggccggcggtggcgggccccgggggcggagggcggagggcggagaggcggggccgacgcctcggggaggggggaggtggctgggcctccgaggcgggggcggggtctccagggcaggggcggggcctccgggggaggctggaggcgatccagaccctcgcagtgcagccctcgagcggcccggaccgtccgctgcctcccgcagccgcgcgcccgccctgggcccagcctccagcccgcgagcgaaaacctgcctgttgctttgtcttcttccttcacagttttcccaccctgagaaaagtgagaggtgctttccctggtgtttcctctcaggaagggccgtgtgactggagccgcgagttgggcgccgtctcgccggggctggaggtacgcgggcttcgggacacgcacctaggcgtccctcggggtcccggcctctctgaccgggctcccccggcaccgatccgcggccggagcgtttagtcccggggacccgtcgagccctgaaagggccatttccccctgaggcgagtccccccaggcgccccgcagcctggcctcgggactgcccccaccgacagtgcgtgcgcggggagaggtcacttaaaactgcattttcgaacattagtgccccggacccgcaccttttttcctccgtcctttgatctgtgccgcagaggcaagggctggaacggcgccctcccctggtagagggacggagagaccgcaaatctttccccctgggaggtccgttaagtagatccaagcacctggaggcggaacctgtgtggccggctacagggtggtcctgtgtatgtgttaccgccttattgttccaaagaacagtctttttcaagtgacaggtagaagacgccccaataacgagaagtgactgacttggccaagcttagagatgggagtggagtcaggttccctggtggccccacgatctcgcccaccatgtcagcatgggctgcccggtgagcatagctgagatgcaccaaggccacataagtcacctactttgccttggctgccccatctgcatctatcaaaggaagccttggacacccaccagaggagccagcatgagggagtgtatgcctttatacaaattcactccaacttcagaaaaacgtccgcagctcatgctccccctgccagagcagcagtgtgagcagctgtgtaggtttggaagcaccccagtcacttgggcattgatatggtttggctgtatccccacccaaatctcatcttgaattgtaagtcccgcagttcccaggtgtgtgggaggaaccttgtgggaggtgattgaattatgggggcgggtctttcctgggctgttctcgtcatagtgaatgagtctcacgagatctg
